United States Patent Application Publication US 2018/0305689 A1 - sequence listing, part 135

SEQ ID NO: 1886213 - DNA, 4001 bp, Homo sapiens
taaaatgaagtgattactcttggcagtaatttatggctgaaactctttgatctcagactaaaaaagggaaaatcagggaagcaggattaaaagttgaaacacattttagctttagtatgtcgagaactcaaaaggtgaaaagcacttaaatttatcagttgtgtattgactaagtaatctccaaggaaatccttaagcaaggagttcactgttctgacttttggctttatactttacccaacttcatcaatatttccccaaattctaaactgtacaatgcatgtgggcctctattaagatctatgagaaacttctttgcatgtggtgtagaaataatcacactaaatcttaacaactatatttgcttgtatattcaattatgtagcacatagaatagaaaagcatgaaggtatcacattaattccctctctgcaaaacaagagacatgtgccagttcaagtgatctgtcaaagaaagtataaagaattgagtaccaaaatacatgaatatgtggggacaatactgcaatccttaagacttgagattgttcagcatgtttttataacagagaaaaaagtataagagaatttaagaatatacatagaaaaaatataaatgtgttaaaataaaaatacttgagtaactactcatgacatgatttgctaaaaagccctgtgctaaagagagaacccacttgatctattatgagggcatcaatcaacaagcaccatgtaatacacaatctacttgagactttttttatgtattaaccaatattttgactagttcgataagttttttttactttctatcgaagaataatatacatgtagaaaagtgcatacactaaaattgtaaagctcaatgtatttgcatgatgcaatcacagcaagtactcaacacacagatcaagaaataaaaattacatgcattctagaaaccagccaggtgtcttatatctatgattatctcagacatgccatcaagagaagaaaatttcctatataacttaccttgttgcaacaatgaggaaaagactaattcaagtcaatatttaataattaaattagaagcagaaatataatgtagtatgaccacaaagatattatgaaccatggagtctctattctgaaaccccaataattaaacagatggggaaaatctgttaatattttggcacacctggatttcactacaatacattttgatccaatatgaaattgccaaaaattctcttaaattctacatttttccataaaagcaaaagagagttaaaattaaaagagaaatgataaggattcaatagtgtaggtgacatggtgagggtctcaatgaggaaaaggacatatcatgaaaatgtcctccaataagcttctgaaaagatgtacaaaacgacctaaagacctagcaaagagcacatgacatatgaatttcaaaagataatggcttagctactcacccctgttctctgaagtggaggatcagattccaggccttctatctcagcaaaacatgaaagaaaaaaaaagcaaaaataatcttagaaaatactccacagtaaaaataacaaagcaataaacttggttccactgtcattatttaatagaggcatgccatatttccttctttcagcacaacactaatgagattttcagacatatcacagttgcttgacccttaattcaatcttctaaagtttttcatttgttacttaagaaatatttcctatatgtaagtatctatctacaattaaagcaagtcttgggtcactaggcacactaaagtgcacactgactcataagacaggatgccactgccctcttcgaagagatagaaaaggcacgctcacaggggtactatgttgtcactgagggatccccaaatagagccaggctctgagagtcttatttgtcctattggagggccgcacatctggacctcagattgacatctggaatgagtccctcagcatcctcagacaattattctcatcatcgatccaaacaagcaccctcccaacaaataagcgtttccacagccaggcttattttgtgcatggttatctaatgcatcatcagtgagaacagtaaatgtacagtagacatttgtttagtatctgaataatggaactctcatatacatagcatgaaaaaacatatgactgaattgttctaataaaattagattaaaatctggccgggtgcagtggctcaagcctgtaatcctagcactctgagaggccaaggcgggtggatcacgaggtcaggagttcaagaccagcctggccaagatggtgaaaccctgtcactactgaaaatacaaaaattagtcgggcgtggtggcaggcacctgtaatcccagctacttggcaggctgaggcaggagaattgcttgaacccaggatggggaggttgcagtgagccaaaatcacgccactgcactccagcctgggcaacagagtgagactatgtctcaaaaaaaaaaaatctattgggggactttataaaaactctttaattaactaaaagtttaaggagtaagtggggtaacagaataatatatggtatgattacagtactaatatgtatagaaacatctatgttatgaatgtgccagataaagatgtaaaaaaacaatatttagaacatgtgaatttcactacaagattattttcacccaacatgaacagtgaaaaaaggaaatatatcaatgattctccacagttgtttaggtcatctcaaaaagagatttaaacaaagagaagaaacaataataaggaatccttgaacaaggtagggacacccatggggaaatatatctaccaaaagaataatctcctttaagcctctgaaataatgaactcacagtctttgacattctgacatcattgcccacagaacaaagaatttcaaaagtaccaaagtggctgctcacctcttttccctgaagtttccttgaagttgtttcagcttttaacctgcagcaaaatatcacatagaaaataaatcagatcagagaatgctccaaattaataaaaaataaagcacaagattggttccattataatttcttatcatacaggcatctcagccctctactccttgctacaaacgtcagcattgcttgatctcatcacctttgtcatttcatttataatctgtttcctccttgaattctttactctgaaaatagccaatttcctctctaccaagctatccaagtgacacagtagttgtatcttgaatgggaaatgctaaagttgtggtctaccaataaagattttatgaaaatacactgtgctgtgaaaaatgaaagacacgtgatagtgctattgtgagataattgaggagttcaccagttaggcctgctccgaatgtgttatttatcctgttgcaatagaacagatggccattcattcagccacacctcagcatctcagatacttgtacttatccttgatccagacaagtctactaccaataagtaaacattcctcataccacactgatgctcctaacattgtatcccctgcattcagcttatagcagaaaacagcacaggtggatgtctgacttgactttaatgaaactggctttcacaacagctccagaagcttctcagaaccctttggtctaagcaaaatgtgaagtgatattgcagtgggatggctgtcaatgctgatatatctactgaatatgatagaaataaaaagtcaggagttaactatgaacttggattatatcatttaaaagattattaaagtatgttaggatctatttgacagcagcatacaacatgatattccttccatctgacaggtgtatattccctatccagggtagaagactagcatacaaatgtcactaatattgtgacaaagtagaaataagacaactaaacacaggaggaggaaaaaaaaaaaaagaggaaaaccgaaagcactttgcatgagaataggggagtgctgaagaacatcccccaaactgataaatcagaagtaa

SEQ ID NO: 1886214 - DNA, 4001 bp, Homo sapiens; identical to SEQ ID NO: 1886212

SEQ ID NO: 1886215 - DNA, 4001 bp, Homo sapiens; identical to SEQ ID NO: 1886213

SEQ ID NO: 1886216 - DNA, 4001 bp, Homo sapiens
ctaggctgggcctcagcataatcctattgagcatgatttttaagtcatcacctctcttcaagaaaacagaagcttctcatcatcgacccaacccggggaaagcccctccccatgcaaacatccagcaggacctggatgtgctcaccacagctcagtgcaggagaccagagtgccagggagggctgagcttcagcgcactggggtctgggcacctggctgatggacactggcccagggacagtgggaccagggcaagtcttcctccaggctcactgtctggggggacaagaagacatgtgtccaaacatggcctcacgcctccatagtgggaaggtggtgggtggtgccagctcatgcatgctctccctccatggacccatgtgatgggaacactgacccatcacagacgcaggagacgcttggtactccccatcactgcaaagcgggggtgggtcactgagctaggactaggacagggcaggtgggtcactgagctcgtgcaaggcacctaggctgcgctctattgcaggccccacaagcacctccactacccacaccagctcccctgcaggacccctgggccactccaagaccactgggcacaggacagggcaaccaacctgctcatggccaaccaaggaggctgacctggaagccacatgccactgcagacctggcagttgcatagcctgtgcctgggagtggagggcactcacccagagttctctccaagtgtgcatgggaaatcataacctggggccctgggccatgtgtgttctctggtgggtccccattcataccctacacacctcccaaacacagagccaagccacactcagccaactggggaacacagggtatcttctcctttcctcgggcccaagaccccaccaccctggaggtgagtccgtggatcagaagaagcctgggaggcaaattccctggacaggaccctcgacagtgggccttcccagctaaggatgccacccttcctgctagttgcccacagggaaggggtgacctccagtgggacacgggctggcccctttgcccaaagccagcgagtcccagggccagcctgcagcactaccaggcaccggccagagctcagccttgacccaacccccttgaagccacatcacccccgactaggctccgaggcaccactgggatggtccattgctcaaaggctcagtcccattcaggttcatgggtggggcccaatccttgatctccaaaggcctgaccccataggcccaatcgctcacccctctctggggaaggagagctcctgtgtgacccctgtggtgccccggagctcctatggacccccttatgtgacctgggcagtcctcatggccagacctgcacactgagtctcagctgggcgctgtcctgggtggggttgaaggaaccctttgctgcctggaccaccctcaccactgcagggctttagagaagatatcctccttgggtcagactcccaaggaagctgccctcctggagaacctagccctccccagtggggattcaggttggctccctaaggaaaccctcctgtcccaaaggctgacccttggcgaccccagcagcctggctcatggcccatgaccccagcaggatccactcacctatgccggtcaatgccagggggcctgcctgggcagaagagctcactgaaagacacaggggagaatgggggtcagggaggagccacccacatgccctgcccctagggaaccagagccccagcctatgcccacacagggatccttgactgcctcacggggttgctcagagataggcttgggccaccttcagatgcccttcagggcctctaggtctgcagcccgaaatacagtggccccgtcgggggcctctggatcccagcatcctcttccaaaattctcacctaggctgggcctcagcgtaatcctattgagcatgatttttaagtcatcacctctcttcaggataatataaggttctcatcatcaacacaacccagggcacccccctccccgcccatgtatccagcaggacccggatgggctcaccacagctcagtgcaggaggccagggcatcaggaatggcctgagcttcagcgcaccgggggctggcacctggcagacggacactggccgagggccattgggcccaacacaagtcttcctccatggtcaccatctgggggaacaggagtaggacaggtgtccaaacagaacctcatgaaggtggtagagcccgccggctcagctaggctctccctccatggacccatttgctggaaacgctgacccgtcacggacgcagggcacccttggccctccctgccacccaaccctggaaggacaggacaggcgggtcactgggctcacacaagatgcagaggctgtgccctactgcaggccccagggagcacctccgctgcccacgctggctccccacacacaaccccctgggccactccgggaccactcggcacaagctagggccaccaaccaggtcatgaccagacaaagagactggcccagaaaccacttacagctgcagaccgggcagtcacatagcctgcccctgggcatggtgggagccctcccaggcgtcttctccaagcagcatgggaaattgcagccttggcctgggcgccacgtgatttctgcggcggatccccaaccacaccccacacttccgttgaactggtctaatttgggcgtcagctcttatttttcgagcgtgtttgtgaatattttaatgtcttgcatcattttacttttgaattgtttgaaactacattttttatgtatatgcattcatattttgtaacttatttttggtacgtgtcttcgtttgtatacaactactcttgtatgttttctaatgtaagatgtattttcttttttgtcagtttttctatttgtattaccattgtcaaaatgaaccttgaattatcccagtgtttttgaccgttttatgctttttcctcatcttaccgattctatgtattttttaaaacataatttttagggaggccgagttccagaacacggggtctcagttgtcccagccttttgagtccctcaagatcgctgtgcctcccgataccgccgccgtgcctgccaagcctgcaaccccagctacacccggatcgccgacctcaccagcagaacaccacctgttggagacctgctggagctgtcacgtgctttctgggttgcggctgatgggggcaggcgggtatgtgtactgggtggcacagaagcccatgaagatgggataccccccgggtccatggaccattatgaagatggtcatgggccttagcattgccgcctggggtatcattgtcatggcagaccccaaaaggaaggcctaccacattgtttgaaagtaccaccagtgaatctgtcttctgtccctgccctcataacacacagagcaggcatggaatttaatggatgtcctggacagacacttgtacatggacagacatcactactgtggatactacaagactgaaaagaaaatcatatgttgtcattctctggctatggagtgttagcggcctccacagatttcacaggaaccaataaatccctcagagaagtaaacaggttctttgtcttatctggggaaggaaagtataacttatatttaaatataattgtttaattacttaagcattatataaaaacattatataataatgtcttatgtaattgcatatcatattatatataataaacataaatatgtttagttatatagtttatataatttttaaaactacaacaggaaaattagctattttacttcgttattttaaagagttctttttatttctttcattattggatcaacaactgttatcaacctaaccctgggtgggcatcatgcaatatacggaagtacatgaaactttctatgtattaactgctcattctttgcaaggcattttcaaatccatcactttatgagagcttcacagctagtctgaggc

SEQ ID NO: 1886217 - DNA, 4001 bp, Homo sapiens
agcctgcacagggaacctgggctgcctcccagaggagcccagagccagggttgtgccccccggagatgccgttcagagcctcagggtctcctgcctaaaatatactggccatgctggggaacttgggatcccagcatcctcttccaaaattctcacctaggctgggcctcagcgtaatcctattgagcatgatttttaagtcatcacctctcttcagaacaatataaggttctcatcattgacccgacccagtgcatccccctccctgcacacgtatccagaggaacccagatgtgctcaccacagctcagtgcaggagaccaggatgccaggaagggcctgagcttcagctcaccaggtgttgagcacatggctgagagacactggcctggggccagcggacccaatgcacgtcttcctctggggtcaccatctggaggggtgggggacacgtatagaaatacggcctcacgcctccatgcaggaaagtgggcagggggtgctggctcacacatgctgtccctccatggactcaagagatgggatccatgtaaacagtaacgatcatgaatgtggggaacccttggccctccttgccacagctccctcacatgactctatgccacaatgggaccactgggcagggccaggaccaccaacaagctcagagcaaaccaagtaggctgacctgaatgctacgtgccactacagaccccctgtaaaagctcacaccagaaatcaaatcctggagccccagggccacatgccttctctgatgggtccccattcgtgcaccgcacacctccaaatgcagagccaggccatgctcagtcaatcagggaacacatgatgtcttcccctttccttcggctcaagaccccgccactttggaggtgaacccatggcttagaagcagcctgggcaacaaattgccaggacaggacccttgacagtgggacttctaccacaggatgccatccttctggccactccactttggggaggggtgacctttagcgggacacagactgcacccttggcccaaagcccaaattcccagggccagcctgcagcaccaccaggtgaaggccagagctcaggcttgacccaaccccactaaggtcacaccacccccacaaggctcaaggatgcaccaccgggatggcccattgctctacaggttcggcccatgctgggccatgggttgggcccaatccttgaatcttcacggcctgactccataagtccgatcacccacaccctgcccctctgcaagcctcggggacagagagcaccctcataacacccgtggcccctggagaccctgtggaccccctcatgtggcctgggaagtcctccaggcctgacttgtgcactgagtctcagctaggatgtgcactgcattgagttgaaggaagcccttcctgcttggacgtccatcatctctgcacggcttcagggaaggcatccttcttgggaccgacttccaaggaagctgtcctcctggagaaaccatccgtccctggtgggtttcagatgggctccctgaggaatccctcgtggcctgaagggtgactctcagtgacccaaagcgacctggctcatggtccacgaccccagcaggatccacttacctatcccacttaaggccaggggtccccctgggcagaagagctcgctgaaagacacaggggagaatgggggctcaggaaggagcctccaatgtgcctcaaccccagggaactggagggctgacaccaagcccgcaagggagcctgggctgcctcaaggaggagcgcagagatggggtcgggcacccctaagatgcccttcagggcctccaggtctccagcccaaaatacagtggccctgccagagaccttgggatctcagcatcctcttccaaaattctcaccaaggctgggcctcagcgtaatcctattgagcatgatttttaagtcatcacctctcttcaggacaatataaggttctcatcatcgatccaacccagggcaccctcctccccatgcatgcatccagtgggacctggatgggctcaccacagcttagggcaggaggccagggcaccaggaagggcttgagctcaagtgcaccaagggctgggcacctggatgacaaccactggcctggggccagcggtcccaaagcaagtcttcttccacagtcaccatctggggggacaggaggaggacatgtgtccaaccatgggctcacgcctccatacagggaatggggttgggggtgccagctcacacatgctctctctccgtggacccatgtgatgggatccatgggaaacactgatgtgtcatagatcagcggaaccctttgctctcccagccactgaaccatggaaggacagggcaggtgggttcctgggctcaggcaagacacctgggctgtgccctactgcaggccccttgagcacctccattgcccatgctagctcccctgcatgaccccgggtggtatctggatccttgggtaggggccacggacaccaaagagctcacagcaaaccaaggaccctggcccggacaccacgtgctgttgcctacctggcagttgcacagtctgccctgtgcatggagggcacccaccctcctttcctcaaggtgcactggaaatcgcagcctggggctccagggccacaagctttctctggtgtgtcccaatccatgccccacacaacacctcccacacacacagcagggccacactcagccaaccgggagacatatggtatcttctcctttctttgggcctaagacccgcccctgccccccaacccgctggagttgtcctaatggctgagaagcagcctggactgcaaatttccaggaaaggtccttccactgcgggccttcccaactcaggaggccattactgccactcgcccacaatgaaggggtgacccccagcgggacatgggctgcagccttggcccagagcccacgagtcccaggagtggattgcaccaccatcaggcactggccagagctagtcttgacccaacctcagagaaacagcgccgccccacaaatggctcaaagaggtgccactgggagggcccactgcttatagggtcagtcccattgagggtcctgggtttgctgcaatccatgaatctccatggcctgaccccatggaccgaatcacccacccttctccagggttggagagcccccgtgagatgcccttggctccccggagcccttgttgcccccctcatgtggcctggccatgttagaggcctgacccaagcaccaagtctgagctgagcactgccctgcgtggggctgaggaaaccctttcctgcctggacaactgccacccctgcggggcttcagagaaggcctcctccttatgtctgattcccaaggaagctgccctcctggagaacacatccccagttgggattcagatcagctcctgaggaaacccaggtggcccgagggctgacccttggggaccccacgcagcttggctcatggcccatgacaccagcagtctccactcacctatgctcgtcaatcccaggggtctgctggggggaagagctcactgaaagacacagaggataatggggctcacggaggagccgccaacgtgtcccaccccagggaagctgagcgtggacaccaagcccacacagaaagtctggtgtgcctaatagaggagcacagacaggattgggcccctccatgaggtgcccttcagggcctcgaggtatccagcctaaaatacagcagccctgctggggacctcgggattctagtgtccccttccaaaattctcacctaggctgggcctcagcgtaatcctattgagcatgatttttaagtcatcacctctcttcagaacaatataaagttctcatcatcgacccaacccagggcacccccctccctgcctaggcatccagtggcacccggatgggctcacccaagctcaacgcaggagaccaaggtgacaggaag

SEQ ID NO: 1886218 - DNA, 4001 bp, Homo sapiens
attctcacctaggctgggcctcagcgtaatcctattgagcatgatttttaagtcatcacctctcttcagacaatataaggttctcatcatcgacccaacccagggcaccccccaccacacacacccatccagtgggacccggatgtgctcaccacagctcagtgcaggagaccagagcaccaggaagggcctgagcttcagtgcaccaaggctgggcacctggatgacaaccactggcctggggccagcaacccaatggcaagtcttcctccacagacaccatctggggggacaggaggaagacatgtgtccaaccaggggctcagacctctatacagggaagggggtggggggtgtcagctcacgcttgctctctctctatggacccatgtgatgagatccatgtgaaacactgatgtgtctcagacgtgggggaccctttgccctcccagccaccgaaccatggaaggacagggccggcaggatcctgggctcaggcaagacccccgggctgtgccctactgcaggcctcccttgcccacgctggctcccctcatgaccccaagcagcactgggacccctgggcaggcgtcaaggacaccaaccagctcacagcgaaccaaggacgctggcccggatgccacgcaccactgccaacttggcagctgcacagcctgccctgtgcatggagggtgagcacccagtccccttcccaaggtgcactggaaattgcagcttggggttccagtgccacgagctttctctggtgggtcccaatccatgccccacacaacacctcccacacacagagtggagccatactcaaccaatcgggagacatatggtgtcttctcctttccttgggcccaagaccccgccaccccggagatgacctcatggctcagaagcagtctggactgcaaatttccaggaaagttccttccacagcgggccttcctacctcaggaggatacccttcccaccactccctcataaggaaggggtgatccccagtaggacacgggctgcacccttggcccaaagcccacgagtcccaggactggactgcaccaccatcaggcactggccggagctagtcttgacccaacctcagagaaacagcgccacccaccacatggctcaaagaggtgccactgggatggcccattgcttaatagggtcggtcccattgagggatatgggtttggtgcaatccttgaagctccatgacccgacccaatgggccaaattgcccacccttctccagggttggagagcccccatgagatgtctgtggtgccctggagcccttgtggcccccgtcatgtggcctggccatcctagaggcctgacctgagcaccaagtctgagctgagcactgcccagctccactgtcctgtgtggagctgaggaaaccctttcctgcctggaccaccaccacccctgcagggctccagagaaggcctcctccttgtgtcagattcccaaggaagctgccctcctggagaacacatccccagtcaggattcagatcagctcctgaggaaacccaggtgacccgagggctgacccttggggaccccacgcagcttggctcacagcccatgacacgagcagtatccactcacctttgccagtcaatcccagggggcctgctggggggaagagctcactgaaagacacagaggagaatgcgactcaggaaggagccaccaatgtgtcccacccccggggaagctgagtgcagacaccaagcccacacaggaagcctggtgtgcctaatggaggagcacagactgggttgggtacccctccatgatatgcccttcagggcctcgaggtctcccgcctaaaatacagtggtcctgccggggaccttgtgattcccagcatcctctttcaaaattctcacctaagttgggcctcagcgtaatcctattgagcatgatttttaagtcatcacctctcttcaggacaatataaggttctcatcatcgacccaacccaggacacccccatccccactcacacatccagagggacctggatggactcaccacacctcagtgcaggataccaggatgacaggaaggacctgagctttagcgcacgggaggctgagcacgtggctggcagacactggtccggggccaaagggcctaacgcaattcttcctctgtgctcaccatctggagggacggggaaaggtgtccaaatagggccttaagattccatgcaggaaagcggggaggggctgctggctacacatgctctacatccgtggactcatgtgatgggatccatgtgaaacgaggacagttatggacctggggaacccttgtatctccccaccaccaaaccctggaaggacaggacaggcgagtaactaggctcaggcaagatgccgaggctgtgccctaccgcaggcccctggagcacctccactgtccaagccggcttccctgcacttcctgggctgcattgtgacccctgggtaggagccagggccaccaaccagctaaggccaaccaaggaagcttgctctgaagctaggcgccactgtagacctggcagacgcacagcctgcccctgtgcagggagggtgcccagactccctctccaagcacgcaccaaaaatcacagcctggggccaccttcatgtggcttgggcagtcctcaaggccagaccctagcaccaagtctcagctgggagctgacctgcatgggactaatggaaccctttcctgcctggaccaatgtcactcctgtagcacttcagggaaggtgtcctccttgggtcagattcccaaggaggcggcccttctggagaaccaatccctcaccagtggggattcaggttgtctccctgaggaatccctcctgtcctgatagctgaccctcagtgaccccacgtggcctggtccatggcccatgaccccagtaggatccactgacctatgctgctcaaggccaggggtcctcctgggcaaacgagttcactgaaagacacaaggggagaacaggggctcagggatgagccacccacatgcaccaccaaggggaatctgagcaccgacacgaagctcgcacagggagcctggactgcctcatggaggaacgtagagacaggtttgggccccctccagatgcccttcaaggactccaggtctccagcccaaaatacagtggccctgtcagggacctagggatcccagcgtcctcttccaaaattctcacctaggctgggcctcagcgtaatcctattgagcatgatttttaagtcatcatctctcttcagaacaatgtaaggttctcatcattgacccaacccagggaacccccctccctgcttaggcatccagtggcaaccggatgggctcacccaagctcaatgcaggagaccagggcaacaggaagggcctgagcttcagtgcaacaggggctaggcacccggctgatggccactggcccggggacagtgggcccaatgcaagtcctcctctggggtcaccatctcgaggaacaggaagaggacaggtgccaaatgcaacctcacccttccatgctggcagaaggtggggtgtgccagctcagggatgctcgccttccatggacccatgtgatgagatccatgtggaatactggcccatcacagacgtgggccacctgatgctctctccgccactgaaccctgaaaggacaggacaggcaggtcactgggctcaggctagaagccagggctgctccctactgcagaccacacgagcacctccactacacatgccagctcccctacatgacaccagggtcaccccaggactactgggcacaggccagggccagcaaccagttcatggtcaaccaaggaggctggcccgtatgcctgatgctgctgcacagctggcagtcacatagccagtccctgtgcatggtaggcacccacccatatgccatatccaagcacatactggaaaccacaacctggggccccagggccacat

SEQ ID NO: 1886219 - DNA, 4001 bp, Homo sapiens
ttcggatctcagcatcctcttccagaattctcacctaagctgggcctcagcgtaatcctattgagcatgatttttaagtcatcacctctcttcaggacaatataaggttctcatcattgacccaactcagggcacgccctccatccccacgcatgcatccatcgggacccggatgtgctcaccgcagctccgtgcaggagaccagggcgccaggaagagcctgagcttcaccacaccaagggctgggcacctgactgatgaccactcaccccgggacagcgggcccaatgaaagttttcttccagtctcactatctgggggacaggaggtggacatgtgtccaaatggaacctcacgcctccatgcaggaagggggtgggggatgctagctcacgattgctctcccaccatggacccatgtgatgggatccatgtgaaacactgatgtgtcatggacacaggggaactttggccctctgcaccactgaaccctggaaggacagggcaggtaggtcactgggctcaggcaagacgccctggctatgccctactgcaggcaccttgagcacctccactacccactccagttgcctcacatgaccccagggctgtactggcccctgggtgtcagccagggccacctaccgtctcacggccaaccaaggaggctggcctggatgccacgtactgctgccaatctggcagtagcacagcctgcccctgtgtgtggagggcaagcacccaggccctgctccacaccacaccggaaattgcagcctggggacccagggcctcgtgtgttctctgatatgtccccatccatgcctcacacaacacctcccacacacagagtggggccacactcagccaatcgggagacacatggtgtcttctcctttccttgaccccaccaccctgtaggtgaccccatagcttggaagcagcctggacaggtccttccacagcaggccttctcacctcaggaggacaccctgtccgccacttgcccacaaggaaggtgtggcccctggtgggacatgggctatacccttggcccaaagcccacgagtcccagggccagactgcagcaccatcatggggtcaccagagctagtcttgacccaacctcatggaaacagtgccaccccacacttggctcaaagaggcaccactgggatggcccatagcttaatagggtcggtcccattcagggccatgggtttggagagatccttgaaaatccaaaacctgacctcatgggccgaatcacacatacctctccaaggtcggagagcccccataagacccccttggcgccccagtgcccttgtggttcccctcatgtggacgggccatcctagaggcctgacttaagcaccgagtttcagctgggtgctgccctgcatggggctgaggaaaccctttactgcctggaccaccacaacccctgcagggcttcatggaaggtatcctccttgggtccgattcctaaggaagctgccctcctggagaacccatcccaggtgggcattcgggtcagttcctgaggaaacccttgcagccaaaggctgatgctcggcaaccccacacagcctggctcatgacccatgaccccagcaggatccactcacctatgctggtcaatgccagggggtctgccgggcaaaagaggtcactgaaagacacaggggagaatgggggctcagggaggagatgccaaagtaccccacccttgggtaacaggagcgccgacaccaagcccacagagtgagcctgggctgcctcatggaggagtgcagagacagggttgggcaccctccagatgccctcagagcctccaggtctctagctcaaaatacagtggacttcacagggaacttgtaattcccagcatcctcttccaaaattctcacctaggctgggcctcagcgtaatcctattgagcatgatttttaagtcatcacctctcttcagacaatataaggttctcatcatcgacccaacccagggcaccccccaccacacacacccatccagtgggacccggatgtgctcaccacagctcagtgcaggagaccagagcaccaggaagggcctgagcttcagtgcaccaaggctgggcacctggatgacaaccactggcctggggccagcaacccaatggcaagtcttcctccacagacaccatctggggggacaggaggaagacatgtgtccaaccaggggctcagacctctatacagggaagggggtggggggtgtcagctcacgcttgctctctctctatggacccatgtgatgagatccatgtgaaacactgatgtgtctcagacgtgggggaccctttgccctcccagccaccgaaccatggaaggacagggccggcaggatcctgggctcaggcaagacccccgggctgtgccctactgcaggcctcccttgcccacgctggctcccctcatgaccccaagcagcactgggacccctgggcaggcgtcaaggacaccaaccagctcacagcgaaccaaggacgctggcccggatgccacgcaccactgccaacttggcagctgcacagcctgccctgtgcatggagggtgagcacccagtccccttcccaaggtgcactggaaattgcagcttggggttccagtgccacgagctttctctggtgggtcccaatccatgccccacacaacacctcccacacacagagtggagccatactcaaccaatcgggagacatatggtgtcttctcctttccttgggcccaagaccccgccaccccggagatgacctcatggctcagaagcagtctggactgcaaatttccaggaaagttccttccacagcgggccttcctacctcaggaggatacccttcccaccactccctcataaggaaggggtgatccccagtaggacacgggctgcacccttggcccaaagcccacgagtcccaggactggactgcaccaccatcaggcactggccggagctagtcttgacccaacctcagagaaacagcgccacccaccacatggctcaaagaggtgccactgggatggcccattgcttaatagggtcggtcccattgagggatatgggtttggtgcaatccttgaagctccatgacccgacccaatgggccaaattgcccacccttctccagggttggagagcccccatgagatgtctgtggtgccctggagcccttgtggcccccgtcatgtggcctggccatcctagaggcctgacctgagcaccaagtctgagctgagcactgcccagctccactgtcctgtgtggagctgaggaaaccctttcctgcctggaccaccaccacccctgcagggctccagagaaggcctcctccttgtgtcagattcccaaggaagctgccctcctggagaacacatccccagtcaggattcagatcagctcctgaggaaacccaggtgacccgagggctgacccttggggaccccacgcagcttggctcacagcccatgacacgagcagtatccactcacctttgccagtcaatcccagggggcctgctggggggaagagctcactgaaagacacagaggagaatgcgactcaggaaggagccaccaatgtgtcccacccccggggaagctgagtgcagacaccaagcccacacaggaagcctggtgtgcctaatggaggagcacagactgggttgggtacccctccatgatatgcccttcagggcctcgaggtctcccgcctaaaatacagtggtcctgccggggaccttgtgattcccagcatcctctttcaaaattctcacctaagttgggcctcagcgtaatcctattgagcatgatttttaagtcatcacctctcttcaggacaatataaggttctcatcatcgacccaacccaggacacccccatccccactcacacatccagagggacctggatggactcaccacacctcagtgcaggataccaggatgacaggaaggacc

SEQ ID NO: 1886220 - DNA, 4001 bp, Homo sapiens
ctctcacctagactgggcctcagcgtaatcctattgagcatgatttttaagtcatcacctctcttcaggataatataaggttctcatcatcgacccaactcagggcacgtccttcccggcgcatgcatccagcaggacccggatgtgctcatcacagctcggtgcagcacaccagggtgccaggaagtgcccaatcttcagtgcaccaggggctcagcacctagctgatggatgctggcctgggaccattgggaccaattcaagtcttcctccaggctcaatacctggggaaacaggagtaggacaggcgtccacacacaacctcacccctccatggaggcagaaggtggggtgtggcggctcagggatgcttgccgtccatggatccacgtgatgggatccatgcagaacactggcttgtcacagacacaagtcaccctgtactctcaaccactgaaccctggaaggacagggcaggtgggtcactgggctcgggcaagaagacctggctgtgtcctaccgcaggtcccacgagcacctccactgcccatgccggctccctcgcatgaccccaggattacgacagagctactgggcacaggccagggccaccaaccagttcatggccaaccaaggaggctggcccggatgccagatgccgctgcaaagctggcagtcacatagcctgccccggtgcattgtgggcacccatccaggtgccctatcccagcatgaactggaaatcacaacctggagtcccagggccacatgctttctctggtgggtccccatccatgccccacacacctcctaaacacagagcagggccacacttggctaatcaggggacacatggtgacttctttcctttggcccaatacccactatcctggaggtgaccctatggctcagaagcagtgtgggtggcatattccagggacaagaccctcaacagcaggccttccacctcaggaggccacccttcctcacacttgccaatggggaaggggtgacttccagccacagggaaggggagatccccagcaggacgtggactgatcccttggcctaaagctaacaagtccgtggctggactgtagcaccaccaggcactggccagagctcagccttgaccaaaacctagggaaacagcaacaccccatccaggcccaaagaggtaccataggatggatggcacattgctcaacagggtcggtcccattcagggctataaatcctgtgtgatccttaaatatctgcagctcaactccatgggctctatgcccacctttctccagggatggggagctcttgtgtgaccccatggcatcccaaagcccctgtggcccccctcacgtggcctggtcagtcctcgaggccagaccagtgcactgagactcagctgggagctgccctgcatgagattgaaggaaacttttcctgcctggaccaccgtcatcactgcagggctgcaggaaagatatcatccttgggtccgattcccaaaaaaacagccctcttggaggaccaacctacccttccatggtgtggattcaggtcagctgcctgtggaaaccctcctgtctcaaaggctgactcttggtgaccccacactgcatgactgatgacccatgaccccagcgggaccactcacctatgctggtcaatgccagggggttgcacctgggtggaagagctcactgaaagacacaaggggagaatgggggttcacagaaccggagcactaacaccaagcccacacagggagcctgggctgcctcacagaggagcacggagaaggggttgggcccccacgagatgctgctgttcagggcctcaaggtctccagcccaaaatacattggtcattccagggaactccggatcccagcaccttcttccaaaattctcacctaggctgggcctcagcgtaatcctattgagcatgatttttaagtcatcacctctcttcaggacaatataaggttctcatcatcgacccaacccagggcatcaccctccactgccccgcaacccatgcatccagtgggacccagataggctcaccgcagctcagtgcagcagaccagggtgccaggaagggcctgagcttcagctcaccaggggctgagcccagagccagtgggcccaacgcaagtcttcctctggggtcaccatctggaagggtgggggacaggtgtccaaacaaggcctcatgcctccatgcaggaaagtgggcagggggtgctggctcacacatgctctccctccatggactcatgagatgagatccatgtaaaacagtgatggtcatttacgcgaggaacccttggccactgaaccctggaaggacggggcaggagggtcacagggttcgagcaaaacgcccaggctgcaccctagtgcaggaccctggagcacctccactgcccacgccaaatcccctgctcgaatctgggctgcatcaggaccactgggcagggccatgggcaccaaatagctcacagcaaatcaaggaggctggcctggatgccacgtaccactgcagacctggcagtcacatggcctgcccctgggcattaaatgaacccatccaggcaccctttataagcacacaccagaaatcacatcctggggccccagggccacatgccttctctggtgggtccccattcatgcaccgcacacctcctaaacacagagctgggccacgctcggccaatcagaggacacatgatgtcctcaactttcctttggctcaagaccctgctaccctggaggtgactccatggctcagaagtagcctgggcatcaaattgccaggacaggacccttaacggtgggtcttccaccacaggatgccacccttccatccactccacttccggtagggatgaactccagtgggacacaggctgaacccttggcccaaagcccacgattcccagggccaaacaccaggtgctggccagagctcagccttgatccaagcccactgaggccgcactgcccccaccaggctcaaggaggcaccagtgggatagcccattgctcaacagggtcggtcccatcagggccatgggttgggcccaatccttgaatcttcacggcctgactgcataagctcgatcaccgacatcctacccccctgcaagccttggggacggagagctcctgcataacacccgtggcccccagagacccagtggacccctcatgtggcctgggcagtgctccacacctgacccatgcaccaagtgcacgttgctcaacagggtcagtcccatttaggtcaataagtcctgtgcgatccttaaatctctgcaactcaactccacgggccctatgcccacctttctccagggagggggagcatcaaggcaacaagctgctgcactgtattgggttgaaggaactctctgctgcctgggcctccattacccctgcagggtttcagggaaggcgtccttcttgggatcaattaacaaggaagctgcccttccggagaaaccatccatctctggtggggattcaggtcagctccctaaggaaaccctcgtggcctgaaaggtgaccctcagcgaccccccgtggcctggctcttggcccgtgaccccagcaagatccactcacctatgccgctcaagggcaggggcccgcctgggtagaagagctcactgaaagacacagagaagaacgggggctcagggaggagccgtcgatgtgctccacccccagggaaccagaatgccaacaccaagcctgcacaaggagccttggctgccacacagaggagtgcagagactgggttgggcaccccgaaggtgtccttcagggcctcaaggactccagcccaaaatacagtggcccttccaggggacttcggatctcagcatcctcttccagaattctcacctaagctgggcctcagcgtaatcctattgagcatgatttttaagtcatcacctctcttcaggacaatataaggttctcatcattgac

SEQ ID NO: 1886221 - DNA, 4001 bp, Homo sapiens
gtggctagtggccctgccggggatcttggcatcccagcgctcccttccaaaattctcacctagcctgggcctcagcgtaatcctattgagcatgatttttaagtcatcacctctcttcaggacaatataaggttctcatcattgacccaatcaaggccctccccatgcatgcatccagcagaacctggatgtgctcaccacagctcagtgcaggagaccagggtgccagggagggtctgagcttcagcgcactgggggatgagcaccaggctgacagacactggcctggggcctgtagggtcccaatacaagtcttcctccaggctcaccatctggggtggtgacaggagaaggacatgtgtccaaccagggcctcacatatgagcgaggggaatgtgggtaggggatacccatgtgatggaatccatgaagaacactgactcatcacagacacagggcaccattggccctgctggccaccaaaccttggaaagacagggaaggtgggtcactgggctggggcaagatgccctactgcaggccccaacagcacctccactgctcgggccggctcccccgaacaaccccagggccgcactgggactatggggacgggtgagggcaaccaacctgctcatggccaaccagcgagtctggccctaacaccaggagccaatgcagacctggccattgcagagcctaccctgggcatggtgggtgcccaccctggtgccctctccaagcacacaccagaaatcaaagcctgggggcctccagggccacgtactttctctggtgggtcctcatcttgccctacacctcccacacacagagccaggtcccacttggtcaataagaaaccacatggtgtcctctcctttccttgggatcaagaccctaccaccctggaggtgaccccgtggctcagaagcagcctgtgtggcaaattcccagaacaggtccctcgacagcaggacttcccacctcaggaggacatcctttcggccactgaatctcaaggaaggggagaccccagagggacgtgagctggccccttgtcccaaagaccacaacccccagggctgcctgcagcaccaccaggcaccagccagagctcagccttgattcaactgcattgaaacagtgcctccccctaccaggctcaaggaggtaccactgagatggcccattactcaacagggtcggtcccattcagggccatggatggggtgcagtcctgaatctccggggcctgtctgcgtgggcccaatcacccaccactgtccagagagggagaactccagcgtgacccccaggttgccccagagcccctgttgcccacctcatgtggcctgggcagtcctcgaggcctgaccagcccgctgagtttcagctgggagctgctctatgttgggctgaaggaaccctttcctgccgggaccaccatcacctttgcagggcttcacgaaatgcatgctcctagggtcagattcccaaggaagtgaccctactggagaaacattccctccccggtcgcaccctgagaaaaccctagtggcccgaaggctgaccataaatggccccatgctgcctcattcatggcccatgaccccaacaggatacactcacctatgccgcttaaggccatgggcctcacctgggcagaagagctcactgaaagacatgggggagaaagcaggctcaggaaggagccaccaacatgccccacccccagggaaccagagcccggacaccatgcccacacagggagcctgggctgcctcatggaggggcacagagatagggttggacccccctgagatgcccttcagggcctcaagttctccagcccaaaatatagtggccctgccagggatctcgggatcccagcatcctcttccaaaattctcacctaggctgggcctcagcgtaatcctattgagcatgatttttaagtcatcacctctcttcagaacaatataaggttctcatcatcgacccaactgaggggatcaatcacctcgtgcatgcatccagcaggacccggatgtgctcaccacagctcagtgcaggagaccagggcgcgaggaagggcccgagcttcagcgcatcaggggctgggcaacaggctgatggccactggcccaggaacaacaggcccaatgcaagtcttcctccggtctcaccatctgggagagaggtggagaacatgtgtccaaagttacctccatgtagggaaggaggtaggacgtgccagttcacacttgcttatcttccacggacacatgtgatgagagccatgtgaaatactgacttgtcaccaacacggggcacccttggccctgcctgccaccgaaccctggaaggacagggcaggtagttcattgggcttgggataaatgcccaggccgtgccatgctgcaggctttaagagcacctccactgcccaagaggcctccgctgcatgacaccagggcttccctgggatcactgggcacaggccagggtcattagccaggtcatggccaaccaagaaggctggccaagatgccatgcgccactgcagacctggcagttgcatagcctaccccgggcatgtggggcacgcatacaggcgccctctctaagcatgcactggaaatcacagcttgagtcacatgctttctttggtgggccaccatccataccccgcatatctccgacacacttgaacaatcaggagacacatggtgccctctccattgcttgggcccaaacctccatcaccctggaggtgacacaatggattccaagcagcctgagcaacaaaatcctaggaaaggtccctcgacagtgggccttcccttctcaggaggtcaccctctatgacgcttgatctcagagatagggtaatctccagcgggatgcgggctgcccctcggcccaaagcccacgagtcccagggctgacctgcagcacaaccaggtatgggccagagctctgccttgactcaaccccaggaagacaacgccacctcccatcaggctccaggagacccactggaatggcccattactcaacagggacggtcacattccaggccatgggtggagcacaatccttttatctccaagacctaaccctaagggtccattcacacaccacactctagggactgagagctcccatgtgacccccgtggcacccagagcccctctggaccccctcgtgttcaggcagtcctcaaggactgacccgaacaccgagtgtcagctaggagctgccttgcccgggctgatggaaccctttcctgcctggaccaccgtcacccctgcagggcttcaggtatcctccttgggtctaattcccaaaaaagctgccctcctggagaacccgtctctcccaggtgggaattcaggtcggctgcctgagaaaacccttgtggcccaaaggctgaacctcagcgaccccacatggcctggctgatggcccatgaccccagcaggatgcactcacctatgccagtcaatgccagggggcccatctgggaggaaaagttcactgaaagacacaagggaggaatgggggctcaggaaggagccagcaatgttccctggccccagggaactggagcaccaacaccaagcccgcagaggtagcctgggctgccccaaggaagagcacagagacagggttgggcctccttccagatgcccttcagggcctccaggtctccaacccaaaatacagtgccctgttggagatctcgggatcccagtgtcttcttccaacatactcacctaggttgggcctcagcgtaatcctattgagcatgatttttaagtcatcacctctcttcaggacaatagaaggttctcatcactgacccaaccaagggcaagcccctctccatgcatgcatccagcggaacctgaatgtgctcaccacagctcagtgcaggagaccagggtgccacggagggtctgagcttcagcacactgggggtgagcaccaggctgacg

SEQ ID NO: 1886222 - DNA, 4001 bp, Homo sapiens
acccagggcatcaccctccactgccccgcaacccatgcatccagtgggacccagataggctcaccgcagctcagtgcagcagaccagggtgccaggaagggcctgagcttcagctcaccaggggctgagcccagagccagtgggcccaacgcaagtcttcctctggggtcaccatctggaagggtgggggacaggtgtccaaacaaggcctcatgcctccatgcaggaaagtgggcagggggtgctggctcacacatgctctccctccatggactcatgagatgagatccatgtaaaacagtgatggtcatttacgcgaggaacccttggccactgaaccctggaaggacggggcaggagggtcacagggttcgagcaaaacgcccaggctgcaccctagtgcaggaccctggagcacctccactgcccacgccaaatcccctgctcgaatctgggctgcatcaggaccactgggcagggccatgggcaccaaatagctcacagcaaatcaaggaggctggcctggatgccacgtaccactgcagacctggcagtcacatggcctgcccctgggcattaaatgaacccatccaggcaccctttataagcacacaccagaaatcacatcctggggccccagggccacatgccttctctggtgggtccccattcatgcaccgcacacctcctaaacacagagctgggccacgctcggccaatcagaggacacatgatgtcctcaactttcctttggctcaagaccctgctaccctggaggtgactccatggctcagaagtagcctgggcatcaaattgccaggacaggacccttaacggtgggtcttccaccacaggatgccacccttccatccactccacttccggtagggatgaactccagtgggacacaggctgaacccttggcccaaagcccacgattcccagggccaaacaccaggtgctggccagagctcagccttgatccaagcccactgaggccgcactgcccccaccaggctcaaggaggcaccagtgggatagcccattgctcaacagggtcggtcccatcagggccatgggttgggcccaatccttgaatcttcacggcctgactgcataagctcgatcaccgacatcctacccccctgcaagccttggggacggagagctcctgcataacacccgtggcccccagagacccagtggacccctcatgtggcctgggcagtgctccacacctgacccatgcaccaagtgcacgttgctcaacagggtcagtcccatttaggtcaataagtcctgtgcgatccttaaatctctgcaactcaactccacgggccctatgcccacctttctccagggagggggagcatcaaggcaacaagctgctgcactgtattgggttgaaggaactctctgctgcctgggcctccattacccctgcagggtttcagggaaggcgtccttcttgggatcaattaacaaggaagctgcccttccggagaaaccatccatctctggtggggattcaggtcagctccctaaggaaaccctcgtggcctgaaaggtgaccctcagcgaccccccgtggcctggctcttggcccgtgaccccagcaagatccactcacctatgccgctcaagggcaggggcccgcctgggtagaagagctcactgaaagacacagagaagaacgggggctcagggaggagccgtcgatgtgctccacccccagggaaccagaatgccaacaccaagcctgcacaaggagccttggctgccacacagaggagtgcagagactgggttgggcaccccgaaggtgtccttcagggcctcaaggactccagcccaaaatacagtggcccttccaggggacttcggatctcagcatcctcttccagaattctcacctaagctgggcctcagcgtaatcctattgagcatgatttttaagtcatcacctctcttcaggacaatataaggttctcatcattgacccaactcagggcacgccctccatccccacgcatgcatccatcgggacccggatgtgctcaccgcagctccgtgcaggagaccagggcgccaggaagagcctgagcttcaccacaccaagggctgggcacctgactgatgaccactcaccccgggacagcgggcccaatgaaagttttcttccagtctcactatctgggggacaggaggtggacatgtgtccaaatggaacctcacgcctccatgcaggaagggggtgggggatgctagctcacgattgctctcccaccatggacccatgtgatgggatccatgtgaaacactgatgtgtcatggacacaggggaactttggccctctgcaccactgaaccctggaaggacagggcaggtaggtcactgggctcaggcaagacgccctggctatgccctactgcaggcaccttgagcacctccactacccactccagttgcctcacatgaccccagggctgtactggcccctgggtgtcagccagggccacctaccgtctcacggccaaccaaggaggctggcctggatgccacgtactgctgccaatctggcagtagcacagcctgcccctgtgtgtggagggcaagcacccaggccctgctccacaccacaccggaaattgcagcctggggacccagggcctcgtgtgttctctgatatgtccccatccatgcctcacacaacacctcccacacacagagtggggccacactcagccaatcgggagacacatggtgtcttctcctttccttgaccccaccaccctgtaggtgaccccatagcttggaagcagcctggacaggtccttccacagcaggccttctcacctcaggaggacaccctgtccgccacttgcccacaaggaaggtgtggcccctggtgggacatgggctatacccttggcccaaagcccacgagtcccagggccagactgcagcaccatcatggggtcaccagagctagtcttgacccaacctcatggaaacagtgccaccccacacttggctcaaagaggcaccactgggatggcccatagcttaatagggtcggtcccattcagggccatgggtttggagagatccttgaaaatccaaaacctgacctcatgggccgaatcacacatacctctccaaggtcggagagcccccataagacccccttggcgccccagtgcccttgtggttcccctcatgtggacgggccatcctagaggcctgacttaagcaccgagtttcagctgggtgctgccctgcatggggctgaggaaaccctttactgcctggaccaccacaacccctgcagggcttcatggaaggtatcctccttgggtccgattcctaaggaagctgccctcctggagaacccatcccaggtgggcattcgggtcagttcctgaggaaacccttgcagccaaaggctgatgctcggcaaccccacacagcctggctcatgacccatgaccccagcaggatccactcacctatgctggtcaatgccagggggtctgccgggcaaaagaggtcactgaaagacacaggggagaatgggggctcagggaggagatgccaaagtaccccacccttgggtaacaggagcgccgacaccaagcccacagagtgagcctgggctgcctcatggaggagtgcagagacagggttgggcaccctccagatgccctcagagcctccaggtctctagctcaaaatacagtggacttcacagggaacttgtaattcccagcatcctcttccaaaattctcacctaggctgggcctcagcgtaatcctattgagcatgatttttaagtcatcacctctcttcagacaatataaggttctcatcatcgacccaacccagggcaccccccaccacacacacccatccagtgggacccggatgtgctcaccacagctcagtgcaggagaccagagcaccaggaagggcctgagcttcagtgcaccaaggctgggca

SEQ ID NO: 1886223 - DNA, 4001 bp, Homo sapiens
aatcacctctcttcagaacaatataaggttctcatcattgacccaacccaaggcacccacctccctgcacatgcatccagcaggaccaggatatactcaccacagctcagtgcaggagaccagggtgccaggaaaggcttgagcttcagcgcatcgggggttgggaacctggctgacagacactggtctagggcctttgggcccaacgcaagtcttcctccaggctcaccatctgggggtacaggaggaggatatgtgtccaaatagggcctcacatctccatatgaggaaggggtaagagatacccacgtaatgggttccatgtggaacaccgactcatcatggatgcttggccctccccatcaccataccctgaaaaaacagggccgtctgcctgccctgtgaccactaggcatgggccacagcctccaaccagctcccgaccaaccaaggagggtagcttggaagctatgcactgttgcaaacctggtagtcacatagcctgcccatggatgtggtaggtacccgccgaggcaccctctccaagtgtgcactgaaaatcacagcctggggacccaggccatgtgctttcattggtgggaccccatccacatcccacacacctcccaaacagacctgggccacatgtagccaatcaagggccacatggtatcttctcctttccttgggcccaagaccccatgaccctggaggtgaccacttgtctcagaagaacccggggtggcaaattcccagtataggaccctagacagtgggccttcccacctcagaatgccactgttaaccgttactcaaactcggagaatgggttaccctcaataggatgtgggctacccccttagcccaaagcccacgggtcccagggctggccagcagcagcaccaagcaccagatggatctcagccttgactcaaccctattgaaactgcaccacaccccaccaggctcaatacgtgccattgggatggcctgttgctcaacagggttggccccattcagggtcacaggtgggatgaaatccttgaacctccacaacccaaccccgtcaccaaccccacgaaacaagtctggggactgagagctcctacataacacctgtggcaccccagagcccttctgggcccctcaggtggcctgggcagtcttcaaggcctgacccacataccatatctcaactaggtgatgtcctgcatggggctgaaggaaacctttgctatctggaccatcgtcacccctgcagggcttcagggaagacatcctccttgggtaagattcccaaggaagctgccctcctggagaaaccatccctcctgaaatccctgacccatcatggatgcagggcacccttggccctccccgtcaccacaccctgaaaaaacagggcagtctgcctgccctgtgactactaggcatgggccacagcctccaaccagctcccggccaaccaaggagggtagctcggaagctatgcactgttgcaaacctggcagtcacatggtgggaattgaggtcggttccctgaggaaacccttggggcctgaagtctgaccctcagcaaacccatgcggcctagctcatagcccatgatgccagcaggatccactcacctatgttggtcaatgccaggggaaccgcttggcagaagagctcactgaaagacacaaggggagaaccaggactcagggaggagcccccaacgtgccccatcactggagaagaggagcgcaaacaccaagcccacaaagggagcctgggctgcctcacagaggagcgcaaagaaagcactgggccacctccagacgcccttcagggcctccaggtctccaacccaaaatacaagtggccctcccggaaatcttgggatcccggcatcctctgccaaaattctcccctaggctgggcctcagcgtaatcctattgagcatgatttttaagtcatcacctctcttcaggacaatataaggttctcatcattgacccaacccagagaaccccctccccgcacaaacatccagtgaaacccggatgtgctcaccacagctcagttcaggagaccagggcgccaggaagggctggagcttcagtgcaccagggactgagcacctgggtgatgggcactggctcaggaaaagcaggcccagtggaagtcttcctcaagtctcaccatctgggggcacaggtggaggacatgtgaccaccctccatgcggagaagggggtgttgggtgccagctcatgcttgctttccctccatggacaggtgatgagatccacacaaaatactgactcatcactgacgcagggcacccttggccctccctgccaccgaacccaggaaggacaaggcaggcaggtcactggtctcaggtaaaatgcccaggctgtgccatacttcaggcctggagagcacctccactgcccaaaacagctgccccgtatgatgccagggctgccctgggaccactgggcacaggatcgggccaccagccaggtcatggacaaccaaggaggctaatcaatgccagggtgcccacctgggcagaaaagctcactgaaagacacaaagggagaatgggggctcaggaaagagccaccaacttgttccatccccagggtaccagagcaccaacaccaaggctggacagggagcctggggaccctcatgcaggagcacagagacagggttgggccccctccagatgccctttcagggcctccaggtctccagcccaaaatacagtggctctgccagggataataggatcccaacgtcctcttccaacattctcacctaggttcggcctaagtgtaatcctattgagcatggtttttaagtcatcacctctcttcagaagaatacaaggttctcatcaccaccccaacccagggcacccccctccccatgcatgcatccagcagcacccagttgtgctcaccagagctcagtgcaagagaccagggaaccaggaagggtctgagcttcagtgcactgggagctgagcacctggatgatggacactggcccggggccttcaggcccaactgaagtctttcttcagggtcaccatctgtagggacaggaggaggacatgtgtccaaccagggcctcatgtatcaatgtagggaaggtgggtaggggatacccttgtaatggaatccttacagaacactgacccaacatggacgcagagcacccttggccttccctgccacaaaaccctggaaagacagggcaagtgggttactgggctggggcaagaggcctgggctgtgccctactgtgggccccaagagcacctccactgcctgggccagatcccccgaacaaccccagggtcgtaccgggaccatggggcacgggccaaggcagccaacctgctgaaggttggttgagccaaggagggtggtcctgatgccaggagccactccagacctggcaggcaaagaccttgcccctgggcatggtagggccaccctggtgcccactccaagcacacaccagaaatcaaagcctgggggcctccagggccacattctttctctgatgagtccccatccatgccctgcacacctcccacacatacagccaggccacactcagccaatcagaaaccacatggtgtcctctcctttccttgggctgaagaccccgccatcctggaggtgaccccatggctcagaagcagcctaggtggcaaattcccaggacaggtcccttgacagcaggtctgcccacctcaggaggccacccttcccaccactggacctcaaggaagggattaccccagtgggatgggagttgcccccttggcataaagcccatgagccccagggccggcctgcagcaccaccaggcaccagccagcgctcagccttgacccaactgcattgaaacatgccgaaaatggcccattgctcaacagggttggtcccattcagggccatgggtgggtggcattccttgaatctccgcagcctgac

SEQ ID NO: 1886224 - DNA, 4001 bp, Homo sapiens
aaaattctcacctagcttgggcttcagcataatactattaagcatgatgtttaagtcatcaccttttttcaggacaatataaggttctcatcatcagcccaacccagggtacacccctccctttgcatgcaaacagtggaacccggatgtaaccccagctcagtgcaggagctgagggtgccaggaagggcctgagcttcagcacacttggagctgggaacctggctgactgacactggcccaggaacagcgggcataatgcaagtcttcctccagtctcaccatctagggggactagaggaggatatgtgtccaaaatgacctccatgtggggaaggcagtggggggtgggggctcacatttgcttgccctccaaggaaaaatgtgatgtgatccatgtgaattactgagtcgtcacggatgcggggcacccttggccctccccgccaccaaaccctggaggaacagagcaggcgggtgactgggctcaggccaaatgcccaggctgcactgtactgcaggccctgacagcacctccactgcccaacatggctcccccacacgaccccagggccgccctggcaccactggccacaggccaaggccaccagccagctcacggccaaccaaggtggctggcccagatgccacacgtggctcaggctgcagacctggctatcacgtagtctgcccctgggcatggtgggcacaaatcaagacaccctctccaagtgtgcattggaaatcacagcctgggatgcagggccacgtgctttctctggtgggtcaccgtccatgctctgcacacctcccgcacacagagctaggccatacttggccaatccagaacgacatggtgccctctgctatgctcaggcccaagaccctgccactgtggatgtgacgccatggctcagaagcagcctgagcaacaaaatcctgggacagatcccttgacagtaggccttctcacctcagggggccacccttcatgacacttgaccatggagataggctgaccccaagcgggatgcgggctgtcccttggcccaaagcccaaaagtcccagggatgatctgcagcaccaccaggtaccagccagagctccacctagacccaaccccagggaaacaacaccaccccccgaccaggctccaggagacccactgagatggcccattgctcaagaggaagagtcacattcagggctgtgggtagggtgtgatccttgaatctacacaacccaatcccatgggtccattcaggcaccacactccaaggaccaagagctcccctgttacccctgtggcaccctgtagcccctctggcccccctcatatggcctgggcagttctggaggccttaccagatcaccgcatcttagctgggtgttgccctgcattgagcagaaggaaccctttcctgcctggaccaccatcacccctgcagggcttcagggaatgggtcctccttgggttaggttcccaaaaaagccaccctccaggacaacccttccctcccgggtgaaattcaggtctgctccctgagaaaacctttgtggcccaaaggctgaaccttggggactccacatggtctggctcatgaccaatgaccccagcaggatccactcacctatgccagtcaatgccagggggatgtcctgggtggcagagctcactgaaagacacaaggcgagaacaggagctcaggaaggagccaccaacattccccatgccagggaaatggagcaccaacaccaatcccacacagggagcctgggctgcatcacgaaggagcagagacaggttgggccacctccagatgctcttaagagcctccaggtctctagcccaaaatgcagtggccttgttggggaccttgggatcccataatcctcttccaaaattctcccctaggttgggcctcagcgtaatcctattgagcatgatttttaagtcatcacctctcttcaggacaatataaggttctcatcattgacccaacccagggaagcccctcctcgcaaaaaaaacttccagtggaagccagatgtgctcagcacagctcagtgcaggagactagggtgccaggatgggctgggtcttcaatgcactgggggctgagcacctggctgatggacactgtcccatgaaaagtgggcccaatggaagtcttcctccagtctcaccatctagggacacaggtggagtacatgtgaccaccctccatggggagaatggggtgcgtgccagctcacgcttgcccccacctccatggacacgtgatgagatccatgcaaaatattgacttgtcaccaatgtagggcacccttggccctccctgccaccgaacccaggaaggacaaggcaggcaggtcactgggctcaggcaaaatgcccccaggctgtgccatactgcaggccccaagagcatttccactgcccaaaacagctccccagcaagaccccagggcagccctgggaacactgggcacaggcacgggctaccagccaggtcacggccaaccaaggtggctggcccagatgccacgtggcactgcagacctgcagtggcaaagcctgcccctgggcgtggtgggagcaggtataggcaccctctccaagcctgcaccagaaatcacatcttggggctgcagggccacttgctttctctggtgggtccccatccacacacctctcagacacagagccagtcacacatagccactggcagccacatggtgccctctcctttgcttggtcccaagatcccaccaccctggaggtgacaacatggatcctaagcagcctaagcaacaaattctcagtacaggtccttcgacattgggctttcccacctcaggaggccacccttcacgacactcgacctcagagaaagggtgacccccagagggatgtgggctgtccgttggcccaaagcccacgagtcccagggctgacctacattaccaccaggtactgaccagagttccaccttgaccgaaccccagggaaaaaacgccaccccccaccaggctccaggaggagagtcacattcagggccatgggtggtgcagcatccttgaatctctgcgactcaaccccatgggcccattcatgtaccacactctggggaccaagagctcccctgtcactcctgtggtgcctcgtagcccctctgggccccttcatgtggcagggaggtccttgaggccttactggaacaccgagtctcagctgggtgaaggaaccctttcctgcctggaccaccatcatcccagtagggcttcagggaaggcgtcctccttgggtccaattcccaaaaacccaccctcctggagaagccatctctcccaggtggcaaatcaggttggctgtctgagacaactctcgggatccaaaggctgaaccttggggaccccacatggcctggctcatggcccataatcccagaaggatccactcacctctgtcggtcaatgctagggagcccacctgtttggaagagctcactgaaagacacaaggggagaacgggggctcagggagtagccacccacgtgtcctgcccccagggaagtggagcaccaataccgatcccgaatagggagcatgggctgcctcagggaggagtgcagagacagggttgggccccctacagatgcccttcaggacctccaggtctccagcccaaaatatggtggccctgttggggacctcaggatcccagcatcctcttccaaaattctcacctagtctgggcctcagtgtaatcctattgagcatgatttttaagtcatcacctctcttcaagataatacaaggttctcatcattgacccaacccagggcaccctgcctccccacgcatgcatctagcaggacctggatatggtcatcacagctcagtgcaggagaccacggagtcaggaagggtcagagcttcagcacaccatgggctgagcacctggctgacgtacactggcctggggcctgtgggccca

SEQ ID NO: 1886225 - DNA, 4001 bp, Homo sapiens
gcccgcccgggtggaagagctcactgaaagacacaaggggagaatgggggctcaggaaggagccaccaaccggccccaaccccggggaacaggagcccgacaccaagccccctcagggagcctgggctgcctcctggaggagcagagagacagggttggaccttccagatggccctcagggcctgcaggtgtccagcgcaaaatacagtggccattccggggagcccagtgtcctcttccaaaattctcacctaggctgggcctcagcgtaatcctattgagcatgatttttaagtcatcaccgctcttcaggacaatataaggttctcatcattgacccaaccaagggcaacccccaccccaagcatgcatccatgtgctcaccacagctcagtgcaggagaccagggtgccagggagggtccaaactccagagcactgggggattagcaccaggctgatggacactggcctggggcctgtgggggtccaacacaagtcttcctccagactcaccatctgaagggacaggaggaggacatgtgtccaaccagggcctcacatatcagtgcagggagggtgggtagggaatacccatatgatggggatccatgcagaacactgacccaacatgggcacaaggcaccattggccctcctggccaccaaaccttagaaagacagggtaagtgggtcactgggctggggcaagatgcctgggctgcactctactgcaggccctgagagcaccttcacggcctgggccagctcccctgaacaaccccagggccacaccaggaccatggggcatgggccagggcaaccaacctgctcctggccaaccaaggagccttggccaatcaggaaccacatggtgtcctctccttttcttggactcaagaccccactaccctggaggtgaccccatggctcagaagcagcctggatggcaaatttccaggacaggtccctgagcagcaggccttcccaccataggaggctaccctttccaccactggacctcaaggaagggatgacaccagcgggacacaagctgcccccttggcccaaggaagggccggcctgcagtaccaccaggcgcccagtcagagctcagctttgactcaaccttattgaaacagcaacccacccccaacaggctcaaggaggcgccattaagatggcccattactcaacagagttggtcccattcagggccaggggtgggggcattccttgaatctccgccacctgactgtgggcccaatcacccaccactcttcagggagggagaactccagtgtgagccccagggagccccagagcttctgtgtcccccatcatgaagcctgggcagtcctcaaggcctgacgagcccaccaaatttcagctgggagctgctgtatgttgggctgaaggaacgctttcctgcctggaccaccatcacctttgcagggcttcaggaaatgcgtgctcctagggtcagattcccaaggaagtgaccctactggagcaatgttccctccccgggggcacctggagaaaacgctagtggcctgaaggctgaccctcgatgaccccacactgcctcatttatggcccatgaccgcaacaggatacactcacctatactgcttaagggcatgggccccacctgggcagaagagctcaatagaagacacaggggagaacgtgggctcaggaaggagctgccaacatgccctatccccaggaagcagagcctggacaccaagtcaacacagggagcctgggctgcctcacggaggggcacagagacagggctaggacccctgagatgccctttggggcctcaagttcttcagtataaaatacagtggctagtggccctgccggggatcttggcatcccagcgctcccttccaaaattctcacctagcctgggcctcagcgtaatcctattgagcatgatttttaagtcatcacctctcttcaggacaatataaggttctcatcattgacccaatcaaggccctccccatgcatgcatccagcagaacctggatgtgctcaccacagctcagtgcaggagaccagggtgccagggagggtctgagcttcagcgcactgggggatgagcaccaggctgacagacactggcctggggcctgtagggtcccaatacaagtcttcctccaggctcaccatctggggtggtgacaggagaaggacatgtgtccaaccagggcctcacatatgagcgaggggaatgtgggtaggggatacccatgtgatggaatccatgaagaacactgactcatcacagacacagggcaccattggccctgctggccaccaaaccttggaaagacagggaaggtgggtcactgggctggggcaagatgccctactgcaggccccaacagcacctccactgctcgggccggctcccccgaacaaccccagggccgcactgggactatggggacgggtgagggcaaccaacctgctcatggccaaccagcgagtctggccctaacaccaggagccaatgcagacctggccattgcagagcctaccctgggcatggtgggtgcccaccctggtgccctctccaagcacacaccagaaatcaaagcctgggggcctccagggccacgtactttctctggtgggtcctcatcttgccctacacctcccacacacagagccaggtcccacttggtcaataagaaaccacatggtgtcctctcctttccttgggatcaagaccctaccaccctggaggtgaccccgtggctcagaagcagcctgtgtggcaaattcccagaacaggtccctcgacagcaggacttcccacctcaggaggacatcctttcggccactgaatctcaaggaaggggagaccccagagggacgtgagctggccccttgtcccaaagaccacaacccccagggctgcctgcagcaccaccaggcaccagccagagctcagccttgattcaactgcattgaaacagtgcctccccctaccaggctcaaggaggtaccactgagatggcccattactcaacagggtcggtcccattcagggccatggatggggtgcagtcctgaatctccggggcctgtctgcgtgggcccaatcacccaccactgtccagagagggagaactccagcgtgacccccaggttgccccagagcccctgttgcccacctcatgtggcctgggcagtcctcgaggcctgaccagcccgctgagtttcagctgggagctgctctatgttgggctgaaggaaccctttcctgccgggaccaccatcacctttgcagggcttcacgaaatgcatgctcctagggtcagattcccaaggaagtgaccctactggagaaacattccctccccggtcgcaccctgagaaaaccctagtggcccgaaggctgaccataaatggccccatgctgcctcattcatggcccatgaccccaacaggatacactcacctatgccgcttaaggccatgggcctcacctgggcagaagagctcactgaaagacatgggggagaaagcaggctcaggaaggagccaccaacatgccccacccccagggaaccagagcccggacaccatgcccacacagggagcctgggctgcctcatggaggggcacagagatagggttggacccccctgagatgcccttcagggcctcaagttctccagcccaaaatatagtggccctgccagggatctcgggatcccagcatcctcttccaaaattctcacctaggctgggcctcagcgtaatcctattgagcatgatttttaagtcatcacctctcttcagaacaatataaggttctcatcatcgacccaactgaggggatcaatcacctcgtgcatgcatccagcaggacccggatgtgctcaccacagctcagtgcaggagaccagggcgcgaggaagggcccgagcttcagcgcatcaggggctgggcaacaggctgatggccactggcccag

SEQ ID NO: 1886226 - DNA, 4001 bp, Homo sapiens; identical to SEQ ID NO: 1886217

SEQ ID NO: 1886227 - DNA, 4001 bp, Homo sapiens; identical to SEQ ID NO: 1886218

SEQ ID NO: 1886228 - DNA, 4001 bp, Homo sapiens; identical to SEQ ID NO: 1886220

SEQ ID NO: 1886229 - DNA, 4001 bp, Homo sapiens
atgggccattaccccagcaggatccactcacctatgctggtcactgccagggaggctgctgggcagaagagctcactgaaagacacaggggagattgggggctcagaaaggagatgccaaaatgccccacccccgggtaacaggagtgccaacaccaagcccacatagtgagcctgggctgcctcacggaggagcgcagagacagggttgggcaccctccagatgccctcagagcctccaggtctccagcccaaaatacagtggttctgccagggaactcataattcccagcatcctcttccaaaattctcacctaggctgggcctcagcgtaatcctattgagcatgatttttaagtcatcacctctcttcagacaatataagtttctcatcatcgacccaacccagggcaaccccctccccgcacaggcatcacaggaacccagatgggctcaccacagctcagtgcaggagaccagtgcaggagggcttgggtaagatgccctggctgtgccatacagcaggcccctggagcacctccactgctcacactggccccactgcatgactctggaccacaacggaaaccctgggcagggtccaaggtcaccaaccagctcacagccaaccaaggatgctggcctggatgccaggcactgctgccaatctggcagtcccacaacctgcccctgtttggagagaatgcctgcccaggatccttctccaagcacgcaccagaaatcacagcctgggcccagggccacgtgctttgtctggtgggtcctcatccacaccccagacccctgtcaaacacagagctgggccacactgagccaatcaggagccacatggtgccctctcctttccttgggcccaagaccccgccacccggaagtgaccacatggctcagaagcagcctgggcaacaaattcccaggacaggtccctcatgagggggctttccaacctcgggacgtgacccttcccgccactgacctcgaagaaggggtgacccccagcagcaggcgggctgcacccttgacccaaagcccatgagtcccagggttggcctgcggcaccacaaagcaccagtcatggctcagccttgacccaaccagttgaagctgagccgccacccaccaggctcaaaaaggagctactggtgtgacccattgctcaacagggtcatttgcattcagggccatgagcagggcacgatccttgaatctccgcagccccaccccatgggcccgatcgcccacccatttccagggacggagagcccctgagtgatccctgtggtatccgggagcctctgttgtcccactcatttgtcctgggcagtcctcaaggacagactctcacaccaagtgtcagctgggagctgccctgcatgagactgaaggaaccctttccagactggaccaccgtcacccctgcagggcttcagggaaggcatcgtcttgggtctgatttcccaggaagctgccctcctagaggacaaacccatctctccacaggtgaggattaaggtcgactccctgaggaaaccctcctgtcctgaaggctaatacttggtgaccccatgcagcctggtgcacggcccacgaccccagcaggatccactcaccgatgctagtcaatgccagggggcccacctgtggggaagagctcactgaaagacacaggagagaatgggggtcagggaggagctacccatgtgccccacccccagggaacaggaaggccatcaccaagcctacatggggagccagggctgcctcatggaggagcacagagacagggttgggcctcccagatgcccttcagggcttccaggtctccagcccaaaatacaattggctctaccaggggacctcaggatcccagcatcctcttccaaaactctcacctagactgggcctcagcgtaatcctattgagcatgatttttaagtcatcacctctcttcaggataatataaggttctcatcatcgacccaactcagggcacgtccttcccggcgcatgcatccagcaggacccggatgtgctcatcacagctcggtgcagcacaccagggtgccaggaagtgcccaatcttcagtgcaccaggggctcagcacctagctgatggatgctggcctgggaccattgggaccaattcaagtcttcctccaggctcaatacctggggaaacaggagtaggacaggcgtccacacacaacctcacccctccatggaggcagaaggtggggtgtggcggctcagggatgcttgccgtccatggatccacgtgatgggatccatgcagaacactggcttgtcacagacacaagtcaccctgtactctcaaccactgaaccctggaaggacagggcaggtgggtcactgggctcgggcaagaagacctggctgtgtcctaccgcaggtcccacgagcacctccactgcccatgccggctccctcgcatgaccccaggattacgacagagctactgggcacaggccagggccaccaaccagttcatggccaaccaaggaggctggcccggatgccagatgccgctgcaaagctggcagtcacatagcctgccccggtgcattgtgggcacccatccaggtgccctatcccagcatgaactggaaatcacaacctggagtcccagggccacatgctttctctggtgggtccccatccatgccccacacacctcctaaacacagagcagggccacacttggctaatcaggggacacatggtgacttctttcctttggcccaatacccactatcctggaggtgaccctatggctcagaagcagtgtgggtggcatattccagggacaagaccctcaacagcaggccttccacctcaggaggccacccttcctcacacttgccaatggggaaggggtgacttccagccacagggaaggggagatccccagcaggacgtggactgatcccttggcctaaagctaacaagtccgtggctggactgtagcaccaccaggcactggccagagctcagccttgaccaaaacctagggaaacagcaacaccccatccaggcccaaagaggtaccataggatggatggcacattgctcaacagggtcggtcccattcagggctataaatcctgtgtgatccttaaatatctgcagctcaactccatgggctctatgcccacctttctccagggatggggagctcttgtgtgaccccatggcatcccaaagcccctgtggcccccctcacgtggcctggtcagtcctcgaggccagaccagtgcactgagactcagctgggagctgccctgcatgagattgaaggaaacttttcctgcctggaccaccgtcatcactgcagggctgcaggaaagatatcatccttgggtccgattcccaaaaaaacagccctcttggaggaccaacctacccttccatggtgtggattcaggtcagctgcctgtggaaaccctcctgtctcaaaggctgactcttggtgaccccacactgcatgactgatgacccatgaccccagcgggaccactcacctatgctggtcaatgccagggggttgcacctgggtggaagagctcactgaaagacacaaggggagaatgggggttcacagaaccggagcactaacaccaagcccacacagggagcctgggctgcctcacagaggagcacggagaaggggttgggcccccacgagatgctgctgttcagggcctcaaggtctccagcccaaaatacattggtcattccagggaactccggatcccagcaccttcttccaaaattctcacctaggctgggcctcagcgtaatcctattgagcatgatttttaagtcatcacctctcttcaggacaatataaggttctcatcatcgacccaacccagggcatcaccctccactgccccgcaacccatgcatccagtgggacccagataggctcaccgcagctcagtgcagcagaccagggtgcca

SEQ ID NO: 1886230 - DNA, 4001 bp, Homo sapiens
tcctggggccccagggccatgtgccttctctggtgggtccccattcaggcaccgcatacctcccaaacacagagctgggccatgcttggccaatcaggggccacataatgtcctctccttccctttgacaaagaccctgtcaccctggaggtgaccccatgactcagaaccaggctgcgcagcaaattgccagcacaggatccttgaccgtgggtctcccaccacaggatgccacccttccggccactccacttcaggtaggagtgacctcaagcgggacgcaggctgcacccttggcccaaagcccatgattcccagggccaaccacaaggtgacaggcagagctcagccttgacccaaccccactgaggcagcgccacccccaccaggctcaaggtgccaccaccaggatggccattgctcaacagggtcggtcccattcagggccatgggtggttcccgacccttgaatgttcacggcctgactccgtaagccagatcacccacacccaacccctctgcaagcctcggggacagagggctcccgtataagactcctggccacggagaccctgtggatgccctcatgtggcctgggcagtcctccaggactcacctgtgcaccaagtctcagctaggatctgcactgcgttgggttgaaagaaccctctcttgcctggacctctgttacccctgcaaggtttcagggaaggtgtccttcttgggactgatttccaaggaaacctgcttcccagagaaaccattcatccctggtggggattcaggtcggctcccttaggaaaccctcatgacccgaaaggtgacgctcagggaccccaccccggcctggctcatggcccatgaccccagcaggatccattcacccgagactcccgccaccacagaggtgacgccatagctcagaagcagccaagacagcaaatttctgagacagggtcttccacagcaggccttcccacctcaggaggacatgcttcccgccacctgtccacaatgaaggggtgaccccaatgggacatgggctgtacccatgtcccaaagcccaccaatcccagggcaggattgcaccaccatcaggtgccagccagagctagtcttgactcacccttaggaaacagtgccaccccacacttggctcaaagaggcaccactgggatggcccataacttattagggtttgtcccattcagggccatgggtttggtgcaatccttgaaaatccacagcctgacctcatgggctgaattacacacacctctccaaggttgaagagcccctgcaagaaccccttggtgccccagagcccttgtggcccctctcatgtggcctggccatcctaaaggcctgaccagagcactgagtcttagtggggcactgccctgcatgaggttgagaaaaccctttactgcctggaccactgcaacccctgcagggcttcagggaaggtatcttccttgggtatgatttccaaggaagccactcttctggagaacccatcccaggtgggcattcgggtcagctcctgaggaaactcttatggctgaaggctgatgcttggtgaccccacacagcctggctcatgggccattaccccagcaggatccactcacctatgctggtcactgccagggaggctgctgggcagaagagctcactgaaagacacaggggagattgggggctcagaaaggagatgccaaaatgccccacccccgggtaacaggagtgccaacaccaagcccacatagtgagcctgggctgcctcacggaggagcgcagagacagggttgggcaccctccagatgccctcagagcctccaggtctccagcccaaaatacagtggttctgccagggaactcataattcccagcatcctcttccaaaattctcacctaggctgggcctcagcgtaatcctattgagcatgatttttaagtcatcacctctcttcagacaatataagtttctcatcatcgacccaacccagggcaaccccctccccgcacaggcatcacaggaacccagatgggctcaccacagctcagtgcaggagaccagtgcaggagggcttgggtaagatgccctggctgtgccatacagcaggcccctggagcacctccactgctcacactggccccactgcatgactctggaccacaacggaaaccctgggcagggtccaaggtcaccaaccagctcacagccaaccaaggatgctggcctggatgccaggcactgctgccaatctggcagtcccacaacctgcccctgtttggagagaatgcctgcccaggatccttctccaagcacgcaccagaaatcacagcctgggcccagggccacgtgctttgtctggtgggtcctcatccacaccccagacccctgtcaaacacagagctgggccacactgagccaatcaggagccacatggtgccctctcctttccttgggcccaagaccccgccacccggaagtgaccacatggctcagaagcagcctgggcaacaaattcccaggacaggtccctcatgagggggctttccaacctcgggacgtgacccttcccgccactgacctcgaagaaggggtgacccccagcagcaggcgggctgcacccttgacccaaagcccatgagtcccagggttggcctgcggcaccacaaagcaccagtcatggctcagccttgacccaaccagttgaagctgagccgccacccaccaggctcaaaaaggagctactggtgtgacccattgctcaacagggtcatttgcattcagggccatgagcagggcacgatccttgaatctccgcagccccaccccatgggcccgatcgcccacccatttccagggacggagagcccctgagtgatccctgtggtatccgggagcctctgttgtcccactcatttgtcctgggcagtcctcaaggacagactctcacaccaagtgtcagctgggagctgccctgcatgagactgaaggaaccctttccagactggaccaccgtcacccctgcagggcttcagggaaggcatcgtcttgggtctgatttcccaggaagctgccctcctagaggacaaacccatctctccacaggtgaggattaaggtcgactccctgaggaaaccctcctgtcctgaaggctaatacttggtgaccccatgcagcctggtgcacggcccacgaccccagcaggatccactcaccgatgctagtcaatgccagggggcccacctgtggggaagagctcactgaaagacacaggagagaatgggggtcagggaggagctacccatgtgccccacccccagggaacaggaaggccatcaccaagcctacatggggagccagggctgcctcatggaggagcacagagacagggttgggcctcccagatgcccttcagggcttccaggtctccagcccaaaatacaattggctctaccaggggacctcaggatcccagcatcctcttccaaaactctcacctagactgggcctcagcgtaatcctattgagcatgatttttaagtcatcacctctcttcaggataatataaggttctcatcatcgacccaactcagggcacgtccttcccggcgcatgcatccagcaggacccggatgtgctcatcacagctcggtgcagcacaccagggtgccaggaagtgcccaatcttcagtgcaccaggggctcagcacctagctgatggatgctggcctgggaccattgggaccaattcaagtcttcctccaggctcaatacctggggaaacaggagtaggacaggcgtccacacacaacctcacccctccatggaggcagaaggtggggtgtggcggctcagggatgcttgccgtccatggatccacgtgatgggatccatgcagaacactggcttgtcacagacacaagtcaccctgtactctcaaccactgaaccctggaaggacagggcaggtgggtcactgggctcggg

SEQ ID NO: 1886231 - DNA, 4001 bp, Homo sapiens
tgggactttgggatcccagcatcctcttccaaattctcacctaggctgggcctcagcgtaatcctattgagcatgatttttaagtcatcacctctcttcaggataatataaggttctcatcattgacccaaaccagggcaccccccgccccatgcatgcatccagagggacccagatgtgctcacctcagctcagtgtaggaaaccaggacaacaggtaggtcccgcgcttcagcacaccagggtgggcacctggctgatggccactggcctgggtccattgggcccaatgcaagtcttcctccaggctcaccatctggggggacaggaagaggacatgtgtccaaacagagcctcatacttccatgtggggaaggggtaagggatacccatgtgatggggtccatgaggaacactgacctagcatggacgtggggcacgtttggccttccctgtcagcaaaccctgaaaacacagggtaggtgggtcactgggttcaggcaagaaacctgggctgcaccctactgaaggccttgatagcatctccactgtccatgctggctgccccacacgatcccagagccactccgggaccacagggcacaggccaggggaaccaatcagctcatggccaaccaaggagaatggcccagaagccatgcgccactgtggagatggaagttgcatagcctgccccagggcgtggtgggcacctgcctaggtgctatttgcaagccacacctgaaatcgaagcctggagtccccgggccacgtgctttctctggcgggtccctatccatgccccgcacatgtcccaaacacagagtcaggccacccttggccaaccgtgggctacatagtgtcctcttttttcttagccccaagactccgccaccctggaggtgaccccatggctcagaagcagcctgggtggtaaattcctgggacaggaccatcaacagcaggtctttccacctcaggatccagccaatcaccaataggcaaggggtgacctccaggaggacagggctgccgaatggaccaacgcccacaagaacctgggctggcctgcagcatcaccaggcgctggccagagctcagccttgacccaaacccagggaaacagccccgccccccaccaggctcaaagaggccccactgagatggcccattactcaacatggtcggtcgcatttagggccacggttgggatgcgatccttgaatctctgcagcctgaccccatgggctcattcgagcaccccactccagggaaagagagctctcgtgtgacccctgtggcaccccagagcccctgtggcctccttcatgtggcctgggccatccttgaggccagactcgcacactgagtctcagctgggagctgccttcaatgggactgaggggaccctttcctgtctggacaactgttacccctgtaaggcttcagggaaggcattgtcttgggtctgattcccaaggaagccagcctcctggagaaactgtcccaacctggtggggattcaggtcggctccctgaggaaacccacgtggcctaaagagtgacctttggtgaccctacgcagcttggctcatggcccatgatgccagcagaatccactcacctatgcgcatcagtgtcagggagcccacctgggctgaagagctcactgaaagacagaagacacaaagggagaacaggggctcaggaaggacccagcaagctgccctaccacagggaaccagagtgcagacaccaagcccacaaagggagcctgggctgcctcacatgtaatgtggagacagggtagagtcccccccgagatgctgttcagggcccggaggtctccagtccaaaatacagtgcccatgacagggacctagaaatcccagcatcctcttccaaaattctcacctaggctgggcctcagcgtaatcctattgagcatgatttttaagtcatcacctctcttcagaacatataaggttctcatcatcgacccaacccaggacaccaccaccccacaacgcatgcatgcatccattgggacccagatgtgctcaccacagctcagtgcaggagaccagggcatcaggaagggcctgagcttcagattaccaggggctaagcacctggctgagggacattttcccggggccagtgggcccagtgcaattcttcctccagggtcagcatctggaggggtgggggacaggtgtccaaacagggccttgtgcctccatagggcaaagtgggtagggtgtgctggctcacacatgctctcccaccatggactcatgagatgagatccatgtaaaacagtgacagtcatgcacacgaggaacccttggccctccctgccactcaaccctggaaggatagggcaggtgggtcatgggattccagcaagacgcccaggctgcaccctactgtaggaccctggagcacctcgactgcccacgccagctcccccacatgactctgggctgcaatgagaccactaggcagggcctgggccaccaaccagctcatggcaaaccaaggaggctggcccggaccccatgtgccactgcagacctggcagtcacataacccgccactgggcatggaatgcacccatccatgcaccctttataagctcacaccagaaataccatcctggggccccagggccatgtgccttctctggtgggtccccattcaggcaccgcatacctcccaaacacagagctgggccatgcttggccaatcaggggccacataatgtcctctccttccctttgacaaagaccctgtcaccctggaggtgaccccatgactcagaaccaggctgcgcagcaaattgccagcacaggatccttgaccgtgggtctcccaccacaggatgccacccttccggccactccacttcaggtaggagtgacctcaagcgggacgcaggctgcacccttggcccaaagcccatgattcccagggccaaccacaaggtgacaggcagagctcagccttgacccaaccccactgaggcagcgccacccccaccaggctcaaggtgccaccaccaggatggccattgctcaacagggtcggtcccattcagggccatgggtggttcccgacccttgaatgttcacggcctgactccgtaagccagatcacccacacccaacccctctgcaagcctcggggacagagggctcccgtataagactcctggccacggagaccctgtggatgccctcatgtggcctgggcagtcctccaggactcacctgtgcaccaagtctcagctaggatctgcactgcgttgggttgaaagaaccctctcttgcctggacctctgttacccctgcaaggtttcagggaaggtgtccttcttgggactgatttccaaggaaacctgcttcccagagaaaccattcatccctggtggggattcaggtcggctcccttaggaaaccctcatgacccgaaaggtgacgctcagggaccccaccccggcctggctcatggcccatgaccccagcaggatccattcacccgagactcccgccaccacagaggtgacgccatagctcagaagcagccaagacagcaaatttctgagacagggtcttccacagcaggccttcccacctcaggaggacatgcttcccgccacctgtccacaatgaaggggtgaccccaatgggacatgggctgtacccatgtcccaaagcccaccaatcccagggcaggattgcaccaccatcaggtgccagccagagctagtcttgactcacccttaggaaacagtgccaccccacacttggctcaaagaggcaccactgggatggcccataacttattagggtttgtcccattcagggccatgggtttggtgcaatccttgaaaatccacagcctgacctcatgggctgaattacacacacctctccaaggttgaagagcccctgcaagaaccccttggtgccccagagcccttgtggcccctctcatgtg

SEQ ID NO: 1886232 - DNA, 4001 bp, Homo sapiens; identical to SEQ ID NO: 1886221

SEQ ID NO: 1886233 - DNA, 4001 bp, Homo sapiens
ctcattgatttccagtgtcctcttccaaaattgtcacctagggtgggcctcagcataatccttttgagaatgatttttaagtcatcacctctcttcaggacaatataaggttctcatcatcgacccaacccagggcacctccctccccacccatgcatccagcagtacccaaatgggctcaccaagctcagtgcaggaaactagggcaccaggaagggcatgagcttcagcacaccaggggctggacaccaggctgacggatactggcccagggccattgggcccaacacaattcttcctcccatttcacagtctaggggaacaggagtaggacagctgtccaaacacaacctcactcctgtatgtgagcagaaggtggggtgtggcagttcaagtatgcttgccctccatggacccatgtgatcgtttgcatgcggaacactggcccatcacggacacagggtacccagtgctctcttagccacagaactctggaaggacagggcaggctggtcactgggcccctgctggctcccccacacgacccggggtcaccccagaactactaggcacaggccagggccaccaactcattcgcaggaaaccaaggaagctggcctagatgtcagatgccgctacagccctggcagtcacatagcctatctctgtgcatagtgggtgcccacccagatgccctatcccagcacataatggaaattgcaacctggggtctaagggccacagttttctctggtgggtctgcatccatgccccacacacctcctgaacacagagcagggctacaatcagctaatcaggggacacacggcatcttctgtccctgggcccaagatccgctaccctggaggtgaccccatgactcagaagcagcatgggcagcatattccaaagacaagaccctagatagcaggccttgcaacctcaggaggcaaccattcccgacacttgccccttgggaagggatgacttccagccacggggaaggggggacttccagggggagcaggctgaccccttggcccaaagccaacgagtccatggccagacctcagcaccaccaggcaccggccagagtccagccttgactcaaacatagggaaacagcaccgccccgctcaaggctcgatgaggcccatagaatggctcattactcaacagggtctgtcccattcagggccatacattgggcgcaatccttaaatctccacagctcgactccatgggccctatcatccatctttctccatgaatggagagctcctatgtgacccccatggtgtcccagagtccctgttggcccctcaggtggcctgggcagtcctcaaggccagactcgaacacctagactcagctgggagctactatgtgtgagactgaaggaaccctctcctgcctggaccaccgtcatcactgcagggctccagggaaggcgtcccccttgggtccgatttctcaggaagccacccttctggaggaccaacctatccctccctggtggggattcaggttcgctccctgaggaaactctcctgtcccgaaggctgaccctcagtgactctacccagcctggcccatggcccacgatggcagcaggatccactcacctatgctggtgaatgccagggtgccccgcctgggttgaagagctcactgaaagacacaagtggagcaggggggctcaaggaggagctgtccacgtgccccgccccaaggaactggaccaccaacagcaagcccacacagggaggctgggctgcctcacggaggagcacagagacagggctgggccccccagatgcccttcagggcctccagggctccagcccaaaataaataaataaagtcccctactgggactttgggatcccagcatcctcttccaaattctcacctaggctgggcctcagcgtaatcctattgagcatgatttttaagtcatcacctctcttcaggataatataaggttctcatcattgacccaaaccagggcaccccccgccccatgcatgcatccagagggacccagatgtgctcacctcagctcagtgtaggaaaccaggacaacaggtaggtcccgcgcttcagcacaccagggtgggcacctggctgatggccactggcctgggtccattgggcccaatgcaagtcttcctccaggctcaccatctggggggacaggaagaggacatgtgtccaaacagagcctcatacttccatgtggggaaggggtaagggatacccatgtgatggggtccatgaggaacactgacctagcatggacgtggggcacgtttggccttccctgtcagcaaaccctgaaaacacagggtaggtgggtcactgggttcaggcaagaaacctgggctgcaccctactgaaggccttgatagcatctccactgtccatgctggctgccccacacgatcccagagccactccgggaccacagggcacaggccaggggaaccaatcagctcatggccaaccaaggagaatggcccagaagccatgcgccactgtggagatggaagttgcatagcctgccccagggcgtggtgggcacctgcctaggtgctatttgcaagccacacctgaaatcgaagcctggagtccccgggccacgtgctttctctggcgggtccctatccatgccccgcacatgtcccaaacacagagtcaggccacccttggccaaccgtgggctacatagtgtcctcttttttcttagccccaagactccgccaccctggaggtgaccccatggctcagaagcagcctgggtggtaaattcctgggacaggaccatcaacagcaggtctttccacctcaggatccagccaatcaccaataggcaaggggtgacctccaggaggacagggctgccgaatggaccaacgcccacaagaacctgggctggcctgcagcatcaccaggcgctggccagagctcagccttgacccaaacccagggaaacagccccgccccccaccaggctcaaagaggccccactgagatggcccattactcaacatggtcggtcgcatttagggccacggttgggatgcgatccttgaatctctgcagcctgaccccatgggctcattcgagcaccccactccagggaaagagagctctcgtgtgacccctgtggcaccccagagcccctgtggcctccttcatgtggcctgggccatccttgaggccagactcgcacactgagtctcagctgggagctgccttcaatgggactgaggggaccctttcctgtctggacaactgttacccctgtaaggcttcagggaaggcattgtcttgggtctgattcccaaggaagccagcctcctggagaaactgtcccaacctggtggggattcaggtcggctccctgaggaaacccacgtggcctaaagagtgacctttggtgaccctacgcagcttggctcatggcccatgatgccagcagaatccactcacctatgcgcatcagtgtcagggagcccacctgggctgaagagctcactgaaagacagaagacacaaagggagaacaggggctcaggaaggacccagcaagctgccctaccacagggaaccagagtgcagacaccaagcccacaaagggagcctgggctgcctcacatgtaatgtggagacagggtagagtcccccccgagatgctgttcagggcccggaggtctccagtccaaaatacagtgcccatgacagggacctagaaatcccagcatcctcttccaaaattctcacctaggctgggcctcagcgtaatcctattgagcatgatttttaagtcatcacctctcttcagaacatataaggttctcatcatcgacccaacccaggacaccaccaccccacaacgcatgcatgcatccattgggacccagatgtgctcaccacagctcagtgcaggagaccagggcatcaggaagggcctgagcttcagattaccaggggctaagc

SEQ ID NO: 1886234 - DNA, 4001 bp, Homo sapiens
attctaacctaggccgggcctcagcataatccttttgagaatgatttttaagtcatcacctctcttcaggacaatataaggttctcatcatcgacccaacccagggcacctccctcccgacccatgcatccagcagtatccgaatgggctcaccaagctcagtgcaggagactagggcacaaggaagggcctgagcttcagcacaccaggggctggacgccgggatgacggacactgatgtggggccagcggccccagtacaagtcctcctccagcgctgccatctgggggtacaggaggaggacatatgtccaaccaggggctcatgcctccaggtggggaagagggtgggggtggggggtaccagttcactcatgctctccctccgtggacccatttgatgggacccatgggaaacactcacgtgtcacagacacaggggacccttggcccttcctgctagggaaccccgtgaggacacggcaggcgggtcactacactcgggcaagacacccaggctgcaccctaaagcaggcctccagagcagctccactgcccacactggctgtcccacacaaccccagggctgcacctgaacccctgggaaagggctagggccaccagcagctcacggacaacgaagtagacaggcccagacaccacatgccgccgctaacctgacagttgcacagcctgaccctgggcatggaggaggcccaggaccgtctccaagcatgcactgagaaattgcagcctggggcccgagggccatgtgttgtctctggtgggtccctatccatgccccacacaacacctcccacacagagagcagggccacactcagctaattgagggaaacacagtgtcctctcctttccttgggcccaagaccctgccactctggaggcgaccccatggctcagaagcagcctggatggcaaatttccaggacagttccttccacagcgggccttcccacttcaggaggatgcccttccaccactcgcccacaaggaagaggtgacccccagcgggacacaggctgcaccctgggcccacagcccactaatctcagggccggactgcaccaccatcaggtgctggccggagctagtctcgacccaacctcaggcaaacagcggcaccccacaccaggttcaaagtggcacccctgggatgccccaatgcttaacagggtcggttccattcagggccatgggtgtggtgtgatctttgaatctggggcccgatcccatgggccgaatcgcccaccactctttggggtcgcagagaccctgcgaagcccctgttgtgccccagagcccttgtggcccccctcatgtggcctggtcatcctagaggcctaacccaaccaccgagtctctgctgggcgctgccctgcctggggctgagggaaccctttcttgcctgcacaactggcacccctgcagggcttcagagaaggcatcttacttggctcagattcacaaggaagctgccctcctggagaacccatcccaggtggggattcaggtcgcctcctgaggaaaccctcatggctcaaatgctgaccctcggcaaccctatggtctggctcatggcccatgacccaagcaggagacactcacctatgccgatcaatgccagggagtcttctgggcaaaagagctcactgaaagacacaggggagaacaggggctcaggaaggagcagccaaaatgccccgcctccaggaaagcagagtgccgacaccaagcctacagagggagcttgggctgcctcacaggggagtgaagagacagggttgggcccccacgaggtgccctgcagggcttccaggtctccaccccaaattatagtggccctgccagggacctcattgatttccagtgtcctcttccaaaattgtcacctagggtgggcctcagcataatccttttgagaatgatttttaagtcatcacctctcttcaggacaatataaggttctcatcatcgacccaacccagggcacctccctccccacccatgcatccagcagtacccaaatgggctcaccaagctcagtgcaggaaactagggcaccaggaagggcatgagcttcagcacaccaggggctggacaccaggctgacggatactggcccagggccattgggcccaacacaattcttcctcccatttcacagtctaggggaacaggagtaggacagctgtccaaacacaacctcactcctgtatgtgagcagaaggtggggtgtggcagttcaagtatgcttgccctccatggacccatgtgatcgtttgcatgcggaacactggcccatcacggacacagggtacccagtgctctcttagccacagaactctggaaggacagggcaggctggtcactgggcccctgctggctcccccacacgacccggggtcaccccagaactactaggcacaggccagggccaccaactcattcgcaggaaaccaaggaagctggcctagatgtcagatgccgctacagccctggcagtcacatagcctatctctgtgcatagtgggtgcccacccagatgccctatcccagcacataatggaaattgcaacctggggtctaagggccacagttttctctggtgggtctgcatccatgccccacacacctcctgaacacagagcagggctacaatcagctaatcaggggacacacggcatcttctgtccctgggcccaagatccgctaccctggaggtgaccccatgactcagaagcagcatgggcagcatattccaaagacaagaccctagatagcaggccttgcaacctcaggaggcaaccattcccgacacttgccccttgggaagggatgacttccagccacggggaaggggggacttccagggggagcaggctgaccccttggcccaaagccaacgagtccatggccagacctcagcaccaccaggcaccggccagagtccagccttgactcaaacatagggaaacagcaccgccccgctcaaggctcgatgaggcccatagaatggctcattactcaacagggtctgtcccattcagggccatacattgggcgcaatccttaaatctccacagctcgactccatgggccctatcatccatctttctccatgaatggagagctcctatgtgacccccatggtgtcccagagtccctgttggcccctcaggtggcctgggcagtcctcaaggccagactcgaacacctagactcagctgggagctactatgtgtgagactgaaggaaccctctcctgcctggaccaccgtcatcactgcagggctccagggaaggcgtcccccttgggtccgatttctcaggaagccacccttctggaggaccaacctatccctccctggtggggattcaggttcgctccctgaggaaactctcctgtcccgaaggctgaccctcagtgactctacccagcctggcccatggcccacgatggcagcaggatccactcacctatgctggtgaatgccagggtgccccgcctgggttgaagagctcactgaaagacacaagtggagcaggggggctcaaggaggagctgtccacgtgccccgccccaaggaactggaccaccaacagcaagcccacacagggaggctgggctgcctcacggaggagcacagagacagggctgggccccccagatgcccttcagggcctccagggctccagcccaaaataaataaataaagtcccctactgggactttgggatcccagcatcctcttccaaattctcacctaggctgggcctcagcgtaatcctattgagcatgatttttaagtcatcacctctcttcaggataatataaggttctcatcattgacccaaaccagggcaccccccgccccatgcatgcatccagagggacccagatgtgctcacctcagctcagtgtaggaaaccaggacaacaggtaggtcccgcgcttcagcacaccagggtgggcacctg

SEQ ID NO: 1886235 - DNA, 4001 bp, Homo sapiens
caaggaggcaccagtgggacagcccattgcacaacagggttggtcccatcagggcaatgggtggggcctgacccttgaatcttggcctgaatccataaactcgatcacccacaccctgctgccatcccgccacccccagcaagcctcaaggatggagagttcctgcttaacacctgtggcctccggagatcctgtggaacccctcatgttgcctgggagtcctcaagccctcacccgtgcaccgagtctcagctagaagctgtactgcattgggttgaatggaccctttcctgcctggaccatcgtcacccctgcacagcttcagggaaggcatccttcttggaaccagtttctatggaagacatcctcctggagaaaccatccctcccagtggggattcaggtcagctccctgaggaaacccacatggcctaaaggtgacctccggcaaccgtacgcaccctggctcatggaccaggacaccagcaggatgtactcacctatgcccatcaagaccagggggaccacctgggcagaagagctcactgaaagacacaggggagaacgggtactcagggacaagctgacagtatgtcccatccccggagaacgggaaggccaacaccaagtccacacagcgaatgtgggttgcctcacggacaagcacagagacaggtttcagcagccctcagacacccttcagggcctcaaggactccagccaaaaattcagtggcctggctggggatctcaggatccgagaatcctcttccaaaattctaacctaggccgggcctcagcataatccttttgagaatgatttttaagtcatcacctctcttcaggacaatataaggttctcatcatcgacccaacccagggcacctccctacccgcccatgcatccagcagtccccgaatggactcaccaagctcagtgcaggagactagggcaacaggaagggcctgagcttcagcacaccaggggctggatgccaggctgacgaacactgacgtggggccagtggccccaatacaagtcctcctccagggccaccatctggggggacaggaggaggacatatgtccaaccaggggctcatgtgggaaagggagcaaggggtgcctgttcacacatgctctccctccatggacccatgtgatgggatccaggtgaaacagtgacggtaatggacccagggaaaccttggctctccccaccaccgaaccctacaagcctgaccacatgggcctgattgcccacctctctccggggatggagagccccactcataatccccgtggcaccctggagcccttgttgccccactcatgtggcccgggcagtcctcaaggtcagacgcaggcacggaatgtcagcagggagctgccccacatgagactgaaggaaaactttccagcctggaccaccatcacccctgcagggcttcagcaaaggtgtcctcctggggtcagattccctaggaagccaccctcctggaggactaacacatccctccacggtggggattcaggttggctccccgaggaaatcttcctgtcctgaaggctgaccctcagtcactccatgtggtctggctcatggcccatgaacccagcaggatccacttacctatgctggtcaatgccaggggacccgcctgagcagaagagctcactgaaagaatcaaggggagaacaatggttcagaaggaaccagcaacctgaaccgcccccagaaaaccagagtgccaacaccaagcccacacagagagcctgggctgcctcacagaggagtatagggacagggctgggccccccagatacccttcagggcctccaggtctccagccaaaaataaaggggctctcctggggacctcaggatcccagcatcctcttccaaaattctaacctaggccgggcctcagcataatccttttgagaatgatttttaagtcatcacctctcttcaggacaatataaggttctcatcatcgacccaacccagggcacctccctcccgacccatgcatccagcagtatccgaatgggctcaccaagctcagtgcaggagactagggcacaaggaagggcctgagcttcagcacaccaggggctggacgccgggatgacggacactgatgtggggccagcggccccagtacaagtcctcctccagcgctgccatctgggggtacaggaggaggacatatgtccaaccaggggctcatgcctccaggtggggaagagggtgggggtggggggtaccagttcactcatgctctccctccgtggacccatttgatgggacccatgggaaacactcacgtgtcacagacacaggggacccttggcccttcctgctagggaaccccgtgaggacacggcaggcgggtcactacactcgggcaagacacccaggctgcaccctaaagcaggcctccagagcagctccactgcccacactggctgtcccacacaaccccagggctgcacctgaacccctgggaaagggctagggccaccagcagctcacggacaacgaagtagacaggcccagacaccacatgccgccgctaacctgacagttgcacagcctgaccctgggcatggaggaggcccaggaccgtctccaagcatgcactgagaaattgcagcctggggcccgagggccatgtgttgtctctggtgggtccctatccatgccccacacaacacctcccacacagagagcagggccacactcagctaattgagggaaacacagtgtcctctcctttccttgggcccaagaccctgccactctggaggcgaccccatggctcagaagcagcctggatggcaaatttccaggacagttccttccacagcgggccttcccacttcaggaggatgcccttccaccactcgcccacaaggaagaggtgacccccagcgggacacaggctgcaccctgggcccacagcccactaatctcagggccggactgcaccaccatcaggtgctggccggagctagtctcgacccaacctcaggcaaacagcggcaccccacaccaggttcaaagtggcacccctgggatgccccaatgcttaacagggtcggttccattcagggccatgggtgtggtgtgatctttgaatctggggcccgatcccatgggccgaatcgcccaccactctttggggtcgcagagaccctgcgaagcccctgttgtgccccagagcccttgtggcccccctcatgtggcctggtcatcctagaggcctaacccaaccaccgagtctctgctgggcgctgccctgcctggggctgagggaaccctttcttgcctgcacaactggcacccctgcagggcttcagagaaggcatcttacttggctcagattcacaaggaagctgccctcctggagaacccatcccaggtggggattcaggtcgcctcctgaggaaaccctcatggctcaaatgctgaccctcggcaaccctatggtctggctcatggcccatgacccaagcaggagacactcacctatgccgatcaatgccagggagtcttctgggcaaaagagctcactgaaagacacaggggagaacaggggctcaggaaggagcagccaaaatgccccgcctccaggaaagcagagtgccgacaccaagcctacagagggagcttgggctgcctcacaggggagtgaagagacagggttgggcccccacgaggtgccctgcagggcttccaggtctccaccccaaattatagtggccctgccagggacctcattgatttccagtgtcctcttccaaaattgtcacctagggtgggcctcagcataatccttttgagaatgatttttaagtcatcacctctcttcaggacaatataaggttctcatcatcgacccaacccagggcacctccctccccacccatgcatccagcagtacccaaatgggctcaccaagctcagtgcaggaaactagggcaccaggaagggcatg

SEQ ID NO: 1886236 - DNA, 4001 bp, Homo sapiens
ttttaacctagactgggcctcagcataatcctattgagcatgatttttaagtcatcacctctcttcaggacaatataaggttctcatcatcgacccaacctagggcacatccctccctgtgcatgcatccagtgggacctggttgtgctcaccacacctcagtgcaggagaccagggcgttgggaagggcctgagcttcagcacactgggggctggggacctggctgacgcacactggcccagagccacggggtcttcctctgggctcaccatctggtgagatagctggaagatgggtccaaacagggcctcaccctgcaatgcggggaagagagtggggagtgccggctcacacatgctctccctgcatgtacccatgtgatgggatccaggaggaacgctgacctgtcatggacgtgggggacccttggccctccctgctaccgaaccctggaaggaaagggcaggtggttcactgcgctcaagcaagaacacctgggctgtgccctactgcaggccccaagagcacctccactgcccatgccggcttcccctgaacaaccccagggccgcaccaggacccctcggcacaggccagggctatcaaccagctcataagcaatcaaggaggctagcccagatgccacaaactgctgcagacctggcagtcacatagcctgcgcctgggcatggagagtgtccactcagacgccctctataagcacgccggaaattgcatcctggggcccagggccacgcgccttctctggtgggtccccattcatgcaccacataccacccaaacactctccccattctcagccaatcaggggacacatgatgccctctcctttccctgggctcaagatcccgcctctctggaggtgaacccatggcttagaagcagcctgaacagcaaattggtgggacaggaccctcaacagtgggcctttcaccacaggatgcctgccacccttccggccactccacctctgggtaggatgacctccagaggcaggcgggctgcacccttggcccaaagtccacaattcccagggccaaccaccaggtgcgggccagagctcagccttgacccaaccccattgaagccacgctgcccacaccaggctcaaggaggcaccagtgggacagcccattgcacaacagggttggtcccatcagggcaatgggtggggcctgacccttgaatcttggcctgaatccataaactcgatcacccacaccctgctgccatcccgccacccccagcaagcctcaaggatggagagttcctgcttaacacctgtggcctccggagatcctgtggaacccctcatgttgcctgggagtcctcaagccctcacccgtgcaccgagtctcagctagaagctgtactgcattgggttgaatggaccctttcctgcctggaccatcgtcacccctgcacagcttcagggaaggcatccttcttggaaccagtttctatggaagacatcctcctggagaaaccatccctcccagtggggattcaggtcagctccctgaggaaacccacatggcctaaaggtgacctccggcaaccgtacgcaccctggctcatggaccaggacaccagcaggatgtactcacctatgcccatcaagaccagggggaccacctgggcagaagagctcactgaaagacacaggggagaacgggtactcagggacaagctgacagtatgtcccatccccggagaacgggaaggccaacaccaagtccacacagcgaatgtgggttgcctcacggacaagcacagagacaggtttcagcagccctcagacacccttcagggcctcaaggactccagccaaaaattcagtggcctggctggggatctcaggatccgagaatcctcttccaaaattctaacctaggccgggcctcagcataatccttttgagaatgatttttaagtcatcacctctcttcaggacaatataaggttctcatcatcgacccaacccagggcacctccctacccgcccatgcatccagcagtccccgaatggactcaccaagctcagtgcaggagactagggcaacaggaagggcctgagcttcagcacaccaggggctggatgccaggctgacgaacactgacgtggggccagtggccccaatacaagtcctcctccagggccaccatctggggggacaggaggaggacatatgtccaaccaggggctcatgtgggaaagggagcaaggggtgcctgttcacacatgctctccctccatggacccatgtgatgggatccaggtgaaacagtgacggtaatggacccagggaaaccttggctctccccaccaccgaaccctacaagcctgaccacatgggcctgattgcccacctctctccggggatggagagccccactcataatccccgtggcaccctggagcccttgttgccccactcatgtggcccgggcagtcctcaaggtcagacgcaggcacggaatgtcagcagggagctgccccacatgagactgaaggaaaactttccagcctggaccaccatcacccctgcagggcttcagcaaaggtgtcctcctggggtcagattccctaggaagccaccctcctggaggactaacacatccctccacggtggggattcaggttggctccccgaggaaatcttcctgtcctgaaggctgaccctcagtcactccatgtggtctggctcatggcccatgaacccagcaggatccacttacctatgctggtcaatgccaggggacccgcctgagcagaagagctcactgaaagaatcaaggggagaacaatggttcagaaggaaccagcaacctgaaccgcccccagaaaaccagagtgccaacaccaagcccacacagagagcctgggctgcctcacagaggagtatagggacagggctgggccccccagatacccttcagggcctccaggtctccagccaaaaataaaggggctctcctggggacctcaggatcccagcatcctcttccaaaattctaacctaggccgggcctcagcataatccttttgagaatgatttttaagtcatcacctctcttcaggacaatataaggttctcatcatcgacccaacccagggcacctccctcccgacccatgcatccagcagtatccgaatgggctcaccaagctcagtgcaggagactagggcacaaggaagggcctgagcttcagcacaccaggggctggacgccgggatgacggacactgatgtggggccagcggccccagtacaagtcctcctccagcgctgccatctgggggtacaggaggaggacatatgtccaaccaggggctcatgcctccaggtggggaagagggtgggggtggggggtaccagttcactcatgctctccctccgtggacccatttgatgggacccatgggaaacactcacgtgtcacagacacaggggacccttggcccttcctgctagggaaccccgtgaggacacggcaggcgggtcactacactcgggcaagacacccaggctgcaccctaaagcaggcctccagagcagctccactgcccacactggctgtcccacacaaccccagggctgcacctgaacccctgggaaagggctagggccaccagcagctcacggacaacgaagtagacaggcccagacaccacatgccgccgctaacctgacagttgcacagcctgaccctgggcatggaggaggcccaggaccgtctccaagcatgcactgagaaattgcagcctggggcccgagggccatgtgttgtctctggtgggtccctatccatgccccacacaacacctcccacacagagagcagggccacactcagctaattgagggaaacacagtgtcctctcctttccttgggcccaagaccctgccactctggaggcgaccccatggctcagaagcagcctggatggcaaatttccaggacagttccttccacagc

SEQ ID NO: 1886237 - DNA, 4001 bp, Homo sapiens; identical to SEQ ID NO: 1886234

SEQ ID NO: 1886238 - DNA, 4001 bp, Homo sapiens; identical to SEQ ID NO: 1886235

SEQ ID NO: 1886239 - DNA, 4001 bp, Homo sapiens; identical to SEQ ID NO: 1886236

SEQ ID NO: 1886240 - DNA, 4001 bp, Homo sapiens; identical to SEQ ID NO: 1886234

SEQ ID NO: 1886241 - DNA, 4001 bp, Homo sapiens; identical to SEQ ID NO: 1886235

SEQ ID NO: 1886242 - DNA, 4001 bp, Homo sapiens; identical to SEQ ID NO: 1886236

SEQ ID NO: 1886243 - DNA, 4001 bp, Homo sapiens
gcacaaattgttcgtaaaacatgtgtgtttaaacaatatgaaatctgggcaccttgaaaaaagaacaggataacagcgatgttcagggaacaagggagacaaccatcaggcctgactgcctgagagccgggcggaacagagccatatttctcttcttacaaaagcgaataggagaaatattgctgaattatttttctcagcaaggaacaaccctgagaaagagaatgccttcctagggggaggtctctaaaatggccgctctgggaatgtctgtcttatacagttgtagataagggatgaaataagccctggtctcccgaagcgctcctaggcctattaggacgaggaaattcctgcctaataaattttggtcagaccggttgtctgctctcaaaccctgtctcctgataagatgttatcaatgacaatgcgtgcccgaaacttcattagcaatttcaatttggccctggtgctctgccctcatttgccttctgatattttattgccttgtgaagcatgtgatttctgtgacccacaccctatttgtacactccctcccctttgaaaatcactaataaaaacttgctggttttgcagcttgggtggcatcatggaacctgccgacatgtgatgtctcccccggacacccagctttaaaatttctttcttttgtactctttccctttatttctcagaccggccgacacttagggaaaatagaaaaggacctacgttgaattattgggggcgggttcccccgatagaacagggcaccaggaagggcccaaacttcagcacgccaggggctgggcacctggctgacagacactggccccaggccattgggcccaacacaagtcctccttcagggtcaccatctggagagacagggaaaagtgtccgaacagaacctcatgcctccatgcgggaaaggaggcagggggtgctgactcacacatgctctccctccatggacccacctgatgggatccatgtgaaacagtgatagtcatggacgtgggggacccttggtcctccctgccactgaaccctggaaaacagggcaggctggtcactgggctcaagcaagatgcccaggctgtgccctactgcaagcccctggagcacctccactccccatgccagctcccctgcaattcctgggctgcaccatgacccctgggtggggccaaggccactatccagctcaagccaaccaaggaggctggtcctgaaggcaggcaccgctgcagccccagcagatgcacagcctgcccctgcacagggagggggcctacccaggctccctctccaagcatgcactggaaatagcagcctgagaccctgcctcatgtggcctgggcagtcctcgaggccagaccctagcaccaagtctcagctgggagctgccctgcatgggactaatggaaccctttcctgcctggaccactgtcactcctgcagggcttcagggaaggtgtcctccttgggtcagattcccaaggaggtggttctcctggagaaccaatccctcaccagtggggattcaggttgtctccctgaggaatccctcctgtcctgaaggctgaccctcagtgaccccatgtggcctggtccatgagcccagcaggatccgctcacctatgctgctcaaggccagggggccctcatgggcggaagagctcactgaaagacacaaagggagaacgtgacttcagggatgagccacccacgtgccctgctccagggaaccagagcactgacacgaagcccacacagggaaactgggctgcctcacagacaagtgcagagacagggatggggcccctgcagatacccttcagggcctccaggtctccagcccaaaatccctcctgccggggatcccagcatcctcttccaaaattctcacctaggctgggcctcagcataatcctattgagcatgatttttaagtcatcacctctcttcaagaaaacagaagcttctcatcatcgacccaacccggggaaagcccctccccatgcaaacatccagcaggacctggatgtgctcaccacagctcagtgcaggagaccagagtgccagggagggctgagcttcagcgcactggggtctgggcacctggctgatggacactggcccagggacagtgggaccagggcaagtcttcctccaggctcactgtctggggggacaagaagacatgtgtccaaacatggcctcacgcctccatagtgggaaggtggtgggtggtgccagctcatgcatgctctccctccatggacccatgtgatgggaacactgacccatcacagacgcaggagacgcttggtactccccatcactgcaaagcgggggtgggtcactgagctaggactaggacagggcaggtgggtcactgagctcgtgcaaggcacctaggctgcgctctattgcaggccccacaagcacctccactacccacaccagctcccctgcaggacccctgggccactccaagaccactgggcacaggacagggcaaccaacctgctcatggccaaccaaggaggctgacctggaagccacatgccactgcagacctggcagttgcatagcctgtgcctgggagtggagggcactcacccagagttctctccaagtgtgcatgggaaatcataacctggggccctgggccatgtgtgttctctggtgggtccccattcataccctacacacctcccaaacacagagccaagccacactcagccaactggggaacacagggtatcttctcctttcctcgggcccaagaccccaccaccctggaggtgagtccgtggatcagaagaagcctgggaggcaaattccctggacaggaccctcgacagtgggccttcccagctaaggatgccacccttcctgctagttgcccacagggaaggggtgacctccagtgggacacgggctggcccctttgcccaaagccagcgagtcccagggccagcctgcagcactaccaggcaccggccagagctcagccttgacccaacccccttgaagccacatcacccccgactaggctccgaggcaccactgggatggtccattgctcaaaggctcagtcccattcaggttcatgggtggggcccaatccttgatctccaaaggcctgaccccataggcccaatcgctcacccctctctggggaaggagagctcctgtgtgacccctgtggtgccccggagctcctatggacccccttatgtgacctgggcagtcctcatggccagacctgcacactgagtctcagctgggcgctgtcctgggtggggttgaaggaaccctttgctgcctggaccaccctcaccactgcagggctttagagaagatatcctccttgggtcagactcccaaggaagctgccctcctggagaacctagccctccccagtggggattcaggttggctccctaaggaaaccctcctgtcccaaaggctgacccttggcgaccccagcagcctggctcatggcccatgaccccagcaggatccactcacctatgccggtcaatgccagggggcctgcctgggcagaagagctcactgaaagacacaggggagaatgggggtcagggaggagccacccacatgccctgcccctagggaaccagagccccagcctatgcccacacagggatccttgactgcctcacggggttgctcagagataggcttgggccaccttcagatgcccttcagggcctctaggtctgcagcccgaaatacagtggccccgtcgggggcctctggatcccagcatcctcttccaaaattctcacctaggctgggcctcagcgtaatcctattgagcatgatttttaagtcatcacctctcttcaggataatataaggttctcatcatcaacacaacccagggcacccccctccccgcccatgtatccagcaggacccggatgggctcaccacagctcagtgcaggaggccagggcatcagg

SEQ ID NO: 1886244 - DNA, 4001 bp, Homo sapiens
gatgcccttcagggccttgaggtctccagcccaaaatacggtggccctgccacggacctcaggatcccagcgtcctcttccaaaattctcccctaggttgggcctcagcgtaatcctattgagcatgatttttaagtcatcacctctcttcagaaaatataaggttctcatcatcgacccaaccgagggcaaccccctcccatgcatgcatccagtgggacccagatgggctcaccacagctcagggcaggagaccagggctccaggaagggcctgagcttcagtgcatcaggagctggggacctggctgacagaaactggcccagctccattgggcccaatgcaagtcttcctccgagctcaccatctaggacaggaggacacatgtccaagtaaggcctcatgcttccatgtggggaaggtgggtaggggatatccatgtgataggatccatgcagagcactgatgtgtcacggagacaaacatggaccacccttggccctcccagccacccaaccctggaaggacagtgcaggtgggtcactggtctcacacaaaaagtccaggctgcgccctactgcaggtcctgagagcacctccactgccctgctggctgccctgcacaatgccaggtctaccctgagaccactgggcacaggccagggccaccaaccagcacatggccaaccagaaggcttgcccggatgccacgcgctgctgcagacctggcagtcgagagcctgctcctgcccctctccaagcacacactggaaatcacagcctggggctccagggctatgtactttctttgatacatccccatccacaccctgcacacctcccaaacacagagctaggccacactcaaccaatctggggacacatgttatgctcctctttccttggacccaagatgctgccactctggaggtgacctcatgtctcagaagcagcctgggtggcaaattcccaggacaggttgctcaatagcaggacttcccaccttaggaagccaccactcccgccattcaacctccgggaaggggtgaccccaagcatgacacaagctgtccccatggcccaaagcccatgagttctagggccagcctgcagcaccacaggcactagccagagctcagccttgacctagccccagggaaacagcaccacccaccgccagactcaaggaggtgccattgggatggcccattactcaacagggtcagtcccattcagggccatgggtgtccttgaaactccgcggcatgacccccacggacccaatcgcctacccctctctgcagaccccctgtagtgccccggagcccctgtggccacctcatgtgtcctgggcagtcctcaaggcctgaccgatgcaccaagtctcagatgggagctgcctgcttggtgctgaatgaaccctttcctgcctggaccaccaccacccctgctgggcttcaggacaggcgtccttcttgggtccgattcccaaggaagtggcccttctggataactcatccccggtgggaattcaggtccacacttttaggaaactctcatggcccgaaggcagatgcatggtgaccccactttgcctcgctcatgacccatgacccaaagaggatccactcacctatgccggtcaatgtcagagggcccaaatgggcggaagagctcactgaaagagacaggggagaatgggggctctggaaggaggtgcccacatgccacgcctgggaaccagagcaccaacaccaaggccacacagggagccagggctgcctcatggaggagcacagagacaggttggaccccctcaagatgccctttagggcctcgagttctctagtccaaaatacagtggccctgcctgtgaacttgggatcccagcatcctcttccagaattttaacctagactgggcctcagcataatcctattgagcatgatttttaagtcatcacctctcttcaggacaatataaggttctcatcatcgacccaacctagggcacatccctccctgtgcatgcatccagtgggacctggttgtgctcaccacacctcagtgcaggagaccagggcgttgggaagggcctgagcttcagcacactgggggctggggacctggctgacgcacactggcccagagccacggggtcttcctctgggctcaccatctggtgagatagctggaagatgggtccaaacagggcctcaccctgcaatgcggggaagagagtggggagtgccggctcacacatgctctccctgcatgtacccatgtgatgggatccaggaggaacgctgacctgtcatggacgtgggggacccttggccctccctgctaccgaaccctggaaggaaagggcaggtggttcactgcgctcaagcaagaacacctgggctgtgccctactgcaggccccaagagcacctccactgcccatgccggcttcccctgaacaaccccagggccgcaccaggacccctcggcacaggccagggctatcaaccagctcataagcaatcaaggaggctagcccagatgccacaaactgctgcagacctggcagtcacatagcctgcgcctgggcatggagagtgtccactcagacgccctctataagcacgccggaaattgcatcctggggcccagggccacgcgccttctctggtgggtccccattcatgcaccacataccacccaaacactctccccattctcagccaatcaggggacacatgatgccctctcctttccctgggctcaagatcccgcctctctggaggtgaacccatggcttagaagcagcctgaacagcaaattggtgggacaggaccctcaacagtgggcctttcaccacaggatgcctgccacccttccggccactccacctctgggtaggatgacctccagaggcaggcgggctgcacccttggcccaaagtccacaattcccagggccaaccaccaggtgcgggccagagctcagccttgacccaaccccattgaagccacgctgcccacaccaggctcaaggaggcaccagtgggacagcccattgcacaacagggttggtcccatcagggcaatgggtggggcctgacccttgaatcttggcctgaatccataaactcgatcacccacaccctgctgccatcccgccacccccagcaagcctcaaggatggagagttcctgcttaacacctgtggcctccggagatcctgtggaacccctcatgttgcctgggagtcctcaagccctcacccgtgcaccgagtctcagctagaagctgtactgcattgggttgaatggaccctttcctgcctggaccatcgtcacccctgcacagcttcagggaaggcatccttcttggaaccagtttctatggaagacatcctcctggagaaaccatccctcccagtggggattcaggtcagctccctgaggaaacccacatggcctaaaggtgacctccggcaaccgtacgcaccctggctcatggaccaggacaccagcaggatgtactcacctatgcccatcaagaccagggggaccacctgggcagaagagctcactgaaagacacaggggagaacgggtactcagggacaagctgacagtatgtcccatccccggagaacgggaaggccaacaccaagtccacacagcgaatgtgggttgcctcacggacaagcacagagacaggtttcagcagccctcagacacccttcagggcctcaaggactccagccaaaaattcagtggcctggctggggatctcaggatccgagaatcctcttccaaaattctaacctaggccgggcctcagcataatccttttgagaatgatttttaagtcatcacctctcttcaggacaatataaggttctcatcatcgacccaacccagggcacctccctacccgcccatgcatccagcagtccccgaatggactcaccaagctcagtgcaggagactagggcaacaggaagggcct

SEQ ID NO: 1886245 - DNA, 4001 bp, Homo sapiens; identical to SEQ ID NO: 1886244

SEQ ID NO: 1886246 - DNA, 4001 bp, Homo sapiens
ccctgttggagatctcgggatcccagtgtcttcttccaacatactcacctaggttgggcctcagcgtaatcctattgagcatgatttttaagtcatcacctctcttcaggacaatagaaggttctcatcactgacccaaccaagggcaagcccctctccatgcatgcatccagcggaacctgaatgtgctcaccacagctcagtgcaggagaccagggtgccacggagggtctgagcttcagcacactgggggtgagcaccaggctgacggacactggcctggggcctgtgggggcccaatacaagtcttcctcaaggctcaccatctggggtgacaggagaaggacatgtgtccaaccagggcctcacgtatgagcaaggggaaggtgggtaggggatacccacgtgatggaatccatgaagaacactgatccaacacagacgcagagcatcattggccctcccggccaccaaaccctggaaagacaaggcaagcaggttactgggctcaggcaagatgcctgggctgttccctactgcaggccctaagcgcacctccactgcttgagccggctcccctgaaaaaccccagggccacactgggaccatggggatgggtcagggcaaccaacctgctcatggccaaccaatgagtctggccctgacaccaggagccaatgcagacctggcagtcgcagagcctgccctgggcgtggtgggtgcccaacctggtgccctctccaagcacacaccggaaatcaaaccctgggggcctccagagccacgtgctttctctggtgggtcctcatcttgcgttacacctcccacacacaaagccaggccacacttggtcaataagaaaccacatggtgtcctctcctttccttgggatcaagaccctaccaccctggaggtgaccccgtggctcagaagcagcctgtgtggcaaattcccagaacaggtccctcgacagcaggacttcccatctcaggaggacacccttttggccactgaatctcaaggaaggggtgaccccagtgggatgtgagctaccccttgtcccaaagaccacaaccctcagggctgcctgcagcaccaccaggcaccagccagagctcagccttgattcaactgcattgaaacagtgtctccccctaccaggctcaaggaggtaccactgagatggcccattactcaacagggtcggtcccattcagggccatggatggggtgcagtcctgaatctccggggcctgtctgcgtgggcccaatcacccaccactgtccagagagggagaactccagcgtgacccccaggttgccccagagcccctgttgcccacctcatgtggcctgggcagtcctcgaggcctgaccagccttccgagtttcagctgggagctgcgctatgttgggctgaaggaaccctctcctgtctggaccaccatcacctttgcaggacttcaagaaatgcgtgctcctaggatcagatttccaaggaagtgaccctactggagaaatgttccctccccggtcgcaccctgagaaaactctagtggcccgaaggctgaccctaaatggccccatgctgcctcattcatggcccatgaccccaacaggatacactcacctatgtcgtgtaaggccatgggccccacctgggcagaagagctcactgaaagacatgggggagaaagcgggctcaggaaggagccaccaacatgccccgcccccggggaaccagagaccagacaccaagcccacacagggagcctgggctgccttacagaggggcacagagacagggtggcaccccctgagaggcccttcagggccttgagttctccaccccaaaatatagtggccctgcctgggatctcaggatcccagcatcctcttccaaagttctcacctaggctgggcctcagcgtaatcctattgagcatgatttttaagtcatcacctctcttcaggaaaatataaggttctcatcatcgacccaacccacgagaccaaccacctcttgcatgcatccagcgggacccggatgtgctcaccacagctagtgcaggagaccagggtgtgaggaagggcctgagcttcagcgcctcaggggctgggcaacaggctgatggccactggcccaggaacagcaggcccaacacaagtcttcctcccgtctcaccatctgggagagaggtggagaacatgtgtccaaaatggcctctatgtagggaaggaagtagcgggtgccagttcccgcttgctcgtcctccatgggcacatgtgatgagatccatgtgaaatactgacttgtcactgacatggggcacccttgtccctccctgccacccaaccctggaaggacagggcaggtaggtcactgggctcgggccaaatgcccagcctgcgccatattgcaggccctgagaggacctccactgtccaagagggctcccctgcatgaccccaaggcacgggccagggccattagctaggtcatggccaaccaagaaggctggcccagatgccatgtgccactgcagtcctggcagtcacgtagtctgcccctgggtgtggtgggctcacatcaagatgccctctctaagcatgtactggaaatcacagcttggggctgcagggccacgtgctttctctggtgggtcaccagccatgctctgcacacctcccaccacagagctaggctacacttggccaactcagagcgacatggtgccctctcctttgcttgggcccaagaccctgtcaccctggaggtgataccatggctcagaagaagcctgagcaacaaaatcctgggacaggtccctcgacaatgggccttcccacctcaggaggccacccttcgtgacattcgaccccagagatagggtgaccccccagcaggatgccagctgtcccttggcccaaagcttacgagtcccaaggctgacctgcagcatgaccaggtaccagagctccaccttgacccaaccccagggaaaaaacgtcgccctgcaccagactccaggagacccggtgggatggcccattgctcaatagggatggtcactttcagggccatgggtggggtgtgatccttgaatctccgtgaccaaaccccattcacacaccacactccagggaccaagagctcccctattaccccagtggtgctccatagcccctctggcctccttcatgtggcctgggcagtcctggagaccttactggagcactcagtctcaactgggagctgtcctgcattgggcagaaggaaccctctcctgcctggaccaccatcacccttgcagggcttcagggaaggcatcctccttgggctagattcccaaaaaaactaccctccaggagaacccttccctcccaggtggaaattcaggtctgctccccgagaaaacccttgtggactgaaggctgaacctcggggaccccacacggtctagctcatgaccaatgaccccagcaggatccactcacctatgccagtcaatgccaaggggccctcctgggtggaagagctcactgaaagacacaaggtgagaatgagggctcaggaaggagccaccaacattccccacaccagagaaccggagcaccaacaccaaccctgcacagggagcctgggctgcctcatggaggagcgcagagacaggttgggccacctccagatgcccttcagagcctccaggtctctagcccaaaatacagtggccttgctgaggacctcagcatcccataatccccttccaaaattctcacctaggctgggcctcagcgtaatcctattgagcatgatttttaagtcatcacctctcttcaggacaatataagattctcatcattgacccaacgtagaaaaccccctccccgcacaaaaatccagtggaacccggatgtgctcaccacagcttagtgcagaagactggggcaccaggaaaggctggagcttcagtacaccaggggctgagcacctggctgat

SEQ ID NO: 1886247 - DNA, 4001 bp, Homo sapiens; identical to SEQ ID NO: 1886221

SEQ ID NO: 1886248 - DNA, 4001 bp, Homo sapiens
tcgggatcccagcatcctcctccaaatttctcacctaggttgggcctcagcgtaatcattgagcatggtaattttaagtcatcacctctcttcaacacaatatagggttctcatcattgacccaacccagggcaccccccctgcccacacatacatccagcgggacccggatgtgctcaccacagctcagtgcaggagatcaaggggccaggaagggcctgagcttcagtgcaccaggggctgagcacctggctgacggacacttgccagggtccattggtcctgatgcaagtcttccttcaggctcaccatctggatggacaggaggaggacatgtgtccaaacagggcctcatacctccaggtggggaatggggtaagggatacccatgtgatgggatccatgtggaacactgacctgtcacggatacagggcactctcggccctccccatcaccaaaccctgaaaaaacagggcaggtggatcactgggcttgggcaagacccctggtcttcatgctattgcagaccttgagggcacatccagtgccccctctgacttctccttcacacgatcccagggctgccccaggaccactgagcatgggacagggtcaccgacatgctcatggccaaccgaggagcctggcccagaagccatgtgccaccgtggacatggaagttgcatagcctgccgctgggcatggtgggcacctgcccaggcactctctccaagccacacctgaaatcacagcctggagtaccagggccatgtgctttctctggtgggtccccatccatgccccacacatgtcccaaacacagatccgggccacccttggccaatcctgggccacatggtgtcctttcctttccctaggcccaagaccctgccaccctggacatgaccccatggcacagagagtctgggcagcaaattctcaggataggaccatcaacagcgggccttcccaccgcacattccactcttccagccactcacccatggggaaggggtgacctccagcaggacacaagctgtcgacttggcctaaagctcacgagtcccaggtccggcccacagcctcaccaggcactggccagagctcagccttgacccaaacccagggaaacagcactgccccccaccaagctcaaagaggcaccatgggatggtccatagctcaacagggtcagtcccattttgggacatagttgggtacaatccttgaatctccacggcccaatcccataggctcattcaagcacccctctccagggaaagagaactcttgcatgacccccgtggtgccccggaggccctgtggcccccatcatgtggcctcggcaatcctcgaggcctgacacatgcactgagtctcagctgggagctctcctgcacggggctgaaggaagtctttgctgcctggaccactgtcatccctgcagggcttcaggaaggcaacatcttgggtccagttcccaaggaagccgccctcctgtagaaaccatccctccccggtggaaatacaggttggctccctgaggaaaccctcctgtcctaaagactgacccttggtgaccccacgcggcctgactcatggcccatgacaccagcaggatgcactcacctaggctaatcaaggtgaaggggcccttctgagctgaagagctcactgaaagacacaaggcaagaatggggactcagggaaaagccaccaatgtgccctgcccctgggaaacagtgccaacaccaagtccgcacagggagcctgctgtgcttcacggaggagtgcagagacagggttgggtccctgtgagaggcccttgagggcctccaggtctccagcccaaaatacagtggccctgccagggtccttgtgattctcagtgtccacttccaaaattgtcacctaggctgggactcagcgtaatcctattgagcatgatttttaagtcatcacctctcttcaggacaatataaggttctcatcattgacccaacccagtgcaccccgctccccatgcatacatccagaagaacccggatgggctcaccagctccatgaaggagaccagggtgccaggaagggcccaagcttcagtacaaaaggacctgggcacctggttgatggcctctggccggcgcacagaaggcccagtgcaagtcttcctccaggctcaccatctggggggacaggaggagggcccatgtgatgggattcacatgaaatactgacctgtcatggacacagggtacccttgggcctccccgccaccgaaccctggaaggacagggcagggaggtcactgggctcgggcaagatgcctgggatgtgcctactgcacacctcaagataacctcccctgcctacactggctgctccacatgaccccagggctgcacagagatcactggacacgggctagggccaccaaccagctcacagccaacaaaggaggctggtcctgatgccaggcactgccgcagacctggtagttgcatagcctacccttgggcatggtgggcgcccaaccaggcgccctctccaagtgcgcatcagaaatcgcagcctggggcttcattggcccgtgctttctctggtgggtccccatccatgccctgcacacctcccaaactcagagccaggccatactcgaccaatcaggggccacatggtgtcttctctgctccttgggcccaagaccccaccacctggaggtgacgccatggctcagaagcagcctgggcagcaaattcccaggacaggaccctccacagcaggccttcccacctaaggaggccatgcatcctgacactgaaactcaggaaagatgtgacccccagcagaactcaggctgccgacctggcccaaagcccacaagtccctgggccagcctgcaacaccatcaggtgctggccagagctcaagcttcacccatccccactgaaacagtggcgcccccaccaggctcaatgtggagccactgggatggctcattgctcaacagcatcggtcccattcagggccacaggtgggcgcgatccttgaaacactgcagcctgaccctgtgggcctgatcactctgtcaccacccccacaacaagcctgaagaccgagagctcctgcatgacccctgtggtgcctcacagcctgtgtggcaccccgcatgtggcctgggcagttcttgaggcctgacccatgcacagaatctcatctgggagctgcctgccctgcaggggctgaaaaaaccctttgctgcttgaaacatcatcacttctgcaggtcttcagagaagatgtcctccatgggtccgattcaaaagaaagtggccctctgggagaacccatccctccccagtggggattcccctgctccctgaggaaactctcctgtcctgaaggctgacctggagtccccacatggcctggctcatggcccatgacaccagcaggttccactcacctatgctggtcaacgccagggggcccacctgggcagaagaagtcactcaaagacacaagggagaaaggggactcagggaggagccgccaacctgccccgcccctggggaatgggactctgacaccaagcccacacagggagcctgggctgcctcacggaggagtgcagagacagggctgggggctgccaagatgcccttcagggccttgaggtctccagcccaaaatacggtggccctgccacggacctcaggatcccagcgtcctcttccaaaattctcccctaggttgggcctcagcgtaatcctattgagcatgatttttaagtcatcacctctcttcagaaaatataaggttctcatcatcgacccaaccgagggcaaccccctcccatgcatgcatccagtgggacccagatgggctcaccacagctcagggcaggagaccagggctccaggaagggcctgagcttcagtgcatcaggagctggggacctggctgacagaaactggcccagctccattgggcccaatgca

SEQ ID NO: 1886249 - DNA, 4001 bp, Homo sapiens
aaaatataagggccctgccagggacttcgggatcctactgtccccttccaaaattctcaactaggctgggcctcagcgtaatcctattgagcatgatttttaagtcaccacctctcttcagaacaatataaggttctcgacactgactgaacccaaggcaccttccctccctgcacatgcatccagcaggaccatgatatactcaccacagctcagtgcaggaggccaggatgccaggaaaggcctgagcttcagtgcaccaggggctgggaaactggctgacagacactggcccagggccattgggcccaatgcaaatcttcctccaggctcaccatctggggggacaggaggaggatatgtgtccaaatagggcctcacatctccatgtggagaagggatcccctgtaatgggttctatgtggaacagacccatcacagatgcagggcacccttggccctccccatcaccaaaccctgagaaacaaggcaggctggtcattgggtttgggccagatacctgggctgagccatacttccgttccggagagcacctccactgccctcaccagctcccctgcatgatcccagggttgccctgtgaccactgggcatgggccatggccaccaacccgctcccagccaaccaaggagggtagcctggaagctatgcaccgttgcagacctggcagtcacatagcctgcctctgggcgtggtgggcacccactgaggagccctccccaagtgtgcactaaaaatcacagcctggggacctgggccatgagctttcactggtgggaccccattcatatcccacacctctcaaacacagagctgggccacactcggccaatcaagggccacatggtatcttctcgtttccttgggcccaagatcccgagaccctggaggtgaccccttggctaagaaggcggggtggcaaattcccggtacaacaccctagacagtggaccttcccacctcagaatgccactgttactgccactcaaacatggagaacaggtgacccccatgggacatgggatgcccccttagcccaaagcccatgggtcacaggactggcctgaagcaccaccaggagctggccagatctcaaccttgacccaaccccattgaaactgcaccacccctgaccaggctcaatacgtgccactgggatggcccattgttcaacaggatcagccccattcagggtcacaggtgggatgagatccttgaacctccatggcccgaccccatcaccaccccccccaggaacatgcccggggaccgagagctcccaagtgaaacccgtggcaccctggagcccttctggcccgcctcatgtggcctgggcagtcctcaaggcctgacctgcacaccaagtctcaactgggcgatgtcctgcatggggctgaaggaaccctttgctatctggaccattgtcattcctgcagatcttcagggaaggcatcctcctcaggtaagattcccaaggaagccgccctcctggagaaaccatccctccctgatgggaattggggtcagctccctgaggaaaccctcatggcctgaagtctgaccctcagtgaacccatgcccatgatgccagcaggatccactcacctatgttggtcaatgccaggaggcccccccttggcagaagagctcactgaaagacacaaggggagaactggggctcagggaggagccacccacgtgccacttcactggggaacagaaaggccaacaccaagcccgcacagggagcctgggctgcctcacagaggagtgcagagacagagttgggcctcctccagatacctttcagggcctccagggctccagcccaaaatacagtggccctgccggaaatctcgggatcccagcatcctcctccaaatttctcacctaggttgggcctcagcgtaatcattgagcatggtaattttaagtcatcacctctcttcaacacaatatagggttctcatcattgacccaacccagggcaccccccctgcccacacatacatccagcgggacccggatgtgctcaccacagctcagtgcaggagatcaaggggccaggaagggcctgagcttcagtgcaccaggggctgagcacctggctgacggacacttgccagggtccattggtcctgatgcaagtcttccttcaggctcaccatctggatggacaggaggaggacatgtgtccaaacagggcctcatacctccaggtggggaatggggtaagggatacccatgtgatgggatccatgtggaacactgacctgtcacggatacagggcactctcggccctccccatcaccaaaccctgaaaaaacagggcaggtggatcactgggcttgggcaagacccctggtcttcatgctattgcagaccttgagggcacatccagtgccccctctgacttctccttcacacgatcccagggctgccccaggaccactgagcatgggacagggtcaccgacatgctcatggccaaccgaggagcctggcccagaagccatgtgccaccgtggacatggaagttgcatagcctgccgctgggcatggtgggcacctgcccaggcactctctccaagccacacctgaaatcacagcctggagtaccagggccatgtgctttctctggtgggtccccatccatgccccacacatgtcccaaacacagatccgggccacccttggccaatcctgggccacatggtgtcctttcctttccctaggcccaagaccctgccaccctggacatgaccccatggcacagagagtctgggcagcaaattctcaggataggaccatcaacagcgggccttcccaccgcacattccactcttccagccactcacccatggggaaggggtgacctccagcaggacacaagctgtcgacttggcctaaagctcacgagtcccaggtccggcccacagcctcaccaggcactggccagagctcagccttgacccaaacccagggaaacagcactgccccccaccaagctcaaagaggcaccatgggatggtccatagctcaacagggtcagtcccattttgggacatagttgggtacaatccttgaatctccacggcccaatcccataggctcattcaagcacccctctccagggaaagagaactcttgcatgacccccgtggtgccccggaggccctgtggcccccatcatgtggcctcggcaatcctcgaggcctgacacatgcactgagtctcagctgggagctctcctgcacggggctgaaggaagtctttgctgcctggaccactgtcatccctgcagggcttcaggaaggcaacatcttgggtccagttcccaaggaagccgccctcctgtagaaaccatccctccccggtggaaatacaggttggctccctgaggaaaccctcctgtcctaaagactgacccttggtgaccccacgcggcctgactcatggcccatgacaccagcaggatgcactcacctaggctaatcaaggtgaaggggcccttctgagctgaagagctcactgaaagacacaaggcaagaatggggactcagggaaaagccaccaatgtgccctgcccctgggaaacagtgccaacaccaagtccgcacagggagcctgctgtgcttcacggaggagtgcagagacagggttgggtccctgtgagaggcccttgagggcctccaggtctccagcccaaaatacagtggccctgccagggtccttgtgattctcagtgtccacttccaaaattgtcacctaggctgggactcagcgtaatcctattgagcatgatttttaagtcatcacctctcttcaggacaatataaggttctcatcattgacccaacccagtgcaccccgctccccatgcatacatccagaagaacccggatgggctcaccagctccatgaaggagaccagggtgccaggaagggcccaagcttcagtacaaaaggacctgggcac

SEQ ID NO: 1886250 - DNA, 4001 bp, Homo sapiens
aatcccagcatcctcttccaaaactctcacctaggctgggcctcagcgtaatcctattgggcatgatttttaagtcatcacctctcttcaggacaatataaggttctcataatcgacctaacccaggtatccccctccctgcacatgcatccagcaggacccagatgggctcaccacagctcagtgcaggagccaagggtgccagaagggcccaagcttcagcgcaccaggggctgggcacctggctgactgacattggcccagtgacagcgggcccaacacaagttttcctctggggtcgccatgtggggagacaggaggaagacaagtgtccaaactgacctctacgtggggaagggggtcagcagtgccatctcacccttgctcaccctccatggacacatgtgatgagttcaatgtgaaatactgactcatcaagtacacggagcacctttggccctcccttccaccgatcccggagaggacagggcaggtgggtcactgggcttgagcaaaacacctaggctgtgccatactacaggccccaagagcacctccactgttcaaaatggctcccctgcatgatcccagggctgccctggggccagtaggcacagagccgggccaccaaccaggtcacggccaaccaaggaggctggcccagatgtcacactccgctgaagacctggtagttgcccagcctgcccctgggcatggcacgcttgtccaggcaccctctccaagcatgcaacagaaatcatagcctggagttgcagtgctacgtgctttctctcgtgggtccccatccatactctgcacacctcccacacagagccagcaacacttggccaatcaggagacacatggtgccctctgctttgcttggacccaagaccctgccaccctggatgtgacaccaaagctcagaagaagcttgagtgacaaattcccaggacatgtccctcaacagcaggacttcccacctcaggaggccacccttccagacatttgatgttggaaaaagggtgacccccagtgggattcgggctctcctttggcccaacgcccacgggtcccagtgctgacctgcagcaccaccaggtgccggccagaactctgccttcacccaaccccagggaaacaatgccaccccccaaccaggctccaggagacccactgggatggcccatttctcaagagggaccatcccattcaggggcatggtggggtgcgatccttgaatctccatgaacaaacccaagaggtccatttgtgcatcacacgccaggcaccgagagctcccacgtgacccctgtggtgccccggaggctctcagtcgccctcatgtggcctgggcaatccttgaggtctgacccaagcaccgattctcagctaggagctgccttgtgtggggctgaaaaaaaccctttcctgcctggaccaccatcacccttgcagggcttcagggaaggtgtcccccttgggtctgattccccaaaacgccgccctcctggagaacctatgcctccccggtgggaattcaggtgggctccctgagaaaacccttatggctgtaaggctgaccctcggcgacccatgtggccttgctcatgacccatgaccccagcaggatccactcacctataccggtcaatgccaagtggcctgcctgggcagaagcactcactgaaagacacaaggggagaacaggggctcagggaggagccaccaacgttccctggcccagggaaccagagtgccaacagaaagcccacagagggagcctggactgcctcatggaggagcacagagacaggttgagccacctccaggtgcccttcagggccttgaagtctccagcctaaaatataagggccctgccagggacttcgggatcctactgtccccttccaaaattctcaactaggctgggcctcagcgtaatcctattgagcatgatttttaagtcaccacctctcttcagaacaatataaggttctcgacactgactgaacccaaggcaccttccctccctgcacatgcatccagcaggaccatgatatactcaccacagctcagtgcaggaggccaggatgccaggaaaggcctgagcttcagtgcaccaggggctgggaaactggctgacagacactggcccagggccattgggcccaatgcaaatcttcctccaggctcaccatctggggggacaggaggaggatatgtgtccaaatagggcctcacatctccatgtggagaagggatcccctgtaatgggttctatgtggaacagacccatcacagatgcagggcacccttggccctccccatcaccaaaccctgagaaacaaggcaggctggtcattgggtttgggccagatacctgggctgagccatacttccgttccggagagcacctccactgccctcaccagctcccctgcatgatcccagggttgccctgtgaccactgggcatgggccatggccaccaacccgctcccagccaaccaaggagggtagcctggaagctatgcaccgttgcagacctggcagtcacatagcctgcctctgggcgtggtgggcacccactgaggagccctccccaagtgtgcactaaaaatcacagcctggggacctgggccatgagctttcactggtgggaccccattcatatcccacacctctcaaacacagagctgggccacactcggccaatcaagggccacatggtatcttctcgtttccttgggcccaagatcccgagaccctggaggtgaccccttggctaagaaggcggggtggcaaattcccggtacaacaccctagacagtggaccttcccacctcagaatgccactgttactgccactcaaacatggagaacaggtgacccccatgggacatgggatgcccccttagcccaaagcccatgggtcacaggactggcctgaagcaccaccaggagctggccagatctcaaccttgacccaaccccattgaaactgcaccacccctgaccaggctcaatacgtgccactgggatggcccattgttcaacaggatcagccccattcagggtcacaggtgggatgagatccttgaacctccatggcccgaccccatcaccaccccccccaggaacatgcccggggaccgagagctcccaagtgaaacccgtggcaccctggagcccttctggcccgcctcatgtggcctgggcagtcctcaaggcctgacctgcacaccaagtctcaactgggcgatgtcctgcatggggctgaaggaaccctttgctatctggaccattgtcattcctgcagatcttcagggaaggcatcctcctcaggtaagattcccaaggaagccgccctcctggagaaaccatccctccctgatgggaattggggtcagctccctgaggaaaccctcatggcctgaagtctgaccctcagtgaacccatgcccatgatgccagcaggatccactcacctatgttggtcaatgccaggaggcccccccttggcagaagagctcactgaaagacacaaggggagaactggggctcagggaggagccacccacgtgccacttcactggggaacagaaaggccaacaccaagcccgcacagggagcctgggctgcctcacagaggagtgcagagacagagttgggcctcctccagatacctttcagggcctccagggctccagcccaaaatacagtggccctgccggaaatctcgggatcccagcatcctcctccaaatttctcacctaggttgggcctcagcgtaatcattgagcatggtaattttaagtcatcacctctcttcaacacaatatagggttctcatcattgacccaacccagggcaccccccctgcccacacatacatccagcgggacccggatgtgctcaccacagctcagtgcaggagatcaaggggccaggaagggcctgagcttcagtgcaccaggggctgagcacctggctgacgga

SEQ ID NO: 1886251 - DNA, 4001 bp, Homo sapiens
agcaggatccttgaatctctgctacccaaccccatgggcccattcacacaccacactccagggaccaagagctcccttgttaccccatggcactctgtagcccctctggcccccctcatgtggccctgttctcatcattgacccaacccagggaaccccctccctgcacaaacatccagtggaacccggatgtgctcaccacagcacagtgcaggagagcagggtgccaggaagggtcagagtttcagcccactgggggctgagcacctggctgagagacactggccctcggcctgcgggtcccacacatcttcctccaggctcaccatctagagggacagaaggaggacatgtgtccaaccagggcctcacatatcaatgcagggaaggggctaagggatacccatgtgatgggatccatgctgaacactgacccaacacagatgtggggcatcctttgccctctctgccaccaaaccctggaaagacagggaaagcaaaagacagtgctggctcaggcaagatgcctaggctgtaccctactgcaggccccaagagcacctccactgctcaggccagctcccacacatgaccccagggccataccagggacacagggcacagggcacaggacacaggacagggccatcaaccagctcctggccaaccaaggtggttggccagatgccaaaagccgctgcagacctggccctcccagagccagcacctgagcattgtgggcaccggccctggtgccctctccaagcctggggggcccctgggccacactttctctggtgggtccccatccatgccctgcccaactccgacacacagagcccggctacactcagccaatcaggaaccagatggtgtcttctcctttccttgggcacaagaccctgccaccctgaggtgaccccaaggctcagaagcagcctgggtggcaaattcccttgacagcaggccttcccaccttaggaggacactcttcaccactggacctcaaggaaggtttgtccccagcaggatcagagctgcccccttgactgaaggcccccaagtcccagggcctgcagcagcaccaggtgccagccagagctcagtcttgacccaacctcactgaaacagtgccatccctcaccagactcaaggaggtaccataagatggcccactgctcaacagggttggtcccattcaaggccatgggtgtggagcattccttgaatcttcacagcctgactgtgtgggcccaatcactcacccctctccagggagagagaactccagtgtaacctctagggtgcgccacattccctgtgcccctcctccccatgtgccctggacagtactccaggcctgagctgtccaccgagtttcagctgggagctgccctacattgggctgaaggaaccctttgctgcctggaccactgtcacccctgcagggcttcaggaaagatgtgctccttgggtcagattcccaaggaagtggccctcctggagaaaccattgctccctggtggggagtaggttggcagcctgagaaaaccctagtggcccgaaggctgaatgtcgaggaccccatgctgcatcactcatggcccatgaccgaaacaggatgcactcacctatgccgctcaaggccgcggggaccacttgggcagaagagctcaccaaaagacacaggggagaacggggactcaggaaggagactccaacatgccccataaccagggatccggagcccagataccaagccagcacagggagcctgggctgcctcacggaggagcacagagataggggtgggcccaccagatgcccttcagggcctcaaggtctccagcccaaaatacatttactctgtcagggacctcagaatcccagcatcctcttccaaaactctcacctaggctgggcctcagcgtaatcctattgggcatgatttttaagtcatcacctctcttcaggacaatataaggttctcataatcgacctaacccaggtatccccctccctgcacatgcatccagcaggacccagatgggctcaccacagctcagtgcaggagccaagggtgccagaagggcccaagcttcagcgcaccaggggctgggcacctggctgactgacattggcccagtgacagcgggcccaacacaagttttcctctggggtcgccatgtggggagacaggaggaagacaagtgtccaaactgacctctacgtggggaagggggtcagcagtgccatctcacccttgctcaccctccatggacacatgtgatgagttcaatgtgaaatactgactcatcaagtacacggagcacctttggccctcccttccaccgatcccggagaggacagggcaggtgggtcactgggcttgagcaaaacacctaggctgtgccatactacaggccccaagagcacctccactgttcaaaatggctcccctgcatgatcccagggctgccctggggccagtaggcacagagccgggccaccaaccaggtcacggccaaccaaggaggctggcccagatgtcacactccgctgaagacctggtagttgcccagcctgcccctgggcatggcacgcttgtccaggcaccctctccaagcatgcaacagaaatcatagcctggagttgcagtgctacgtgctttctctcgtgggtccccatccatactctgcacacctcccacacagagccagcaacacttggccaatcaggagacacatggtgccctctgctttgcttggacccaagaccctgccaccctggatgtgacaccaaagctcagaagaagcttgagtgacaaattcccaggacatgtccctcaacagcaggacttcccacctcaggaggccacccttccagacatttgatgttggaaaaagggtgacccccagtgggattcgggctctcctttggcccaacgcccacgggtcccagtgctgacctgcagcaccaccaggtgccggccagaactctgccttcacccaaccccagggaaacaatgccaccccccaaccaggctccaggagacccactgggatggcccatttctcaagagggaccatcccattcaggggcatggtggggtgcgatccttgaatctccatgaacaaacccaagaggtccatttgtgcatcacacgccaggcaccgagagctcccacgtgacccctgtggtgccccggaggctctcagtcgccctcatgtggcctgggcaatccttgaggtctgacccaagcaccgattctcagctaggagctgccttgtgtggggctgaaaaaaaccctttcctgcctggaccaccatcacccttgcagggcttcagggaaggtgtcccccttgggtctgattccccaaaacgccgccctcctggagaacctatgcctccccggtgggaattcaggtgggctccctgagaaaacccttatggctgtaaggctgaccctcggcgacccatgtggccttgctcatgacccatgaccccagcaggatccactcacctataccggtcaatgccaagtggcctgcctgggcagaagcactcactgaaagacacaaggggagaacaggggctcagggaggagccaccaacgttccctggcccagggaaccagagtgccaacagaaagcccacagagggagcctggactgcctcatggaggagcacagagacaggttgagccacctccaggtgcccttcagggccttgaagtctccagcctaaaatataagggccctgccagggacttcgggatcctactgtccccttccaaaattctcaactaggctgggcctcagcgtaatcctattgagcatgatttttaagtcaccacctctcttcagaacaatataaggttctcgacactgactgaacccaaggcaccttccctccctgcacatgcatccagcaggaccatgatatactcaccacagctcagtgcaggaggccaggatgccaggaaaggcctgagcttcagt

SEQ ID NO: 1886252 - DNA, 4001 bp, Homo sapiens
gggatccctgcatcatcttccctaattcttacctatcctgggcttcaatgtaatcctattgagcatgattgttaagtcatcacctcttttcaggacaatataaggttctcatcatcagcccaacccagggcgcacccctgccccacacatgcatccagcagtacccggatgtgctcaccctggctcagtgcgggagccgagcattccaggaaaggcccaagcttcagcgcacttagagctgggcacctggctgactgacactggcccaagaacagagggcccagggcaagtcttcttcggtctcaccatttgggggacagcaggatgatatgtgtccaaactgacctccatgtggggaaggcagtagtgggtgcgggctcacatttgcttgccctccacggacacatgttatgagatccatgtgaagtactaactcgtcaccaatgtggggcacccttggctccccctgccaccaaaccctggaggaacagggcaggtaggtcactgagctcaggcaaaatgcatgggttgcgccatactgcaggccctgagtctacctccactgccacagatggctcctcacacgacgccagggccccctgacaccagtgggcatgggtcagggccatgagccagctcatggccaacaaaggtggctggcccagatgccacacaccgctgcagacctggctatcgcatagtctgcccctgggcgtgttgggcacacatcaagatgctgtctccaagtgtgcacggaaatcacaacctagagctacagggccatgtgctttctctggtgggtcaccatccatgttctgcacacctcacacacacagagctgggccacacttgcccaatccggagcaacatggtgccctcccctttgcttgttcccaagaccccatcaccctagaggtgacaccatggctcagaagcagcctgagcaataaaatcctaggacaggtccctcgacagcgagccttcccacttcaggaggccacccttcacgacacttgacctcagagataggatgacccccagcgggatacaggctgccccttggtcaaaagcccaagagtcccagggctgacctgccacaccaccaggtgctggccagagctctaccttaacccagtcacaaggaaacaactctgccccccaccaggctccaggagacccactgagatggcccattgctaaacagggacagttgcattcagggccataggtggggcactatccttgaatctccacaacccaacaccatgggtccattcacgcaccacactctggggaccaagaggtcaccattaaccctgtggtgccccgtagcccctctggcccccctcatgtagcctgggcagtcctcaaggccttactgcagcaccgagtctcaactaggcactgtcctatgttaggcagaaggaaccctttcctgcctggaccaccatcaccccttcagggcttcagagaaggtgtcctccttgggtccgattccaaaaagcctgccttccaggagaacctttccgtctcaggtggaaattcaggtcagctccctgagaaaacccttgtggcccaaaggctgatccttggggaccccatatggtctggctcatgatccataacaccagcaggatccactcacctatgccagtcaatgccaaggggccctcctaggtgaaagagctcactgaaagacaaaggcgagaacagggactcaggaaggagccatcaacattccctgcccccagggaactggagcaccgacaccaagcccacacagggaaactagagtgcagagacaggttgggccacctccagatgcccttcagagccaccaggtcccaggtccaaaatacagtggccctgttggggaccctgggatcccagcatccttttccaaaattctcccccaggctgggcctcagcgtaatcctattgagcatgatttttaagtcatcacctctcttcaggacaatataaggttctcatcactgacccaacccagggcaccccccttcccgcacatgcatccagtggaacccggatgtactcatcacagctcagtgcaggagatcagggcaccaggaagggctggagcttcagcgcaccgatggctgagcacctggctgatggacactggcccaggaaaagcaagcccaacagaagtctcaccatctaggggaacaggtggagaacatgtgaccaccctccatgtggagaaaggggtgttgggtgccagctcacgcttgctccccctccatggacacatgtgatgagatccatgcgaaatactgactcatcacctatgcaagtgtctctccctgccaccgaacccgggaaggacaaggcaggtaggtcactgggctcaggcaaaacgcccagggtatgcacgactgcaggacccaagggcacctccactggccaaaactgctcctccgcatgaccctagggctgccctgggaccactgggcagaggtccgggccaccagccaggtcacagccaaccaaggaggctggcccagatgccacatgctactgcagacctgacagtggcacagcctgcccctgggcatggtgggcatgcgtacaggcaccctctccatgcaggcaccagaaaagacagcatggggcctcagggtcacttgttttctctggtgggtccccatccatactccacatacctccaagacacatagccagtcacacatagccaatccggagtctcatgctgccccctcctttgcttggtcccaagactgccaccctggaggtgataccatggctcccatgcagcgtgagcaacaaattcccagtacagatgcctcaatagcgggccttcccaactcaggaggccacccttcacaacacttgggtgacccccagcgggatgcgggctgtccctggcccaaagcccatgagtcccagggctgacctgcaacaccaccaggtgccagccagagtcaaccttgacccaatcccagggaaacaactccgccccccaaccaggccccaggagacccactgggatggcccattgctcaacagcgatggtcacattcagggccatgggtagagcaggatccttgaatctctgctacccaaccccatgggcccattcacacaccacactccagggaccaagagctcccttgttaccccatggcactctgtagcccctctggcccccctcatgtggccctgttctcatcattgacccaacccagggaaccccctccctgcacaaacatccagtggaacccggatgtgctcaccacagcacagtgcaggagagcagggtgccaggaagggtcagagtttcagcccactgggggctgagcacctggctgagagacactggccctcggcctgcgggtcccacacatcttcctccaggctcaccatctagagggacagaaggaggacatgtgtccaaccagggcctcacatatcaatgcagggaaggggctaagggatacccatgtgatgggatccatgctgaacactgacccaacacagatgtggggcatcctttgccctctctgccaccaaaccctggaaagacagggaaagcaaaagacagtgctggctcaggcaagatgcctaggctgtaccctactgcaggccccaagagcacctccactgctcaggccagctcccacacatgaccccagggccataccagggacacagggcacagggcacaggacacaggacagggccatcaaccagctcctggccaaccaaggtggttggccagatgccaaaagccgctgcagacctggccctcccagagccagcacctgagcattgtgggcaccggccctggtgccctctccaagcctggggggcccctgggccacactttctctggtgggtccccatccatgccctgcccaactccgacacacagagcccggctacactcagccaatcaggaaccagatggtgtcttctcctttccttgggcacaagaccctgccaccctgaggtgaccccaa

SEQ ID NO: 1886253 - DNA, 4001 bp, Homo sapiens
tccagcccaaaatacagtggctctgccagggataataggatcccaacgtcctcttccaacattctcacctaggttcggcctaagtgtaatcctattgagcatggtttttaagtcatcacctctcttcagaagaatacaaggttctcatcaccaccccaacccagggcacccccctccccatgcatgcatccagcagcacccagttgtgctcaccagagctcagtgcaagagaccagggaaccaggaagggtctgagcttcagtgcactgggagctgagcacctggatgatggacactggcccggggccttcaggcccaactgaagtctttcttcagggtcaccatctgtagggacaggaggaggacatgtgtccaaccagggcctcatgtatcaatgtagggaaggtgggtaggggatacccttgtaatggaatccttacagaacactgacccaacatggacgcagagcacccttggccttccctgccacaaaaccctggaaagacagggcaagtgggttactgggctggggcaagaggcctgggctgtgccctactgtgggccccaagagcacctccactgcctgggccagatcccccgaacaaccccagggtcgtaccgggaccatggggcacgggccaaggcagccaacctgctgaaggttggttgagccaaggagggtggtcctgatgccaggagccactccagacctggcaggcaaagaccttgcccctgggcatggtagggccaccctggtgcccactccaagcacacaccagaaatcaaagcctgggggcctccagggccacattctttctctgatgagtccccatccatgccctgcacacctcccacacatacagccaggccacactcagccaatcagaaaccacatggtgtcctctcctttccttgggctgaagaccccgccatcctggaggtgaccccatggctcagaagcagcctaggtggcaaattcccaggacaggtcccttgacagcaggtctgcccacctcaggaggccacccttcccaccactggacctcaaggaagggattaccccagtgggatgggagttgcccccttggcataaagcccatgagccccagggccggcctgcagcaccaccaggcaccagccagcgctcagccttgacccaactgcattgaaacatgccgaaaatggcccattgctcaacagggttggtcccattcagggccatgggtgggtggcattccttgaatctccgcagcctgaccacgtggaccctatcacccatccctcttgggggaagaactccagcatgactcccagggcaccccaaagcccctgtggcccctttcatgtggactgggcagtcctcaagcctcacctgcccacctagtttcagctgggaactgccctacgttaggttgaaggaaccctttcctgcctggaccaccatctccctgccgagcttcaggaaatgtgtgctcctagggtcagattcccaagaagtgaccctcctggaggaaccatccctcccggtgagtaatcggttggctccctgagaaaaccctagtggcctgaaggctgactctcaccaaccccatgctgcctcactcatggcccatgaccccaacaggatgcactgacctatgccgctcaaagctagggaccccacctgggcagaagagctcactgaaggacacagggaagaaggagcattcaggaaggaacaccaaattgccctgtccctggagaagcggagcacagacaccaagcccgcaaggggagcctgggctgcctcacgaaggagctcagagacagggttgggctcccctgagatgcccttcaagttctcaagttctccagtgcaaaataagtgtggtctagctggagatcttgggatccctgcatcatcttccctaattcttacctatcctgggcttcaatgtaatcctattgagcatgattgttaagtcatcacctcttttcaggacaatataaggttctcatcatcagcccaacccagggcgcacccctgccccacacatgcatccagcagtacccggatgtgctcaccctggctcagtgcgggagccgagcattccaggaaaggcccaagcttcagcgcacttagagctgggcacctggctgactgacactggcccaagaacagagggcccagggcaagtcttcttcggtctcaccatttgggggacagcaggatgatatgtgtccaaactgacctccatgtggggaaggcagtagtgggtgcgggctcacatttgcttgccctccacggacacatgttatgagatccatgtgaagtactaactcgtcaccaatgtggggcacccttggctccccctgccaccaaaccctggaggaacagggcaggtaggtcactgagctcaggcaaaatgcatgggttgcgccatactgcaggccctgagtctacctccactgccacagatggctcctcacacgacgccagggccccctgacaccagtgggcatgggtcagggccatgagccagctcatggccaacaaaggtggctggcccagatgccacacaccgctgcagacctggctatcgcatagtctgcccctgggcgtgttgggcacacatcaagatgctgtctccaagtgtgcacggaaatcacaacctagagctacagggccatgtgctttctctggtgggtcaccatccatgttctgcacacctcacacacacagagctgggccacacttgcccaatccggagcaacatggtgccctcccctttgcttgttcccaagaccccatcaccctagaggtgacaccatggctcagaagcagcctgagcaataaaatcctaggacaggtccctcgacagcgagccttcccacttcaggaggccacccttcacgacacttgacctcagagataggatgacccccagcgggatacaggctgccccttggtcaaaagcccaagagtcccagggctgacctgccacaccaccaggtgctggccagagctctaccttaacccagtcacaaggaaacaactctgccccccaccaggctccaggagacccactgagatggcccattgctaaacagggacagttgcattcagggccataggtggggcactatccttgaatctccacaacccaacaccatgggtccattcacgcaccacactctggggaccaagaggtcaccattaaccctgtggtgccccgtagcccctctggcccccctcatgtagcctgggcagtcctcaaggccttactgcagcaccgagtctcaactaggcactgtcctatgttaggcagaaggaaccctttcctgcctggaccaccatcaccccttcagggcttcagagaaggtgtcctccttgggtccgattccaaaaagcctgccttccaggagaacctttccgtctcaggtggaaattcaggtcagctccctgagaaaacccttgtggcccaaaggctgatccttggggaccccatatggtctggctcatgatccataacaccagcaggatccactcacctatgccagtcaatgccaaggggccctcctaggtgaaagagctcactgaaagacaaaggcgagaacagggactcaggaaggagccatcaacattccctgcccccagggaactggagcaccgacaccaagcccacacagggaaactagagtgcagagacaggttgggccacctccagatgcccttcagagccaccaggtcccaggtccaaaatacagtggccctgttggggaccctgggatcccagcatccttttccaaaattctcccccaggctgggcctcagcgtaatcctattgagcatgatttttaagtcatcacctctcttcaggacaatataaggttctcatcactgacccaacccagggcaccccccttcccgcacatgcatccagtggaacccggatgtactcatcacagctcagtgcaggagatcagggcaccaggaagggctggagcttcagcgcaccgat

SEQ ID NO: 1886254 - DNA, 4001 bp, Homo sapiens
agcagcagcaccaagcaccagatggatctcagccttgactcaaccctattgaaactgcaccacaccccaccaggctcaatacgtgccattgggatggcctgttgctcaacagggttggccccattcagggtcacaggtgggatgaaatccttgaacctccacaacccaaccccgtcaccaaccccacgaaacaagtctggggactgagagctcctacataacacctgtggcaccccagagcccttctgggcccctcaggtggcctgggcagtcttcaaggcctgacccacataccatatctcaactaggtgatgtcctgcatggggctgaaggaaacctttgctatctggaccatcgtcacccctgcagggcttcagggaagacatcctccttgggtaagattcccaaggaagctgccctcctggagaaaccatccctcctgaaatccctgacccatcatggatgcagggcacccttggccctccccgtcaccacaccctgaaaaaacagggcagtctgcctgccctgtgactactaggcatgggccacagcctccaaccagctcccggccaaccaaggagggtagctcggaagctatgcactgttgcaaacctggcagtcacatggtgggaattgaggtcggttccctgaggaaacccttggggcctgaagtctgaccctcagcaaacccatgcggcctagctcatagcccatgatgccagcaggatccactcacctatgttggtcaatgccaggggaaccgcttggcagaagagctcactgaaagacacaaggggagaaccaggactcagggaggagcccccaacgtgccccatcactggagaagaggagcgcaaacaccaagcccacaaagggagcctgggctgcctcacagaggagcgcaaagaaagcactgggccacctccagacgcccttcagggcctccaggtctccaacccaaaatacaagtggccctcccggaaatcttgggatcccggcatcctctgccaaaattctcccctaggctgggcctcagcgtaatcctattgagcatgatttttaagtcatcacctctcttcaggacaatataaggttctcatcattgacccaacccagagaaccccctccccgcacaaacatccagtgaaacccggatgtgctcaccacagctcagttcaggagaccagggcgccaggaagggctggagcttcagtgcaccagggactgagcacctgggtgatgggcactggctcaggaaaagcaggcccagtggaagtcttcctcaagtctcaccatctgggggcacaggtggaggacatgtgaccaccctccatgcggagaagggggtgttgggtgccagctcatgcttgctttccctccatggacaggtgatgagatccacacaaaatactgactcatcactgacgcagggcacccttggccctccctgccaccgaacccaggaaggacaaggcaggcaggtcactggtctcaggtaaaatgcccaggctgtgccatacttcaggcctggagagcacctccactgcccaaaacagctgccccgtatgatgccagggctgccctgggaccactgggcacaggatcgggccaccagccaggtcatggacaaccaaggaggctaatcaatgccagggtgcccacctgggcagaaaagctcactgaaagacacaaagggagaatgggggctcaggaaagagccaccaacttgttccatccccagggtaccagagcaccaacaccaaggctggacagggagcctggggaccctcatgcaggagcacagagacagggttgggccccctccagatgccctttcagggcctccaggtctccagcccaaaatacagtggctctgccagggataataggatcccaacgtcctcttccaacattctcacctaggttcggcctaagtgtaatcctattgagcatggtttttaagtcatcacctctcttcagaagaatacaaggttctcatcaccaccccaacccagggcacccccctccccatgcatgcatccagcagcacccagttgtgctcaccagagctcagtgcaagagaccagggaaccaggaagggtctgagcttcagtgcactgggagctgagcacctggatgatggacactggcccggggccttcaggcccaactgaagtctttcttcagggtcaccatctgtagggacaggaggaggacatgtgtccaaccagggcctcatgtatcaatgtagggaaggtgggtaggggatacccttgtaatggaatccttacagaacactgacccaacatggacgcagagcacccttggccttccctgccacaaaaccctggaaagacagggcaagtgggttactgggctggggcaagaggcctgggctgtgccctactgtgggccccaagagcacctccactgcctgggccagatcccccgaacaaccccagggtcgtaccgggaccatggggcacgggccaaggcagccaacctgctgaaggttggttgagccaaggagggtggtcctgatgccaggagccactccagacctggcaggcaaagaccttgcccctgggcatggtagggccaccctggtgcccactccaagcacacaccagaaatcaaagcctgggggcctccagggccacattctttctctgatgagtccccatccatgccctgcacacctcccacacatacagccaggccacactcagccaatcagaaaccacatggtgtcctctcctttccttgggctgaagaccccgccatcctggaggtgaccccatggctcagaagcagcctaggtggcaaattcccaggacaggtcccttgacagcaggtctgcccacctcaggaggccacccttcccaccactggacctcaaggaagggattaccccagtgggatgggagttgcccccttggcataaagcccatgagccccagggccggcctgcagcaccaccaggcaccagccagcgctcagccttgacccaactgcattgaaacatgccgaaaatggcccattgctcaacagggttggtcccattcagggccatgggtgggtggcattccttgaatctccgcagcctgaccacgtggaccctatcacccatccctcttgggggaagaactccagcatgactcccagggcaccccaaagcccctgtggcccctttcatgtggactgggcagtcctcaagcctcacctgcccacctagtttcagctgggaactgccctacgttaggttgaaggaaccctttcctgcctggaccaccatctccctgccgagcttcaggaaatgtgtgctcctagggtcagattcccaagaagtgaccctcctggaggaaccatccctcccggtgagtaatcggttggctccctgagaaaaccctagtggcctgaaggctgactctcaccaaccccatgctgcctcactcatggcccatgaccccaacaggatgcactgacctatgccgctcaaagctagggaccccacctgggcagaagagctcactgaaggacacagggaagaaggagcattcaggaaggaacaccaaattgccctgtccctggagaagcggagcacagacaccaagcccgcaaggggagcctgggctgcctcacgaaggagctcagagacagggttgggctcccctgagatgcccttcaagttctcaagttctccagtgcaaaataagtgtggtctagctggagatcttgggatccctgcatcatcttccctaattcttacctatcctgggcttcaatgtaatcctattgagcatgattgttaagtcatcacctcttttcaggacaatataaggttctcatcatcagcccaacccagggcgcacccctgccccacacatgcatccagcagtacccggatgtgctcaccctggctcagtgcgggagccgagcattccaggaaaggcccaagcttcagcgcacttagagctgggcacctggctgactgacactgg

SEQ ID NO: 1886255 - DNA, 4001 bp, Homo sapiens; identical to SEQ ID NO: 1886222

SEQ ID NO: 1886256 - DNA, 4001 bp, Homo sapiens; identical to SEQ ID NO: 1886223

SEQ ID NO: 1886257 - DNA, 4001 bp, Homo sapiens; identical to SEQ ID NO: 1886224

SEQ ID NO: 1886258 - DNA, 4001 bp, Homo sapiens; identical to SEQ ID NO: 1886225

SEQ ID NO: 1886259 - DNA, 4001 bp, Homo sapiens
ttctcacctaggctgggcctcagcgtaatcctattgagcatgatttttaagtcatcacctctcttcagaacaatataaagttctcatcatcgacccaacccagggcacccccctccctgcctaggcatccagtggcacccggatgggctcacccaagctcaacgcaggagaccaaggtgacaggaagggcccgagtttcagtgcaataggggctaggcacttggctgatggccactggccagggacagcgggcccaacgcatgtcctcctctggggtcaccatctcaaggaacaggaagaggacaagtgcccaaacacaacctcacccctccatgtggacagaaggtgtggtgtgccagctcagggatgctcaccttccatggacccatgtgatgagatccatgtggaatacttacccatcatggatgcagggcacccaatgctctctccgccactgaacaccgaaaggataggacaggcaggtcactgggctcaggctagaagccagggctgtgccctactgcaagccccacaagcacctccactacacatgccagctcccctgtatgacaccagggtcaccccaggactactgggcacaggccagggccagcaaccagttcattgtcaaccaaggaggctggcccatatgcctgatgctgctgcacagctggcagtcacatagccagtccctgtgcatggtgggcacccacccatgtgctgtatctgggcacatactggaaaccacgacctggggtcccagggccacatgctttctctggtgagtttccatccatgcccctcacacctcataaacacacagcctggccacactcagctaatcggggggcacagtgtcttctcccttccttgggcccaagatcccaccacactggaggtgtctccatggctcagaagcagcatgggcagcaaattgccaggacaggaccctcaatagtgggccttctcacttcaggaggtgacccttccccacattcgcccactgggaaggggtaacttccagccacagggaaggggtgacttccagagggatgcaggctgccccactggcccaaagcccacgagtccaacagctagactgcagcaccaccaggcaccggccagagctcagccttgacctaaacccagtgaaacagcaccgcccctcttcaggcttgaagaggcccatgggatggcccattgctcaacagggtgggttccattcaggaccatgtgtcaggtgcaatccttgaatctccactgctcaactccatgggcctgatcacccacctttctccagggacaaagagcacctgtgtgacccccaaggcaccccagagcccctgtggccccccacatagtcagggcagtccagacgcgagcaccgagactcagctgggagctgccctgggtggaattgaaggaaccctttcctgcctggaccaccgtcacccctgcagggcttcagggaaggcgtcctccttggttcctgtttcccaggaagccgccctcctggagaacccatctcttcccagtggggattcagtttggctccctgaggaaacccttctttcctgaaggctgacccttggtgaccccacgtggcctggcccatggcccatgacaccagcaggatccactcacctatgccagtcaatgccagggggccctccttggtggaagagctcactgaaagacacaaggggagaacagggctcagggaggagccaccaatatgtcccaccccagggaaccagagtgccaacagcaagcctgcacagggagcctgggctgcctcatagagacagggtctggcccttcaggtgcccttagagtcaccagatctccatcccaaaatacagtagctcagccagggacctcagcatccagtatcctcttccaacattctcacctaggctaggcctcagcgtaatcctactaagcatgatttttaagtcatcacctctcttcaggacaatataaggttctcatcattgacccaacccagggcacccccctccccacacatgcatccagtaggacctagatgggctcaccaaggctcagtggaagagaccagtgttgagggaagtcagggaccccaaacggagggacctgctgaagccatggcagaagaacacaaattgtgaagatttcatggacatttatcacttcccaaatcaatactcttattatttcctatgcctgtctttactttaatctcttaatcccgtcatcttcgtaagctgaggatgtatttcgcctcaggaccctgtgatgattgcgttcactgcacaaattgttcgtaaaacatgtgtgtttaaacaatatgaaatctgggcaccttgaaaaaagaacaggataacagcgatgttcagggaacaagggagacaaccatcaggcctgactgcctgagagccgggcggaacagagccatatttctcttcttacaaaagcgaataggagaaatattgctgaattatttttctcagcaaggaacaaccctgagaaagagaatgccttcctagggggaggtctctaaaatggccgctctgggaatgtctgtcttatacagttgtagataagggatgaaataagccctggtctcccgaagcgctcctaggcctattaggacgaggaaattcctgcctaataaattttggtcagaccggttgtctgctctcaaaccctgtctcctgataagatgttatcaatgacaatgcgtgcccgaaacttcattagcaatttcaatttggccctggtgctctgccctcatttgccttctgatattttattgccttgtgaagcatgtgatttctgtgacccacaccctatttgtacactccctcccctttgaaaatcactaataaaaacttgctggttttgcagcttgggtggcatcatggaacctgccgacatgtgatgtctcccccggacacccagctttaaaatttctttcttttgtactctttccctttatttctcagaccggccgacacttagggaaaatagaaaaggacctacgttgaattattgggggcgggttcccccgatagaacagggcaccaggaagggcccaaacttcagcacgccaggggctgggcacctggctgacagacactggccccaggccattgggcccaacacaagtcctccttcagggtcaccatctggagagacagggaaaagtgtccgaacagaacctcatgcctccatgcgggaaaggaggcagggggtgctgactcacacatgctctccctccatggacccacctgatgggatccatgtgaaacagtgatagtcatggacgtgggggacccttggtcctccctgccactgaaccctggaaaacagggcaggctggtcactgggctcaagcaagatgcccaggctgtgccctactgcaagcccctggagcacctccactccccatgccagctcccctgcaattcctgggctgcaccatgacccctgggtggggccaaggccactatccagctcaagccaaccaaggaggctggtcctgaaggcaggcaccgctgcagccccagcagatgcacagcctgcccctgcacagggagggggcctacccaggctccctctccaagcatgcactggaaatagcagcctgagaccctgcctcatgtggcctgggcagtcctcgaggccagaccctagcaccaagtctcagctgggagctgccctgcatgggactaatggaaccctttcctgcctggaccactgtcactcctgcagggcttcagggaaggtgtcctccttgggtcagattcccaaggaggtggttctcctggagaaccaatccctcaccagtggggattcaggttgtctccctgaggaatccctcctgtcctgaaggctgaccctcagtgaccccatgtggcctggtccatgagcccagcaggatccgctcacctatgctgctcaaggccagggggccctcatgggcggaagagctcactgaaagacacaaagggagaacg

SEQ ID NO: 1886260 - DNA, 4001 bp, Homo sapiens
tatcacctaggctgggcctcagtgtaatcctattgagcatgatttttaagtcatcacctttcttcaggacaatataaggttctcatcactgacccaacccagggcaccctcccgcccccagctcatgcatccagcaggacccagatggactcaccagagctcagtgcaggagccgagggcactaggaaggtcctgagcttcagcgcactgggggctgggtgcctagctgactgacattggcccagggatagtgggcccaacacaaattttcctccggggtcaccatctggggagacaggagggagacgtgtgcccaaactgacctccgtttggggaagggggtcgggggtgccagctcacctttgcttgccctccatggacacatgtgatgagttcaatgtgaaatactgacttgttaagtacgcactacactgttggccctcccttccactgaacccagaaaggaaagggcaggtgggtcactgggcttgagcaaaacgcccaggctgcatcatattgcaggccccgagagcacctccactgtccaaaacagctcccctgcatgaccccagtgctgcactgggactgttgggcacagatccgggccaccagccaggtggcggccaaccaaggaggctagcccagatgtcacaccctgctgcagacctggtagttgcatagtctgtcactgggcatgaagggcacgtgtccaggcaacctctccaagtgtgcaacagaaatcacagcctggtgctgcagggccacgtgcttcctctggtgggtccccatccatactctgtaaacctcccacacacagagacagccacatggccaatcaggagacacttggtgccctctgctttgcttgggcccaagaccccgccaccctggatgtgaccccaaagctcagaagaaacttgagcgacaaactcctgggacacgtccctcgacagcaggccttcccacatcaggaggccactcttccagatacttgacgtcggaaaaagggtgacccccagtgggacgcgggctcccccttggcccaatgcccatgagtcccaaggctgacctgcagaagccacaaggtgctggccagagctctgccttgacccatccccagggaaacaatgccaccccctcccctccaccaggctccaggagactcactgggatggcccattgctcaataaggatggtcctattcagggccacggtggtgcgcgatcctttaatctccacaatccaacccaagaggcccatttgtgcatgacataccgaatactgagagctcctatgtgacccccgtggcacccagagctcctctgtccccctcatgtggcctgggaaatccttgaggcctgacctgagcatcaactctcagctatgagctgccctgtgtggggtggaagggaccctttcctgcctggaccaccatcacacccacagggcttcagggaaggtgtcccccttggatccgattcccaaaatagccgccctcctggagaacctatgcctccccagtggtaattcaggtcggttccctgagaaaaccctcatggccagaagggggacccctggtgaccccacgtggcctggctcatggcccatgaccccagcaggatgcactcacctatacccatcaattccagggggcccgcctgggcagaagagctcactgaaagacacaaagggagaacaggggctcagtaaagagctaccaatattccctgacctggggaactggagccccaacaccaagcccacaaaaggagcctgggctgcctcagggaggagcacagagacaggttgggccacctccagatgcccttcagggcttcaaggtctccagcccaaaatacagagtccctgcgggggacttcggtatcccagtgtcctcctccaaaattctcaactaggctgggcctcagcgtaatcctattgagcatgatttttaaataatcacctctcttcagaacaatataaggttctcatcattgacccaacccaaggcacccacctccctgcacatgcatccagcaggaccaggatatactcaccacagctcagtgcaggagaccagggtgccaggaaaggcttgagcttcagcgcatcgggggttgggaacctggctgacagacactggtctagggcctttgggcccaacgcaagtcttcctccaggctcaccatctgggggtacaggaggaggatatgtgtccaaatagggcctcacatctccatatgaggaaggggtaagagatacccacgtaatgggttccatgtggaacaccgactcatcatggatgcttggccctccccatcaccataccctgaaaaaacagggccgtctgcctgccctgtgaccactaggcatgggccacagcctccaaccagctcccgaccaaccaaggagggtagcttggaagctatgcactgttgcaaacctggtagtcacatagcctgcccatggatgtggtaggtacccgccgaggcaccctctccaagtgtgcactgaaaatcacagcctggggacccaggccatgtgctttcattggtgggaccccatccacatcccacacacctcccaaacagacctgggccacatgtagccaatcaagggccacatggtatcttctcctttccttgggcccaagaccccatgaccctggaggtgaccacttgtctcagaagaacccggggtggcaaattcccagtataggaccctagacagtgggccttcccacctcagaatgccactgttaaccgttactcaaactcggagaatgggttaccctcaataggatgtgggctacccccttagcccaaagcccacgggtcccagggctggccagcagcagcaccaagcaccagatggatctcagccttgactcaaccctattgaaactgcaccacaccccaccaggctcaatacgtgccattgggatggcctgttgctcaacagggttggccccattcagggtcacaggtgggatgaaatccttgaacctccacaacccaaccccgtcaccaaccccacgaaacaagtctggggactgagagctcctacataacacctgtggcaccccagagcccttctgggcccctcaggtggcctgggcagtcttcaaggcctgacccacataccatatctcaactaggtgatgtcctgcatggggctgaaggaaacctttgctatctggaccatcgtcacccctgcagggcttcagggaagacatcctccttgggtaagattcccaaggaagctgccctcctggagaaaccatccctcctgaaatccctgacccatcatggatgcagggcacccttggccctccccgtcaccacaccctgaaaaaacagggcagtctgcctgccctgtgactactaggcatgggccacagcctccaaccagctcccggccaaccaaggagggtagctcggaagctatgcactgttgcaaacctggcagtcacatggtgggaattgaggtcggttccctgaggaaacccttggggcctgaagtctgaccctcagcaaacccatgcggcctagctcatagcccatgatgccagcaggatccactcacctatgttggtcaatgccaggggaaccgcttggcagaagagctcactgaaagacacaaggggagaaccaggactcagggaggagcccccaacgtgccccatcactggagaagaggagcgcaaacaccaagcccacaaagggagcctgggctgcctcacagaggagcgcaaagaaagcactgggccacctccagacgcccttcagggcctccaggtctccaacccaaaatacaagtggccctcccggaaatcttgggatcccggcatcctctgccaaaattctcccctaggctgggcctcagcgtaatcctattgagcatgatttttaagtcatcacctctcttcaggacaatataaggttctcatcattgacccaacccagagaaccccctccccgcacaaacatccagtgaaaccc

SEQ ID NO: 1886261 - DNA, 4001 bp, Homo sapiens
cgatggccctgcaagggaccttgggatcccagcatctgcttccaaaattctcacctaggctaggcctcagcgtaatcctattgaacatgatttttaagtcatcatctctcttcagggcaatatcaggttctcatcattgacccaacctagggaaccccctccccacacaaacatccagtgcaacccagatgtgcttaccccagctcagtgcaggagaccagtgtgccaggaagggtcagagtttcagcgcaccagaggctgagcacctggctgacagacattggcctggggcctgtgggcccaacacaagtcttcctccaggcttaccatctggagggacaggaggaggaaatgtgtctaaccagggcctcacacatcaatgtagagaaggggctaagggatactcatgtgatgggatccatgctgaatactgatccctcacggacactgggcacccttggccctccctgccgccaaaccctggaaagacagggcaagcgtgtcacctggctcgggcaagatgcctgggcagcaccctactgcaggccccaagagcacctccactgcccaggcctgctaccacacacaaccccagggccataccggggacacagggcacaagacagggccaccaaccagcccctggccaaccaagcatgctggcccagacgccaagagccgctgcagacctggaagtccgagagatcgtacctaggcgtggtgggcgctggccctggtgccctctccaagcctaggggcttccaggatcacatgctttctatggtgggtctcaatccatgtcctgcccaactctgacacacagagccgggtcacactcagccaatcaggaaccacatcgtgtcttttcctttcttgggctcaagaccctgccaccccctgaggtgaccccaaggctcagaagcagcctgggcagcaaattcctagaacaggtccctcgacagcaggccttgccatctcaggaggacactcttttcaccactggacctcaaggaaggcttgtccccagcaggatcagagctgctcccttggcccaaagtccacaagtcccagggcctgcagcaccaccaggtgccagccagagctcactcttgacccaacctcattgaaacagtgccgtcccccaccaggctcaaggaggtgccactaagatggcctattgctcaacagggttggtcccattcaaggccatgggtgtggagcatgccttgaatctccacagcctgaccgtgtggacccagtcactcatccctctccagggaggggagaactccagtgtgacctccacggcgcactgtatcccccgtgcctcactcccccatgtgccttgggcaatactcgaggcctgacctgcccactgagtttcagctgggagctgccctacattgggctgaaggaaccctttccagcctggaccactgtcacccctgcagggcctcaggagagacttgctccttgggtcagattcccaaggaagcagccctcctgagaaaccatcgctccctggtggggagtaggttggcagcctgagaaaaccctggtggcccaaaggcagaatgtcagggaccccatgctgcatcactcatggcccatgaccaaaacaggatgcactcacctatgccgctcaaggctgggggggtcacttgtgcagaagagttcactgaatgacaagggagaacaggggctcaggaaggagcctccaacatgccccgtcaccagggacccagagcccggataccaagccagcacagggagcctgggctgcctcacagaggagcacagagataggggtgggcccacaagatgcccttcagggcctcaaggtctccagcccaaaatacagctgctctgtcagggacctcagaattccagcatcctcttccaaaattatcacctaggctgggcctcagtgtaatcctattgagcatgatttttaagtcatcacctttcttcaggacaatataaggttctcatcactgacccaacccagggcaccctcccgcccccagctcatgcatccagcaggacccagatggactcaccagagctcagtgcaggagccgagggcactaggaaggtcctgagcttcagcgcactgggggctgggtgcctagctgactgacattggcccagggatagtgggcccaacacaaattttcctccggggtcaccatctggggagacaggagggagacgtgtgcccaaactgacctccgtttggggaagggggtcgggggtgccagctcacctttgcttgccctccatggacacatgtgatgagttcaatgtgaaatactgacttgttaagtacgcactacactgttggccctcccttccactgaacccagaaaggaaagggcaggtgggtcactgggcttgagcaaaacgcccaggctgcatcatattgcaggccccgagagcacctccactgtccaaaacagctcccctgcatgaccccagtgctgcactgggactgttgggcacagatccgggccaccagccaggtggcggccaaccaaggaggctagcccagatgtcacaccctgctgcagacctggtagttgcatagtctgtcactgggcatgaagggcacgtgtccaggcaacctctccaagtgtgcaacagaaatcacagcctggtgctgcagggccacgtgcttcctctggtgggtccccatccatactctgtaaacctcccacacacagagacagccacatggccaatcaggagacacttggtgccctctgctttgcttgggcccaagaccccgccaccctggatgtgaccccaaagctcagaagaaacttgagcgacaaactcctgggacacgtccctcgacagcaggccttcccacatcaggaggccactcttccagatacttgacgtcggaaaaagggtgacccccagtgggacgcgggctcccccttggcccaatgcccatgagtcccaaggctgacctgcagaagccacaaggtgctggccagagctctgccttgacccatccccagggaaacaatgccaccccctcccctccaccaggctccaggagactcactgggatggcccattgctcaataaggatggtcctattcagggccacggtggtgcgcgatcctttaatctccacaatccaacccaagaggcccatttgtgcatgacataccgaatactgagagctcctatgtgacccccgtggcacccagagctcctctgtccccctcatgtggcctgggaaatccttgaggcctgacctgagcatcaactctcagctatgagctgccctgtgtggggtggaagggaccctttcctgcctggaccaccatcacacccacagggcttcagggaaggtgtcccccttggatccgattcccaaaatagccgccctcctggagaacctatgcctccccagtggtaattcaggtcggttccctgagaaaaccctcatggccagaagggggacccctggtgaccccacgtggcctggctcatggcccatgaccccagcaggatgcactcacctatacccatcaattccagggggcccgcctgggcagaagagctcactgaaagacacaaagggagaacaggggctcagtaaagagctaccaatattccctgacctggggaactggagccccaacaccaagcccacaaaaggagcctgggctgcctcagggaggagcacagagacaggttgggccacctccagatgcccttcagggcttcaaggtctccagcccaaaatacagagtccctgcgggggacttcggtatcccagtgtcctcctccaaaattctcaactaggctgggcctcagcgtaatcctattgagcatgatttttaaataatcacctctcttcagaacaatataaggttctcatcattgacccaacccaaggcacccacctccctgcacatgcatccagcaggaccaggatatactcaccacagctcagtgcaggagaccagggtgccaggaaaggc

SEQ ID NO: 1886262 - DNA, 4001 bp, Homo sapiens
agaaatctcgggatcccaacatcccctaccaaatttctcacttagggtgggcctcagcgtaatcctattgagcattatttttaagtcatcaccgctcttcaggacaatatacggttctcatcattgacccaacccagggcaccccccttcccacatacgcatccagtggaacccggatgtgctcaccacagctcagtccagggcgccaggaagggctggagcttcagtgcactggggctgagcacctggctgatggacactggcccaggaaaagcgaggccgacagaagtctcaccatctggaggaacagatggagaacgtgtgaccacccttcatgtggagaagggggtggcgggtgccagctcatgtttgctccccctccatggacacatgtgatgatatccatgtgaaatactgactcatcacctatgccgggcacccctggtcttccctaccaccgatcctgggaagggcaaggcaggcaggtcactgggctcaggcaaaacgcccaggctgtgctgtactgcaggacccaagagcacctccactagccaaaacagctcccccgcagcaccctagaactaccctgggaacactgggcacaggcccaggccaccagccaggtcatggccaaccaaggaggctggcccagatgccacgtgccactgcagacctgatagtggcatagcctacctctgagcctggtacttgggtgtaaaggcaccctctccaagtgtgcaccggaaatcatagcctcgggctgcagggccacttgctttctctatgaatggtgggtccccattcatactccacatatctcccagacacagagccagtcacacatggcctatctgcagtgacatggtgcccactcctttgcttggtcccaagaccctgccaccctggaggtgacaccatggctcccaagcagcctgagcaacaaattcacagtacaagtgcctcaatagcaagccttcccaactcaggaggccacccttcacgacactcgaccatggagaaagggtggcccccagcgggatgcgggatgccccttggcccaaagcccacaagtcccagggctgacctgcagcaccaccaggtaccagccagagctccgccttgacccaaccccaggaaaacaacactgcctcccaccaggctccaggagacccatgggatggcccattgatcaacagggacggttgcattcagggccatggtgtggtgcaatccttaaatctctgagacccaacggaatgggcccattcatgcaccacactctggggaccaagagctcccctgttaccccgtggcacctcgtagcccctctggccccccttatgtgacctgggcagttctggaggccttaccggagcaccgagtctcagctgggtgctgccctgcattgagcagaaggaactttcctgcctggaccaccatcaccccggcagggcttcagggaaggcatcctccttgggtccgattcccaaaaaagtcgccctccaggagaacccttccctcccaggtggaaattcaggtctgctccctgagaaaactgttgcccaaagactgaatctctgggatccccccatggtctggctcatgacccatgaccccagcaggatccactcacctatgtcagtcaatgccaggtggacctcctaggtggaaaatctgaaaggcacaaggtgagaacaggggctctggagggagccaccaatgttccccacccccagggaaccatagcaccaacaccaaccccacacagggagcctgggctgcctcacagaggagtgcagagacaggttgcacgacctccagatgcccttcagagcctccaggtctccagttcaacatacgatggccctgcaagggaccttgggatcccagcatctgcttccaaaattctcacctaggctaggcctcagcgtaatcctattgaacatgatttttaagtcatcatctctcttcagggcaatatcaggttctcatcattgacccaacctagggaaccccctccccacacaaacatccagtgcaacccagatgtgcttaccccagctcagtgcaggagaccagtgtgccaggaagggtcagagtttcagcgcaccagaggctgagcacctggctgacagacattggcctggggcctgtgggcccaacacaagtcttcctccaggcttaccatctggagggacaggaggaggaaatgtgtctaaccagggcctcacacatcaatgtagagaaggggctaagggatactcatgtgatgggatccatgctgaatactgatccctcacggacactgggcacccttggccctccctgccgccaaaccctggaaagacagggcaagcgtgtcacctggctcgggcaagatgcctgggcagcaccctactgcaggccccaagagcacctccactgcccaggcctgctaccacacacaaccccagggccataccggggacacagggcacaagacagggccaccaaccagcccctggccaaccaagcatgctggcccagacgccaagagccgctgcagacctggaagtccgagagatcgtacctaggcgtggtgggcgctggccctggtgccctctccaagcctaggggcttccaggatcacatgctttctatggtgggtctcaatccatgtcctgcccaactctgacacacagagccgggtcacactcagccaatcaggaaccacatcgtgtcttttcctttcttgggctcaagaccctgccaccccctgaggtgaccccaaggctcagaagcagcctgggcagcaaattcctagaacaggtccctcgacagcaggccttgccatctcaggaggacactcttttcaccactggacctcaaggaaggcttgtccccagcaggatcagagctgctcccttggcccaaagtccacaagtcccagggcctgcagcaccaccaggtgccagccagagctcactcttgacccaacctcattgaaacagtgccgtcccccaccaggctcaaggaggtgccactaagatggcctattgctcaacagggttggtcccattcaaggccatgggtgtggagcatgccttgaatctccacagcctgaccgtgtggacccagtcactcatccctctccagggaggggagaactccagtgtgacctccacggcgcactgtatcccccgtgcctcactcccccatgtgccttgggcaatactcgaggcctgacctgcccactgagtttcagctgggagctgccctacattgggctgaaggaaccctttccagcctggaccactgtcacccctgcagggcctcaggagagacttgctccttgggtcagattcccaaggaagcagccctcctgagaaaccatcgctccctggtggggagtaggttggcagcctgagaaaaccctggtggcccaaaggcagaatgtcagggaccccatgctgcatcactcatggcccatgaccaaaacaggatgcactcacctatgccgctcaaggctgggggggtcacttgtgcagaagagttcactgaatgacaagggagaacaggggctcaggaaggagcctccaacatgccccgtcaccagggacccagagcccggataccaagccagcacagggagcctgggctgcctcacagaggagcacagagataggggtgggcccacaagatgcccttcagggcctcaaggtctccagcccaaaatacagctgctctgtcagggacctcagaattccagcatcctcttccaaaattatcacctaggctgggcctcagtgtaatcctattgagcatgatttttaagtcatcacctttcttcaggacaatataaggttctcatcactgacccaacccagggcaccctcccgcccccagctcatgcatccagcaggacccagatggactcaccagagctcagtgcaggagccgagggcactaggaaggtcctgagcttcagcgcactgggggctgggtgcctagctgactgacat

SEQ ID NO: 1886263 - DNA, 4001 bp, Homo sapiens
aaagcctagtggcctgaaggctgaatgtcggggaccccatgctgcaacactcatggcccatgatcaaaacaggatgcactcacctatgccgcttaaggccggggggaccacttgggccgaagagctcactgaaagacacaggagagaatgggggctcaggaaggagcctccaatgtgccccgtccccagagacccggagcccggataccaagccagtacagggaggctgggctgcctcattgaggagggcagagatagagttgggtccaccagatgcctttcagggcctcaaggtctccagcccaaaacacaggggccctgcagggggcttcgggacccagtgtcctcttccaaaattatcacctaggctgggcctcagcgtaatcctattgagcatgatttttaagtcatcacctctcttcagaacattataaggttctcatcattgacccaacctaggacaacccctccccacgcatgcatccagcaggaccaggatatgctcaccacagctcagtgcaggagaccagggtgccaggaaaggcttgagcttcagcgcatcgggggctgggaacctggctgacagacactggtccagggccattgggcccaatgcaagtcttcctccaggctcaccacctgggggtacaggaggaggacatgtgtccaaatagggcctcacatctccatatgtagaaggaataagagatacccacataatgggttccatgtggaacactgactcatcatgaatgcagggcacccatggccctccctgtcagcataccctgaaaaaacaaggcagtctgcctgccctgtgaccactgggcatgggccacagcaaccaacccactcccagccaaccaaggagggtagaaggaagctacacaccattgcaaacctggcagtcacatagcctgcccctggacatggtgggcacccaccaaggtgccctctccaagtgtgcactgaaaatcacagcctggggacccgggccacatgctttcacaggtgggaccctatccacatcccacacacctcccaaacacagagctgggctacactcggccaatcaagggccacatggtatcttctcttttccttggtcccaagaccccatgaccctggaggtgaccctatggctcagaagaagctgaggtggcaaattcccagtacaggacctcagacagtaggccttcccaccaatcactcaaatttggagaacaggttacccccaataggatgcaggcttccccctcagcccaaagcccacggatcccagggctggactgcagcaccaccaggcaccagccatatctcagccttgacccaaccccattgaaactgcaccaccccccaccaggctcaatatgtgccactgggatggccagttgctcaacagggtgggccccattcagggttacaggtgggatgagatccttgaacctctgcgactcaaccctgtcaagtcacagattcccaaggaagctgacctcctggagaaaccatgcctccctcatgggaattagggtcagctccctgaggaaaccttcatggcccgaagtctgacccttggcaaccccaagcagcctggctcacggaccatgacagcagcaggatccactcacctatgttggtcaatgccaggaggacccccttggcagaagagctcactgaaagacacaaggggagaactggggctcagggaggagccacccacatgccctgcccccaaggaacagaagcaacaacaccaagcccgcacagggagcctgggctgctacacggaggagcacagagaaagagttgagccacctccagatgcccttcagggcctccaggcctccaacccaaactacagtggccctgccagaaatctcgggatcccaacatcccctaccaaatttctcacttagggtgggcctcagcgtaatcctattgagcattatttttaagtcatcaccgctcttcaggacaatatacggttctcatcattgacccaacccagggcaccccccttcccacatacgcatccagtggaacccggatgtgctcaccacagctcagtccagggcgccaggaagggctggagcttcagtgcactggggctgagcacctggctgatggacactggcccaggaaaagcgaggccgacagaagtctcaccatctggaggaacagatggagaacgtgtgaccacccttcatgtggagaagggggtggcgggtgccagctcatgtttgctccccctccatggacacatgtgatgatatccatgtgaaatactgactcatcacctatgccgggcacccctggtcttccctaccaccgatcctgggaagggcaaggcaggcaggtcactgggctcaggcaaaacgcccaggctgtgctgtactgcaggacccaagagcacctccactagccaaaacagctcccccgcagcaccctagaactaccctgggaacactgggcacaggcccaggccaccagccaggtcatggccaaccaaggaggctggcccagatgccacgtgccactgcagacctgatagtggcatagcctacctctgagcctggtacttgggtgtaaaggcaccctctccaagtgtgcaccggaaatcatagcctcgggctgcagggccacttgctttctctatgaatggtgggtccccattcatactccacatatctcccagacacagagccagtcacacatggcctatctgcagtgacatggtgcccactcctttgcttggtcccaagaccctgccaccctggaggtgacaccatggctcccaagcagcctgagcaacaaattcacagtacaagtgcctcaatagcaagccttcccaactcaggaggccacccttcacgacactcgaccatggagaaagggtggcccccagcgggatgcgggatgccccttggcccaaagcccacaagtcccagggctgacctgcagcaccaccaggtaccagccagagctccgccttgacccaaccccaggaaaacaacactgcctcccaccaggctccaggagacccatgggatggcccattgatcaacagggacggttgcattcagggccatggtgtggtgcaatccttaaatctctgagacccaacggaatgggcccattcatgcaccacactctggggaccaagagctcccctgttaccccgtggcacctcgtagcccctctggccccccttatgtgacctgggcagttctggaggccttaccggagcaccgagtctcagctgggtgctgccctgcattgagcagaaggaactttcctgcctggaccaccatcaccccggcagggcttcagggaaggcatcctccttgggtccgattcccaaaaaagtcgccctccaggagaacccttccctcccaggtggaaattcaggtctgctccctgagaaaactgttgcccaaagactgaatctctgggatccccccatggtctggctcatgacccatgaccccagcaggatccactcacctatgtcagtcaatgccaggtggacctcctaggtggaaaatctgaaaggcacaaggtgagaacaggggctctggagggagccaccaatgttccccacccccagggaaccatagcaccaacaccaaccccacacagggagcctgggctgcctcacagaggagtgcagagacaggttgcacgacctccagatgcccttcagagcctccaggtctccagttcaacatacgatggccctgcaagggaccttgggatcccagcatctgcttccaaaattctcacctaggctaggcctcagcgtaatcctattgaacatgatttttaagtcatcatctctcttcagggcaatatcaggttctcatcattgacccaacctagggaaccccctccccacacaaacatccagtgcaacccagatgtgcttaccccagctcagtgcaggagaccagtgtgccaggaagggtcagagtttcagcgcaccagaggctgagcacctggct

SEQ ID NO: 1886264 - DNA, 4001 bp, Homo sapiens
gtggccctgttggggacctcaggatcccagcatcctcttccaaaattctcacctagtctgggcctcagtgtaatcctattgagcatgatttttaagtcatcacctctcttcaagataatacaaggttctcatcattgacccaacccagggcaccctgcctccccacgcatgcatctagcaggacctggatatggtcatcacagctcagtgcaggagaccacggagtcaggaagggtcagagcttcagcacaccatgggctgagcacctggctgacgtacactggcctggggcctgtgggcccaacacgagtcttcctccaggctcaccatctggagggacaggaggacaagtgtccaaccagggcctcacatatcaatgctgggaaggagctaagtgatactcatgcaatgggatccatgctgaacactgacccaacatggacacggggcacccttggccctccctgccaccaaaccctggagagacagggcaagcgggtcacctggctcaggcaagatgcctgggatgcaccctactgcatgttgcaagagcacctccatgccagggccggttcctctgcatgaccccatggccataccagggacatggggcatgggacagggccaccaactagctcctggccaaccaaggagggtggcccagatgccaagagctgctgcaacctggcagtcccagagcctgtacctgggcatggtgggtgccagatctggtgccctctccaagcctgcggacctccagggccatgtgctttcactggtgggtcccaatccataccctgcacaactccgacacacagagccgggccacactcagccaatcaggaaccacatggtgtcctctcctttccttgggctcaagaccccaccaccctagaggtgaccccatggctcagaagcagcttggacagcaaattcccaggacaggtccctcaacagtagggctttccacctcaggaagccccccttcctgccactggacctcaaggaagggttgttcccagcaggatggaagcttcccccttggcccaaagcccacaagtcccagggccagcctgcagcaccactgggtgccagccagagctcagccttgacccaacctcattgaaagagtgccatcccccaccaggttcaaggaggtgccactaagatggcccattgctcaatagggttggtcccattcaaggccatcggtgtggagcattccttgaatctccacagcctgaccatgtgggcccaatcactcacccctctccagggagacagaactccagtgtgacctctagggtgcgccacattccctgtgtccctcctccccatatgccctgggcagtactccaggcctgatctgtccaccaagtttcagctgggagctgccctacattggggctgaaggaaccccttcctgcctggaccactgtcacctctgcagggcttcaggaaaggcgtgctccatgggtcagattccgaaggaagtggccctcctgagaaaccatcgctccctggtggagagtaggtttgcagcctgagaaaagcctagtggcctgaaggctgaatgtcggggaccccatgctgcaacactcatggcccatgatcaaaacaggatgcactcacctatgccgcttaaggccggggggaccacttgggccgaagagctcactgaaagacacaggagagaatgggggctcaggaaggagcctccaatgtgccccgtccccagagacccggagcccggataccaagccagtacagggaggctgggctgcctcattgaggagggcagagatagagttgggtccaccagatgcctttcagggcctcaaggtctccagcccaaaacacaggggccctgcagggggcttcgggacccagtgtcctcttccaaaattatcacctaggctgggcctcagcgtaatcctattgagcatgatttttaagtcatcacctctcttcagaacattataaggttctcatcattgacccaacctaggacaacccctccccacgcatgcatccagcaggaccaggatatgctcaccacagctcagtgcaggagaccagggtgccaggaaaggcttgagcttcagcgcatcgggggctgggaacctggctgacagacactggtccagggccattgggcccaatgcaagtcttcctccaggctcaccacctgggggtacaggaggaggacatgtgtccaaatagggcctcacatctccatatgtagaaggaataagagatacccacataatgggttccatgtggaacactgactcatcatgaatgcagggcacccatggccctccctgtcagcataccctgaaaaaacaaggcagtctgcctgccctgtgaccactgggcatgggccacagcaaccaacccactcccagccaaccaaggagggtagaaggaagctacacaccattgcaaacctggcagtcacatagcctgcccctggacatggtgggcacccaccaaggtgccctctccaagtgtgcactgaaaatcacagcctggggacccgggccacatgctttcacaggtgggaccctatccacatcccacacacctcccaaacacagagctgggctacactcggccaatcaagggccacatggtatcttctcttttccttggtcccaagaccccatgaccctggaggtgaccctatggctcagaagaagctgaggtggcaaattcccagtacaggacctcagacagtaggccttcccaccaatcactcaaatttggagaacaggttacccccaataggatgcaggcttccccctcagcccaaagcccacggatcccagggctggactgcagcaccaccaggcaccagccatatctcagccttgacccaaccccattgaaactgcaccaccccccaccaggctcaatatgtgccactgggatggccagttgctcaacagggtgggccccattcagggttacaggtgggatgagatccttgaacctctgcgactcaaccctgtcaagtcacagattcccaaggaagctgacctcctggagaaaccatgcctccctcatgggaattagggtcagctccctgaggaaaccttcatggcccgaagtctgacccttggcaaccccaagcagcctggctcacggaccatgacagcagcaggatccactcacctatgttggtcaatgccaggaggacccccttggcagaagagctcactgaaagacacaaggggagaactggggctcagggaggagccacccacatgccctgcccccaaggaacagaagcaacaacaccaagcccgcacagggagcctgggctgctacacggaggagcacagagaaagagttgagccacctccagatgcccttcagggcctccaggcctccaacccaaactacagtggccctgccagaaatctcgggatcccaacatcccctaccaaatttctcacttagggtgggcctcagcgtaatcctattgagcattatttttaagtcatcaccgctcttcaggacaatatacggttctcatcattgacccaacccagggcaccccccttcccacatacgcatccagtggaacccggatgtgctcaccacagctcagtccagggcgccaggaagggctggagcttcagtgcactggggctgagcacctggctgatggacactggcccaggaaaagcgaggccgacagaagtctcaccatctggaggaacagatggagaacgtgtgaccacccttcatgtggagaagggggtggcgggtgccagctcatgtttgctccccctccatggacacatgtgatgatatccatgtgaaatactgactcatcacctatgccgggcacccctggtcttccctaccaccgatcctgggaagggcaaggcaggcaggtcactgggctcaggcaaaacgcccaggctgtgctgtactgcaggacccaagagcacctccactagccaaaacagctcccccgcagcaccctagaa

SEQ ID NO: 1886265 - DNA, 4001 bp, Homo sapiens
caggtctctagcccaaaatgcagtggccttgttggggaccttgggatcccataatcctcttccaaaattctcccctaggttgggcctcagcgtaatcctattgagcatgatttttaagtcatcacctctcttcaggacaatataaggttctcatcattgacccaacccagggaagcccctcctcgcaaaaaaaacttccagtggaagccagatgtgctcagcacagctcagtgcaggagactagggtgccaggatgggctgggtcttcaatgcactgggggctgagcacctggctgatggacactgtcccatgaaaagtgggcccaatggaagtcttcctccagtctcaccatctagggacacaggtggagtacatgtgaccaccctccatggggagaatggggtgcgtgccagctcacgcttgcccccacctccatggacacgtgatgagatccatgcaaaatattgacttgtcaccaatgtagggcacccttggccctccctgccaccgaacccaggaaggacaaggcaggcaggtcactgggctcaggcaaaatgcccccaggctgtgccatactgcaggccccaagagcatttccactgcccaaaacagctccccagcaagaccccagggcagccctgggaacactgggcacaggcacgggctaccagccaggtcacggccaaccaaggtggctggcccagatgccacgtggcactgcagacctgcagtggcaaagcctgcccctgggcgtggtgggagcaggtataggcaccctctccaagcctgcaccagaaatcacatcttggggctgcagggccacttgctttctctggtgggtccccatccacacacctctcagacacagagccagtcacacatagccactggcagccacatggtgccctctcctttgcttggtcccaagatcccaccaccctggaggtgacaacatggatcctaagcagcctaagcaacaaattctcagtacaggtccttcgacattgggctttcccacctcaggaggccacccttcacgacactcgacctcagagaaagggtgacccccagagggatgtgggctgtccgttggcccaaagcccacgagtcccagggctgacctacattaccaccaggtactgaccagagttccaccttgaccgaaccccagggaaaaaacgccaccccccaccaggctccaggaggagagtcacattcagggccatgggtggtgcagcatccttgaatctctgcgactcaaccccatgggcccattcatgtaccacactctggggaccaagagctcccctgtcactcctgtggtgcctcgtagcccctctgggccccttcatgtggcagggaggtccttgaggccttactggaacaccgagtctcagctgggtgaaggaaccctttcctgcctggaccaccatcatcccagtagggcttcagggaaggcgtcctccttgggtccaattcccaaaaacccaccctcctggagaagccatctctcccaggtggcaaatcaggttggctgtctgagacaactctcgggatccaaaggctgaaccttggggaccccacatggcctggctcatggcccataatcccagaaggatccactcacctctgtcggtcaatgctagggagcccacctgtttggaagagctcactgaaagacacaaggggagaacgggggctcagggagtagccacccacgtgtcctgcccccagggaagtggagcaccaataccgatcccgaatagggagcatgggctgcctcagggaggagtgcagagacagggttgggccccctacagatgcccttcaggacctccaggtctccagcccaaaatatggtggccctgttggggacctcaggatcccagcatcctcttccaaaattctcacctagtctgggcctcagtgtaatcctattgagcatgatttttaagtcatcacctctcttcaagataatacaaggttctcatcattgacccaacccagggcaccctgcctccccacgcatgcatctagcaggacctggatatggtcatcacagctcagtgcaggagaccacggagtcaggaagggtcagagcttcagcacaccatgggctgagcacctggctgacgtacactggcctggggcctgtgggcccaacacgagtcttcctccaggctcaccatctggagggacaggaggacaagtgtccaaccagggcctcacatatcaatgctgggaaggagctaagtgatactcatgcaatgggatccatgctgaacactgacccaacatggacacggggcacccttggccctccctgccaccaaaccctggagagacagggcaagcgggtcacctggctcaggcaagatgcctgggatgcaccctactgcatgttgcaagagcacctccatgccagggccggttcctctgcatgaccccatggccataccagggacatggggcatgggacagggccaccaactagctcctggccaaccaaggagggtggcccagatgccaagagctgctgcaacctggcagtcccagagcctgtacctgggcatggtgggtgccagatctggtgccctctccaagcctgcggacctccagggccatgtgctttcactggtgggtcccaatccataccctgcacaactccgacacacagagccgggccacactcagccaatcaggaaccacatggtgtcctctcctttccttgggctcaagaccccaccaccctagaggtgaccccatggctcagaagcagcttggacagcaaattcccaggacaggtccctcaacagtagggctttccacctcaggaagccccccttcctgccactggacctcaaggaagggttgttcccagcaggatggaagcttcccccttggcccaaagcccacaagtcccagggccagcctgcagcaccactgggtgccagccagagctcagccttgacccaacctcattgaaagagtgccatcccccaccaggttcaaggaggtgccactaagatggcccattgctcaatagggttggtcccattcaaggccatcggtgtggagcattccttgaatctccacagcctgaccatgtgggcccaatcactcacccctctccagggagacagaactccagtgtgacctctagggtgcgccacattccctgtgtccctcctccccatatgccctgggcagtactccaggcctgatctgtccaccaagtttcagctgggagctgccctacattggggctgaaggaaccccttcctgcctggaccactgtcacctctgcagggcttcaggaaaggcgtgctccatgggtcagattccgaaggaagtggccctcctgagaaaccatcgctccctggtggagagtaggtttgcagcctgagaaaagcctagtggcctgaaggctgaatgtcggggaccccatgctgcaacactcatggcccatgatcaaaacaggatgcactcacctatgccgcttaaggccggggggaccacttgggccgaagagctcactgaaagacacaggagagaatgggggctcaggaaggagcctccaatgtgccccgtccccagagacccggagcccggataccaagccagtacagggaggctgggctgcctcattgaggagggcagagatagagttgggtccaccagatgcctttcagggcctcaaggtctccagcccaaaacacaggggccctgcagggggcttcgggacccagtgtcctcttccaaaattatcacctaggctgggcctcagcgtaatcctattgagcatgatttttaagtcatcacctctcttcagaacattataaggttctcatcattgacccaacctaggacaacccctccccacgcatgcatccagcaggaccaggatatgctcaccacagctcagtgcaggagaccagggtgccaggaaaggcttgagcttcagcgcatcgggggctgggaacctggctgacagacactg

SEQ ID NO: 1886266 - DNA, 4001 bp, Homo sapiens; identical to SEQ ID NO: 1886222

SEQ ID NO: 1886267 - DNA, 4001 bp, Homo sapiens; identical to SEQ ID NO: 1886223

SEQ ID NO: 1886268 - DNA, 4001 bp, Homo sapiens; identical to SEQ ID NO: 1886224

SEQ ID NO: 1886269 - DNA, 4001 bp, Homo sapiens; identical to SEQ ID NO: 1886225

SEQ ID NO: 1886270 - DNA, 4001 bp, Homo sapiens
aaatacagtgaccctgactgggatctcaggatcccagccgtcctcttccaaaattctcacctaggctgggcctcagcgtaatcctattgagcatgatttttaagtcatcatctctcttcaggacaatgtaaggttctcatcattgacccaactctgggcaggcccctccccattcatgcatccagcaggacccggatgggctcaccacagctcagtgctggacaccagggtgccaggaagggtctgagcttcagcgcactgggagctgagcacctggctgatggacactggcctggggcctgggggcccgacacaagtcttcctccagggtcagcatctgcagggacaggaggaggacatgtgtccaaccagggcctcacataacaatgcacagaagttgggtaggggatacccttgtgatgggatccatgcagaacactgatccatttcagatgcggggcacagttggccctccctgccaccaaaccctggaaagacagggcaagtgggttactgggctcgggcaagacacctgggctgcgccctactgcaggccttgagagcacctccactgccggtgctgtctccccaaacaaccccagggctgcaccaggaccacagggcacaggctagggcaaccaacctgctcatggccaaccaaggagcgtggtcttcatgccaggagccactccagacctggcagtcacagagcctgcccctgggcatggtagggctgccctggtgcccactgcaagcacacaccagaaatcaaagcctgggggcctacagggccacatgctttctctgatgggtccccatccatgccctgcacacctcccacacacagatccaggccacactcccagtcagaaaccatatggtgtctcctttccctgggctcaagaccctgccaccctggaggtgactccatggctcagaagcagcctaggtggcaaattcccaggacaagtcccttgacagcaggtcttccacctcaggagaacacccttcctgccactgaatctcaaggaaggggtgaccccagagggatatgagctgcccccttggcccaaagcccatgtgggcaccaccgggcaccagccagagttcagccttgacccaaccgcattgaaacaatgccactacctaccaggctcaaggaggcaccattaaaatggcccattgttcaacagggtcagtcccattcagggccatgggtgggtagcattccttgaatctccgcagcctgatcgcatgggccctatcacccacccctcttggggcaagaactccagcatgacccccagggcaccccaaatcccctgtggcccccatcatgtggcccgagcagtccttgagcctgatctgccaccgagtttcagctgggaactgcattatgttgggctgaaggaaccctttcccgcctggaccaccatcaccctgcagagcttcaggaaatgcatgctcctagagtcagattcccaaggaagcgaccctcctggaggaaccatccctcctgatgggtaacctgttggctccctgagaaaaccccagtggcccaaaggctgactctcgacgaaccgacgctgcctcactcatggcccatgaccctgacaggatgctctgacccatgccgctcaaagccaggggccccacctgggaagaagaacttactgaaagacacagggaagaaggagggctcaggaagaggatgccaaattgccccacccctggggaagcgaagcatgggcaccaagcccgcaacgggagcctgggctgcctcacggagaagcacagagacaggattgcccccccacaagatgcgcttcaggtcttgaaattttccagcccaaaataagtgtggccctgccggggatctcaggatcccagcctcatcttccaaaattctcacctagcttgggcttcagcataatactattaagcatgatgtttaagtcatcaccttttttcaggacaatataaggttctcatcatcagcccaacccagggtacacccctccctttgcatgcaaacagtggaacccggatgtaaccccagctcagtgcaggagctgagggtgccaggaagggcctgagcttcagcacacttggagctgggaacctggctgactgacactggcccaggaacagcgggcataatgcaagtcttcctccagtctcaccatctagggggactagaggaggatatgtgtccaaaatgacctccatgtggggaaggcagtggggggtgggggctcacatttgcttgccctccaaggaaaaatgtgatgtgatccatgtgaattactgagtcgtcacggatgcggggcacccttggccctccccgccaccaaaccctggaggaacagagcaggcgggtgactgggctcaggccaaatgcccaggctgcactgtactgcaggccctgacagcacctccactgcccaacatggctcccccacacgaccccagggccgccctggcaccactggccacaggccaaggccaccagccagctcacggccaaccaaggtggctggcccagatgccacacgtggctcaggctgcagacctggctatcacgtagtctgcccctgggcatggtgggcacaaatcaagacaccctctccaagtgtgcattggaaatcacagcctgggatgcagggccacgtgctttctctggtgggtcaccgtccatgctctgcacacctcccgcacacagagctaggccatacttggccaatccagaacgacatggtgccctctgctatgctcaggcccaagaccctgccactgtggatgtgacgccatggctcagaagcagcctgagcaacaaaatcctgggacagatcccttgacagtaggccttctcacctcagggggccacccttcatgacacttgaccatggagataggctgaccccaagcgggatgcgggctgtcccttggcccaaagcccaaaagtcccagggatgatctgcagcaccaccaggtaccagccagagctccacctagacccaaccccagggaaacaacaccaccccccgaccaggctccaggagacccactgagatggcccattgctcaagaggaagagtcacattcagggctgtgggtagggtgtgatccttgaatctacacaacccaatcccatgggtccattcaggcaccacactccaaggaccaagagctcccctgttacccctgtggcaccctgtagcccctctggcccccctcatatggcctgggcagttctggaggccttaccagatcaccgcatcttagctgggtgttgccctgcattgagcagaaggaaccctttcctgcctggaccaccatcacccctgcagggcttcagggaatgggtcctccttgggttaggttcccaaaaaagccaccctccaggacaacccttccctcccgggtgaaattcaggtctgctccctgagaaaacctttgtggcccaaaggctgaaccttggggactccacatggtctggctcatgaccaatgaccccagcaggatccactcacctatgccagtcaatgccagggggatgtcctgggtggcagagctcactgaaagacacaaggcgagaacaggagctcaggaaggagccaccaacattccccatgccagggaaatggagcaccaacaccaatcccacacagggagcctgggctgcatcacgaaggagcagagacaggttgggccacctccagatgctcttaagagcctccaggtctctagcccaaaatgcagtggccttgttggggaccttgggatcccataatcctcttccaaaattctcccctaggttgggcctcagcgtaatcctattgagcatgatttttaagtcatcacctctcttcaggacaatataaggttctcatcattgacccaacccagggaagcccctcctcgcaaaaaaaacttccagtggaagccagatgtgctcagcacagctcagtgcaggagactagggtgccaggatgggctgg

SEQ ID NO: 1886271 - DNA, 4001 bp, Homo sapiens
tcacctaggctgggcctcagcgtaatcctattgagcatgatttttaagtcatcacctctcttcaggacaatataagattctcatcattgacccaacgtagaaaaccccctccccgcacaaaaatccagtggaacccggatgtgctcaccacagcttagtgcagaagactggggcaccaggaaaggctggagcttcagtacaccaggggctgagcacctggctgatggacactggcccaggaaaagtgggcccaatggaagtcttcctccagtctcatcatctgggggcacaggtggaggacatgtgaccaccctccacgcggagaagggggtggctggtgccagctcatgcttgctcgtccttcatggtcacgtgtgatgagatccatgcaaaatactgactcgtcaccaatgtggggcacccttggctctccctgccactgaacccgggaaggacaaggcaggcaggtcactgggcttgagcaaaacacccaggctgtgctgtactgtaggacccgagagcacatccactgcccaaaacggctcccctgcacgaccccagggctaccctgggaccactgggcacaagcacaggccaccacccaggtcacagccaacgaaggaggctggcccatatgccaggtgcccctgcagaccctgaagtggcatagcctgctcctgggcatggtgggcatgcatataggcaccctctccaagcctacaccagaaattacattctgggactgcagggccacttgctttctctggtgggtccccatccatactccacacacttcccaggcacagagccagccacacatggccaattgggagccacgtagtgtcccctcctttgcttagtcccaagatcccgccaccctggaggtgacaccatggctcccaagcagcctgaggaacaattcctagtctaggtgccttgacagtgggccttcccacctcaggaggccatccttcacgacactcaacctcggagaaaaggcgacccccagcaggatgcgggctgcctcttggcccaaagcccacgagtcccagggctgacctgcagcaccatcaggtaccagtcagagctccgccttgacccaaccccaggaaaacaatgccaccccacaccaggccccaggagacccactgggatggcccattgctcaacagggatggtcgcattcagggccgtgggtgagatgcaatccttgaatctccgtgacccaaccccatgggcccattcatgtaccacactccgggggccaagagctcccctgttgcccccatggttccccatagcccctctgacctccttcatgtggcctgggcagtcctcgagcccttaccagagcaccaattctcaggggggcactgccctgcattgggcctcgagttgggcagaaggaaccctttcctgcctggaccaccatcacccctgcagggcttcagggaaggtgtcctccttgggtctgattcccaaaaaagctgcctcctggagaacccatctctcccaggtgggaattcaggttggctgcctgagaaaacccttgtggcccaaaggctaaacctcagcaaccccacacagactatctagtggcccattatcccagtaggatgcactcacctatgtcggtcaatgccagggggcccacctgggtggaaaagctcactgaaagacacaaagggagaataggggctcaggaaggagccaccaacccgccctgtccctggggaaccagagcaccaacaccaagcccacacagggagtgtgggttgcctcacggaggagcacagagacagggctgggcccccttccagatgccctttagggcctccaggtctccagcccaaaatacagtgaccctgactgggatctcaggatcccagccgtcctcttccaaaattctcacctaggctgggcctcagcgtaatcctattgagcatgatttttaagtcatcatctctcttcaggacaatgtaaggttctcatcattgacccaactctgggcaggcccctccccattcatgcatccagcaggacccggatgggctcaccacagctcagtgctggacaccagggtgccaggaagggtctgagcttcagcgcactgggagctgagcacctggctgatggacactggcctggggcctgggggcccgacacaagtcttcctccagggtcagcatctgcagggacaggaggaggacatgtgtccaaccagggcctcacataacaatgcacagaagttgggtaggggatacccttgtgatgggatccatgcagaacactgatccatttcagatgcggggcacagttggccctccctgccaccaaaccctggaaagacagggcaagtgggttactgggctcgggcaagacacctgggctgcgccctactgcaggccttgagagcacctccactgccggtgctgtctccccaaacaaccccagggctgcaccaggaccacagggcacaggctagggcaaccaacctgctcatggccaaccaaggagcgtggtcttcatgccaggagccactccagacctggcagtcacagagcctgcccctgggcatggtagggctgccctggtgcccactgcaagcacacaccagaaatcaaagcctgggggcctacagggccacatgctttctctgatgggtccccatccatgccctgcacacctcccacacacagatccaggccacactcccagtcagaaaccatatggtgtctcctttccctgggctcaagaccctgccaccctggaggtgactccatggctcagaagcagcctaggtggcaaattcccaggacaagtcccttgacagcaggtcttccacctcaggagaacacccttcctgccactgaatctcaaggaaggggtgaccccagagggatatgagctgcccccttggcccaaagcccatgtgggcaccaccgggcaccagccagagttcagccttgacccaaccgcattgaaacaatgccactacctaccaggctcaaggaggcaccattaaaatggcccattgttcaacagggtcagtcccattcagggccatgggtgggtagcattccttgaatctccgcagcctgatcgcatgggccctatcacccacccctcttggggcaagaactccagcatgacccccagggcaccccaaatcccctgtggcccccatcatgtggcccgagcagtccttgagcctgatctgccaccgagtttcagctgggaactgcattatgttgggctgaaggaaccctttcccgcctggaccaccatcaccctgcagagcttcaggaaatgcatgctcctagagtcagattcccaaggaagcgaccctcctggaggaaccatccctcctgatgggtaacctgttggctccctgagaaaaccccagtggcccaaaggctgactctcgacgaaccgacgctgcctcactcatggcccatgaccctgacaggatgctctgacccatgccgctcaaagccaggggccccacctgggaagaagaacttactgaaagacacagggaagaaggagggctcaggaagaggatgccaaattgccccacccctggggaagcgaagcatgggcaccaagcccgcaacgggagcctgggctgcctcacggagaagcacagagacaggattgcccccccacaagatgcgcttcaggtcttgaaattttccagcccaaaataagtgtggccctgccggggatctcaggatcccagcctcatcttccaaaattctcacctagcttgggcttcagcataatactattaagcatgatgtttaagtcatcaccttttttcaggacaatataaggttctcatcatcagcccaacccagggtacacccctccctttgcatgcaaacagtggaacccggatgtaaccccagctcagtgcaggagctgagggtgccaggaagggcctgagcttcagcacacttggagctgggaacctggctgactgacactggcccaggaac

SEQ ID NO: 1886272 - DNA, 4001 bp, Homo sapiens
gcctgggatctcaggatcccagcatcctcttccaaagttctcacctaggctgggcctcagcgtaatcctattgagcatgatttttaagtcatcacctctcttcaggaaaatataaggttctcatcatcgacccaacccacgagaccaaccacctcttgcatgcatccagcgggacccggatgtgctcaccacagctagtgcaggagaccagggtgtgaggaagggcctgagcttcagcgcctcaggggctgggcaacaggctgatggccactggcccaggaacagcaggcccaacacaagtcttcctcccgtctcaccatctgggagagaggtggagaacatgtgtccaaaatggcctctatgtagggaaggaagtagcgggtgccagttcccgcttgctcgtcctccatgggcacatgtgatgagatccatgtgaaatactgacttgtcactgacatggggcacccttgtccctccctgccacccaaccctggaaggacagggcaggtaggtcactgggctcgggccaaatgcccagcctgcgccatattgcaggccctgagaggacctccactgtccaagagggctcccctgcatgaccccaaggcacgggccagggccattagctaggtcatggccaaccaagaaggctggcccagatgccatgtgccactgcagtcctggcagtcacgtagtctgcccctgggtgtggtgggctcacatcaagatgccctctctaagcatgtactggaaatcacagcttggggctgcagggccacgtgctttctctggtgggtcaccagccatgctctgcacacctcccaccacagagctaggctacacttggccaactcagagcgacatggtgccctctcctttgcttgggcccaagaccctgtcaccctggaggtgataccatggctcagaagaagcctgagcaacaaaatcctgggacaggtccctcgacaatgggccttcccacctcaggaggccacccttcgtgacattcgaccccagagatagggtgaccccccagcaggatgccagctgtcccttggcccaaagcttacgagtcccaaggctgacctgcagcatgaccaggtaccagagctccaccttgacccaaccccagggaaaaaacgtcgccctgcaccagactccaggagacccggtgggatggcccattgctcaatagggatggtcactttcagggccatgggtggggtgtgatccttgaatctccgtgaccaaaccccattcacacaccacactccagggaccaagagctcccctattaccccagtggtgctccatagcccctctggcctccttcatgtggcctgggcagtcctggagaccttactggagcactcagtctcaactgggagctgtcctgcattgggcagaaggaaccctctcctgcctggaccaccatcacccttgcagggcttcagggaaggcatcctccttgggctagattcccaaaaaaactaccctccaggagaacccttccctcccaggtggaaattcaggtctgctccccgagaaaacccttgtggactgaaggctgaacctcggggaccccacacggtctagctcatgaccaatgaccccagcaggatccactcacctatgccagtcaatgccaaggggccctcctgggtggaagagctcactgaaagacacaaggtgagaatgagggctcaggaaggagccaccaacattccccacaccagagaaccggagcaccaacaccaaccctgcacagggagcctgggctgcctcatggaggagcgcagagacaggttgggccacctccagatgcccttcagagcctccaggtctctagcccaaaatacagtggccttgctgaggacctcagcatcccataatccccttccaaaattctcacctaggctgggcctcagcgtaatcctattgagcatgatttttaagtcatcacctctcttcaggacaatataagattctcatcattgacccaacgtagaaaaccccctccccgcacaaaaatccagtggaacccggatgtgctcaccacagcttagtgcagaagactggggcaccaggaaaggctggagcttcagtacaccaggggctgagcacctggctgatggacactggcccaggaaaagtgggcccaatggaagtcttcctccagtctcatcatctgggggcacaggtggaggacatgtgaccaccctccacgcggagaagggggtggctggtgccagctcatgcttgctcgtccttcatggtcacgtgtgatgagatccatgcaaaatactgactcgtcaccaatgtggggcacccttggctctccctgccactgaacccgggaaggacaaggcaggcaggtcactgggcttgagcaaaacacccaggctgtgctgtactgtaggacccgagagcacatccactgcccaaaacggctcccctgcacgaccccagggctaccctgggaccactgggcacaagcacaggccaccacccaggtcacagccaacgaaggaggctggcccatatgccaggtgcccctgcagaccctgaagtggcatagcctgctcctgggcatggtgggcatgcatataggcaccctctccaagcctacaccagaaattacattctgggactgcagggccacttgctttctctggtgggtccccatccatactccacacacttcccaggcacagagccagccacacatggccaattgggagccacgtagtgtcccctcctttgcttagtcccaagatcccgccaccctggaggtgacaccatggctcccaagcagcctgaggaacaattcctagtctaggtgccttgacagtgggccttcccacctcaggaggccatccttcacgacactcaacctcggagaaaaggcgacccccagcaggatgcgggctgcctcttggcccaaagcccacgagtcccagggctgacctgcagcaccatcaggtaccagtcagagctccgccttgacccaaccccaggaaaacaatgccaccccacaccaggccccaggagacccactgggatggcccattgctcaacagggatggtcgcattcagggccgtgggtgagatgcaatccttgaatctccgtgacccaaccccatgggcccattcatgtaccacactccgggggccaagagctcccctgttgcccccatggttccccatagcccctctgacctccttcatgtggcctgggcagtcctcgagcccttaccagagcaccaattctcaggggggcactgccctgcattgggcctcgagttgggcagaaggaaccctttcctgcctggaccaccatcacccctgcagggcttcagggaaggtgtcctccttgggtctgattcccaaaaaagctgcctcctggagaacccatctctcccaggtgggaattcaggttggctgcctgagaaaacccttgtggcccaaaggctaaacctcagcaaccccacacagactatctagtggcccattatcccagtaggatgcactcacctatgtcggtcaatgccagggggcccacctgggtggaaaagctcactgaaagacacaaagggagaataggggctcaggaaggagccaccaacccgccctgtccctggggaaccagagcaccaacaccaagcccacacagggagtgtgggttgcctcacggaggagcacagagacagggctgggcccccttccagatgccctttagggcctccaggtctccagcccaaaatacagtgaccctgactgggatctcaggatcccagccgtcctcttccaaaattctcacctaggctgggcctcagcgtaatcctattgagcatgatttttaagtcatcatctctcttcaggacaatgtaaggttctcatcattgacccaactctgggcaggcccctccccattcatgcatccagcaggacccggatgggctcaccacagctcagtgctggacaccagggtgccaggaagg

SEQ ID NO: 1886273 - DNA, 4001 bp, Homo sapiens
tctcaccaaggctgggcctcagcgtaatcctattgagcatgatttttaagtcatcacctctcttcaggacaatataaggttctcatcatcgatccaacccagggcaccctcctccccatgcatgcatccagtgggacctggatgggctcaccacagcttagggcaggaggccagggcaccaggaagggcttgagctcaagtgcaccaagggctgggcacctggatgacaaccactggcctggggccagcggtcccaaagcaagtcttcttccacagtcaccatctggggggacaggaggaggacatgtgtccaaccatgggctcacgcctccatacagggaatggggttgggggtgccagctcacacatgctctctctccgtggacccatgtgatgggatccatgggaaacactgatgtgtcatagatcagcggaaccctttgctctcccagccactgaaccatggaaggacagggcaggtgggttcctgggctcaggcaagacacctgggctgtgccctactgcaggccccttgagcacctccattgcccatgctagctcccctgcatgaccccgggtggtatctggatccttgggtaggggccacggacaccaaagagctcacagcaaaccaaggaccctggcccggacaccacgtgctgttgcctacctggcagttgcacagtctgccctgtgcatggagggcacccaccctcctttcctcaaggtgcactggaaatcgcagcctggggctccagggccacaagctttctctggtgtgtcccaatccatgccccacacaacacctcccacacacacagcagggccacactcagccaaccgggagacatatggtatcttctcctttctttgggcctaagacccgcccctgccccccaacccgctggagttgtcctaatggctgagaagcagcctggactgcaaatttccaggaaaggtccttccactgcgggccttcccaactcaggaggccattactgccactcgcccacaatgaaggggtgacccccagcgggacatgggctgcagccttggcccagagcccacgagtcccaggagtggattgcaccaccatcaggcactggccagagctagtcttgacccaacctcagagaaacagcgccgccccacaaatggctcaaagaggtgccactgggagggcccactgcttatagggtcagtcccattgagggtcctgggtttgctgcaatccatgaatctccatggcctgaccccatggaccgaatcacccacccttctccagggttggagagcccccgtgagatgcccttggctccccggagcccttgttgcccccctcatgtggcctggccatgttagaggcctgacccaagcaccaagtctgagctgagcactgccctgcgtggggctgaggaaaccctttcctgcctggacaactgccacccctgcggggcttcagagaaggcctcctccttatgtctgattcccaaggaagctgccctcctggagaacacatccccagttgggattcagatcagctcctgaggaaacccaggtggcccgagggctgacccttggggaccccacgcagcttggctcatggcccatgacaccagcagtctccactcacctatgctcgtcaatcccaggggtctgctggggggaagagctcactgaaagacacagaggataatggggctcacggaggagccgccaacgtgtcccaccccagggaagctgagcgtggacaccaagcccacacagaaagtctggtgtgcctaatagaggagcacagacaggattgggcccctccatgaggtgcccttcagggcctcgaggtatccagcctaaaatacagcagccctgctggggacctcgggattctagtgtccccttccaaaattctcacctaggctgggcctcagcgtaatcctattgagcatgatttttaagtcatcacctctcttcagaacaatataaagttctcatcatcgacccaacccagggcacccccctccctgcctaggcatccagtggcacccggatgggctcacccaagctcaacgcaggagaccaaggtgacaggaagggcccgagtttcagtgcaataggggctaggcacttggctgatggccactggccagggacagcgggcccaacgcatgtcctcctctggggtcaccatctcaaggaacaggaagaggacaagtgcccaaacacaacctcacccctccatgtggacagaaggtgtggtgtgccagctcagggatgctcaccttccatggacccatgtgatgagatccatgtggaatacttacccatcatggatgcagggcacccaatgctctctccgccactgaacaccgaaaggataggacaggcaggtcactgggctcaggctagaagccagggctgtgccctactgcaagccccacaagcacctccactacacatgccagctcccctgtatgacaccagggtcaccccaggactactgggcacaggccagggccagcaaccagttcattgtcaaccaaggaggctggcccatatgcctgatgctgctgcacagctggcagtcacatagccagtccctgtgcatggtgggcacccacccatgtgctgtatctgggcacatactggaaaccacgacctggggtcccagggccacatgctttctctggtgagtttccatccatgcccctcacacctcataaacacacagcctggccacactcagctaatcggggggcacagtgtcttctcccttccttgggcccaagatcccaccacactggaggtgtctccatggctcagaagcagcatgggcagcaaattgccaggacaggaccctcaatagtgggccttctcacttcaggaggtgacccttccccacattcgcccactgggaaggggtaacttccagccacagggaaggggtgacttccagagggatgcaggctgccccactggcccaaagcccacgagtccaacagctagactgcagcaccaccaggcaccggccagagctcagccttgacctaaacccagtgaaacagcaccgcccctcttcaggcttgaagaggcccatgggatggcccattgctcaacagggtgggttccattcaggaccatgtgtcaggtgcaatccttgaatctccactgctcaactccatgggcctgatcacccacctttctccagggacaaagagcacctgtgtgacccccaaggcaccccagagcccctgtggccccccacatagtcagggcagtccagacgcgagcaccgagactcagctgggagctgccctgggtggaattgaaggaaccctttcctgcctggaccaccgtcacccctgcagggcttcagggaaggcgtcctccttggttcctgtttcccaggaagccgccctcctggagaacccatctcttcccagtggggattcagtttggctccctgaggaaacccttctttcctgaaggctgacccttggtgaccccacgtggcctggcccatggcccatgacaccagcaggatccactcacctatgccagtcaatgccagggggccctccttggtggaagagctcactgaaagacacaaggggagaacagggctcagggaggagccaccaatatgtcccaccccagggaaccagagtgccaacagcaagcctgcacagggagcctgggctgcctcatagagacagggtctggcccttcaggtgcccttagagtcaccagatctccatcccaaaatacagtagctcagccagggacctcagcatccagtatcctcttccaacattctcacctaggctaggcctcagcgtaatcctactaagcatgatttttaagtcatcacctctcttcaggacaatataaggttctcatcattgacccaacccagggcacccccctccccacacatgcatccagtaggacctagatgggctcaccaaggctcagtggaagagaccagtgttgagggaagtcag

SEQ ID NO: 1886274 - DNA, 4001 bp, Homo sapiens; identical to SEQ ID NO: 1886246

SEQ ID NO: 1886275 - DNA, 4001 bp, Homo sapiens
tgccagggatctcgggatcccagcatcctcttccaaaattctcacctaggctgggcctcagcgtaatcctattgagcatgatttttaagtcatcacctctcttcagaacaatataaggttctcatcatcgacccaactgaggggatcaatcacctcgtgcatgcatccagcaggacccggatgtgctcaccacagctcagtgcaggagaccagggcgcgaggaagggcccgagcttcagcgcatcaggggctgggcaacaggctgatggccactggcccaggaacaacaggcccaatgcaagtcttcctccggtctcaccatctgggagagaggtggagaacatgtgtccaaagttacctccatgtagggaaggaggtaggacgtgccagttcacacttgcttatcttccacggacacatgtgatgagagccatgtgaaatactgacttgtcaccaacacggggcacccttggccctgcctgccaccgaaccctggaaggacagggcaggtagttcattgggcttgggataaatgcccaggccgtgccatgctgcaggctttaagagcacctccactgcccaagaggcctccgctgcatgacaccagggcttccctgggatcactgggcacaggccagggtcattagccaggtcatggccaaccaagaaggctggccaagatgccatgcgccactgcagacctggcagttgcatagcctaccccgggcatgtggggcacgcatacaggcgccctctctaagcatgcactggaaatcacagcttgagtcacatgctttctttggtgggccaccatccataccccgcatatctccgacacacttgaacaatcaggagacacatggtgccctctccattgcttgggcccaaacctccatcaccctggaggtgacacaatggattccaagcagcctgagcaacaaaatcctaggaaaggtccctcgacagtgggccttcccttctcaggaggtcaccctctatgacgcttgatctcagagatagggtaatctccagcgggatgcgggctgcccctcggcccaaagcccacgagtcccagggctgacctgcagcacaaccaggtatgggccagagctctgccttgactcaaccccaggaagacaacgccacctcccatcaggctccaggagacccactggaatggcccattactcaacagggacggtcacattccaggccatgggtggagcacaatccttttatctccaagacctaaccctaagggtccattcacacaccacactctagggactgagagctcccatgtgacccccgtggcacccagagcccctctggaccccctcgtgttcaggcagtcctcaaggactgacccgaacaccgagtgtcagctaggagctgccttgcccgggctgatggaaccctttcctgcctggaccaccgtcacccctgcagggcttcaggtatcctccttgggtctaattcccaaaaaagctgccctcctggagaacccgtctctcccaggtgggaattcaggtcggctgcctgagaaaacccttgtggcccaaaggctgaacctcagcgaccccacatggcctggctgatggcccatgaccccagcaggatgcactcacctatgccagtcaatgccagggggcccatctgggaggaaaagttcactgaaagacacaagggaggaatgggggctcaggaaggagccagcaatgttccctggccccagggaactggagcaccaacaccaagcccgcagaggtagcctgggctgccccaaggaagagcacagagacagggttgggcctccttccagatgcccttcagggcctccaggtctccaacccaaaatacagtgccctgttggagatctcgggatcccagtgtcttcttccaacatactcacctaggttgggcctcagcgtaatcctattgagcatgatttttaagtcatcacctctcttcaggacaatagaaggttctcatcactgacccaaccaagggcaagcccctctccatgcatgcatccagcggaacctgaatgtgctcaccacagctcagtgcaggagaccagggtgccacggagggtctgagcttcagcacactgggggtgagcaccaggctgacggacactggcctggggcctgtgggggcccaatacaagtcttcctcaaggctcaccatctggggtgacaggagaaggacatgtgtccaaccagggcctcacgtatgagcaaggggaaggtgggtaggggatacccacgtgatggaatccatgaagaacactgatccaacacagacgcagagcatcattggccctcccggccaccaaaccctggaaagacaaggcaagcaggttactgggctcaggcaagatgcctgggctgttccctactgcaggccctaagcgcacctccactgcttgagccggctcccctgaaaaaccccagggccacactgggaccatggggatgggtcagggcaaccaacctgctcatggccaaccaatgagtctggccctgacaccaggagccaatgcagacctggcagtcgcagagcctgccctgggcgtggtgggtgcccaacctggtgccctctccaagcacacaccggaaatcaaaccctgggggcctccagagccacgtgctttctctggtgggtcctcatcttgcgttacacctcccacacacaaagccaggccacacttggtcaataagaaaccacatggtgtcctctcctttccttgggatcaagaccctaccaccctggaggtgaccccgtggctcagaagcagcctgtgtggcaaattcccagaacaggtccctcgacagcaggacttcccatctcaggaggacacccttttggccactgaatctcaaggaaggggtgaccccagtgggatgtgagctaccccttgtcccaaagaccacaaccctcagggctgcctgcagcaccaccaggcaccagccagagctcagccttgattcaactgcattgaaacagtgtctccccctaccaggctcaaggaggtaccactgagatggcccattactcaacagggtcggtcccattcagggccatggatggggtgcagtcctgaatctccggggcctgtctgcgtgggcccaatcacccaccactgtccagagagggagaactccagcgtgacccccaggttgccccagagcccctgttgcccacctcatgtggcctgggcagtcctcgaggcctgaccagccttccgagtttcagctgggagctgcgctatgttgggctgaaggaaccctctcctgtctggaccaccatcacctttgcaggacttcaagaaatgcgtgctcctaggatcagatttccaaggaagtgaccctactggagaaatgttccctccccggtcgcaccctgagaaaactctagtggcccgaaggctgaccctaaatggccccatgctgcctcattcatggcccatgaccccaacaggatacactcacctatgtcgtgtaaggccatgggccccacctgggcagaagagctcactgaaagacatgggggagaaagcgggctcaggaaggagccaccaacatgccccgcccccggggaaccagagaccagacaccaagcccacacagggagcctgggctgccttacagaggggcacagagacagggtggcaccccctgagaggcccttcagggccttgagttctccaccccaaaatatagtggccctgcctgggatctcaggatcccagcatcctcttccaaagttctcacctaggctgggcctcagcgtaatcctattgagcatgatttttaagtcatcacctctcttcaggaaaatataaggttctcatcatcgacccaacccacgagaccaaccacctcttgcatgcatccagcgggacccggatgtgctcaccacagctagtgcaggagaccagggtgtgaggaagggcctgagcttcagcgcctcaggggctgggcaacaggctgatggcc

SEQ ID NO: 1886276 - DNA, 4001 bp, Homo sapiens; identical to SEQ ID NO: 1886221

SEQ ID NO: 1886277 - DNA, 4001 bp, Homo sapiens; identical to SEQ ID NO: 1886222

SEQ ID NO: 1886278 - DNA, 4001 bp, Homo sapiens; identical to SEQ ID NO: 1886223

SEQ ID NO: 1886279 - DNA, 4001 bp, Homo sapiens; identical to SEQ ID NO: 1886224

SEQ ID NO: 1886280 - DNA, 4001 bp, Homo sapiens; identical to SEQ ID NO: 1886225

SEQ ID NO: 1886281 - DNA, 4001 bp, Homo sapiens
cacaccaatcagcactctgtgtcaagctcagggtttgtgaatgcaccaatagacactctgtatctagctactccggtggggacttggagaacctttgtgtcaacactctgtatctagctaatctagtggggacatggagaacctttgtgtctagctcagggattgtaaacgcaccaatcagcgccctgtcaaaacagatcactcagctctaccaatcagcaggatgtgtgtggggccagataagagaataaaagcaggctgccccagccagcagtggcaacccacttgggtccccttccaaactgtggaagctttgttctttcactctttgcaataaatcttgctactgctcactctttgggtccacactgcttttatgagctgtaacactcaccgcgaaggtctgcagcttcactcctgaagccagcgagaccacaaacccaccagaaggaagaaactccgaacacatccgaacatcagaaggaacaaactccagacatgccaccttaagagctgtaacactcacagcgagggtccgcagcttcattcttgaagtcagtgagaccaagaacccaccaattccggacacactgggaccagcgggccgaacgcaagtcctcctccgggctcaccacctggtgggacaagaggaagacagctgtccacacagggcctcacagctccatgagaagaagtgggaagggggcgctggctcacgcatgctcatcctctatggacccacgtaatgggatccacgtggaacactgacccatcacggatgcagggcacccttggccctccctgccacaaaatcctggaaagacagggcaagcaggtcactgggatcaggcaagatgcctgggctgcaccctactgcaggccccaagagcacctccactgcctgggccagctccactcaaccaccccagggccacaccaggaccacggggcatgggccagggcaaccaagcagctgatggccaaccaaggaggctggtcctgatgccaggagccaatgcagacctggcagtcgcagagcctgcccttgggcatggtgggtgccggccctggtgcccactccaagcaggcactggaaatcaaagcctgggggcctccagagccacatgctttctatggtgagtccccatcaacgactcaaccccagggaaaaaaacaccaccccccatcaggctccaggaggcccactggaatggcgtatttctcaatggacaattccaatcagggccatgggtgaggcaccatccttgaatctccatgacccaaccccaagggcagattcaagcaccacactccatggacaaagagctcccctctaaccccctcagatggcctgagaaatcctccaggcctgacctgagcactgagtctcaacagaacgctgcgctgggtggggctgaaggaactctttcctgcctggaccaccgtcactcctgcagagatcagggaagttatcctccttgggtccaattcccaaaaaagcggccctcctggagaacccatacctctctgatgggaattcaggttggttccctgaggaaaccctcttatcccaaaggctgacccttggtgaccccacatggaccggttcatggcccatgacacaagcaggatccactcacctatgccagtcaatgccgggggcccgcccgggtggaagagctcactgaaagacacaaggggagaatgggggctcaggaaggagccaccaaccggccccaaccccggggaacaggagcccgacaccaagccccctcagggagcctgggctgcctcctggaggagcagagagacagggttggaccttccagatggccctcagggcctgcaggtgtccagcgcaaaatacagtggccattccggggagcccagtgtcctcttccaaaattctcacctaggctgggcctcagcgtaatcctattgagcatgatttttaagtcatcaccgctcttcaggacaatataaggttctcatcattgacccaaccaagggcaacccccaccccaagcatgcatccatgtgctcaccacagctcagtgcaggagaccagggtgccagggagggtccaaactccagagcactgggggattagcaccaggctgatggacactggcctggggcctgtgggggtccaacacaagtcttcctccagactcaccatctgaagggacaggaggaggacatgtgtccaaccagggcctcacatatcagtgcagggagggtgggtagggaatacccatatgatggggatccatgcagaacactgacccaacatgggcacaaggcaccattggccctcctggccaccaaaccttagaaagacagggtaagtgggtcactgggctggggcaagatgcctgggctgcactctactgcaggccctgagagcaccttcacggcctgggccagctcccctgaacaaccccagggccacaccaggaccatggggcatgggccagggcaaccaacctgctcctggccaaccaaggagccttggccaatcaggaaccacatggtgtcctctccttttcttggactcaagaccccactaccctggaggtgaccccatggctcagaagcagcctggatggcaaatttccaggacaggtccctgagcagcaggccttcccaccataggaggctaccctttccaccactggacctcaaggaagggatgacaccagcgggacacaagctgcccccttggcccaaggaagggccggcctgcagtaccaccaggcgcccagtcagagctcagctttgactcaaccttattgaaacagcaacccacccccaacaggctcaaggaggcgccattaagatggcccattactcaacagagttggtcccattcagggccaggggtgggggcattccttgaatctccgccacctgactgtgggcccaatcacccaccactcttcagggagggagaactccagtgtgagccccagggagccccagagcttctgtgtcccccatcatgaagcctgggcagtcctcaaggcctgacgagcccaccaaatttcagctgggagctgctgtatgttgggctgaaggaacgctttcctgcctggaccaccatcacctttgcagggcttcaggaaatgcgtgctcctagggtcagattcccaaggaagtgaccctactggagcaatgttccctccccgggggcacctggagaaaacgctagtggcctgaaggctgaccctcgatgaccccacactgcctcatttatggcccatgaccgcaacaggatacactcacctatactgcttaagggcatgggccccacctgggcagaagagctcaatagaagacacaggggagaacgtgggctcaggaaggagctgccaacatgccctatccccaggaagcagagcctggacaccaagtcaacacagggagcctgggctgcctcacggaggggcacagagacagggctaggacccctgagatgccctttggggcctcaagttcttcagtataaaatacagtggctagtggccctgccggggatcttggcatcccagcgctcccttccaaaattctcacctagcctgggcctcagcgtaatcctattgagcatgatttttaagtcatcacctctcttcaggacaatataaggttctcatcattgacccaatcaaggccctccccatgcatgcatccagcagaacctggatgtgctcaccacagctcagtgcaggagaccagggtgccagggagggtctgagcttcagcgcactgggggatgagcaccaggctgacagacactggcctggggcctgtagggtcccaatacaagtcttcctccaggctcaccatctggggtggtgacaggagaaggacatgtgtccaaccagggcctcacatatgagcgaggggaatgtgggtaggggatacccatgtgatggaatccatgaagaacactgactcatcacagacacagggcaccattggccctgctggccaccaaacct

SEQ ID NO: 1886282 - DNA, 4001 bp, Homo sapiens
cattggtgtcaagagcattttcattaaaggacacctgggtgctgtcaactgtcccagtcacaacaggccaaagagtgcttttcttccatatcatcatctaagggacagatgtagagcaaatgtcaaagggagaactacatctcacctgtgtatatgagtcatgtttgttaattgagcaatattgacaatactaaaaaaatgacccattataaaggttttagtccactggttcacaaaatataataaggacaaatcatacaggtcacttggctttggagaagcaattcagtggttttctgcagaaacaaaacatcccattaatcatcgctttatatattcaaggaagctgtatcagtaacaattagcatggtttactgtatatgaactttcataaaatacagacactctggaagccacttgcatctcaggatctagaaatcagttatcagggcacatggagttgtattcatttacatgcatcttggccaaaatgcccagttttcatattgtgaaccctcatcaaatgacccacaaacatgacaaaatggaataacatgaaaatattataataggtagaggtgaaggccaggcacgggggctcaagcctgtaatcccagcactttgggaggcagaggtgggcagatcacaaggtcaggagttcaagaacagcctgaccaacatggtgaaaccatgtctctactaaaattacaaaaaaattagccaggaatggtagcacgtgcctgtaatcccagctactcaggaggctgaggcaggagaatcgcttgaacctgggaggcagaggttgcaatgagctgagatcgcaccactgtactctagcctgggcaacagagcgagactccgtctcaaaaaaaaaaaaaaaaaaggtagaggttaatctatgtctactcttatatgtagatgaaaagaatattacattgtttcatcattatttcagtaaaatttcaataaaaagacttgttttaatcatgaggaagccataaagaatgtcaagtcacttactgaggagtagaatgcccactgggacacatatgttgccgctttggtgaacctactcacctcaaaggccctttcaggaccaactggaagcattcacagcctgtattttcattatactgaaaatgatgaagtcacatgatatttggggtttataattcagatactagtttacccatcaacttattcagttctctgtttcatgaggaaagcaaattactgatgttacatatttgtgtccactggcatgatatttctgttatgaaaagtttaccagtgagtaaactggccataccattacaatatcttaacacttttaaggtaaaacaagaaaaaatttgatgtagttgtatatatgtacccaagtgaacactgcatgttagattgggcattattaatcaagtgaaacagaaaataaattaatatgttctcaactttcaatcccaccaaattcaggtaaaaagtaaagattttgtcatagcatcatatcagataggtcagtcactcactgagaagaaaatctatactgagatccagattttttaaatgagtaaacataatagccttaagagagaatcatcactagcctagtgatctattttgaatgtatgtgtgacgaaggcagtcactctgctttcattaatgggatgattgcatctcttgcagcactgaaagatacaatgaaagatacaatgagagaagaagaaccaaggaatgagtcctaaatgtctcatactattaggaattataaataatggaaacaatgcttaaaggatgaaaatgtgttgtttacccaaaaatgcatacacagggtttggcaaagcaagttcgccacaatggtgtctttttctcaagctccaaaattattcacctaaaagaaacaaggatttctaacttcttgtcttaggtttgtcacttatgttaagtctccacataatcctattgaacataatttttatgtcatcttccctgtcgaagacaatataacatctccatattgccccaagccagggggttaatctatggagtcatctccccacaaaggcagaatcatagatattagcatgcttatcagagatagattaatgttctatggtggattggagttgctacatattcagtgctggatatctggatggtataaattgccctgggtgcagcaggccaagtggtgctcttcctttgctctcacctaagaagagagtaggccaggtgtcaaaaaggaaaacattgtttcccatagttatatggctcatgcatggttttccttaatggagcaaaatggtcagtaccccagaaatagcccattatgtagtctatagaccacagattcaccaaacacaaggacaacatatacaggtttcttgactttggagaatcactggtgtggtatcatgcagaactgggatgatgccactgatcatcccttctctatgtaattgaggtggccatatcagaagcaatcgccatggtcacttgccatttcacactcataacatgaaacttctaaagccacataaaactcagcttccagaaatcagatatcaggccactcagaattgtattcatattttattatttcttttacttgcttactttgaatttaatttgaattttccccctagctttccaatgggaaggattatttatttagatctttgttctttttaacatacattcagtggtataaatttcccagtaggcactgcctttgttgcgttcctaaatttttgataagttgtgctttcaattccatttagtttgaaatattttaaaaatttatcttgagacttctgtgaccttcagttatttcagtctgttgtttaacctccaagtattttcatgtttttcagctatcttttttagtgatttttgtttactttcattccattgtagtctgagaacatactttgtatgatttctattcttttaaatttgttgaggtgcattttctagcccagaatgtggtctattctgctgaatgtttcatgtgtgtgtgagaaaatgtgtcatctgctgttgttgggtaaagtggtccatagatgtcagttacatatagttgactgaatcaagtttttgatcatgattgatcatgttatgcccttactgattttctgcttgctaaacctgtccatttctgatagagggatgccaatgcctccaactctaagagtgaatttatctatttctctatgcagttctatcagatttagcttcatgtactttgatgatctgctgttcagtgcgtacacattaaggattgttatgtcttcttagaaaactgatccctttatcattaaggaatgtcccttttgatctctgataatattccttgttctaaagtcggttgtgtctgaaattaatatggctatttcactttattttgattaatgttagcatgggatatctttctctattcctttactgtgaatatatttgtgcctttataaagtagatttacttacttttttctatagagatgaggtcttattctgtcaaccaggctagagtgcagtggcatgatcatagctcactgtagtcccaaaatcctgggctcaggtgacactccgccttggcctcctaaggactgcaggtgcacaccaccatgcccagctatttaaagtgcatttctcatagacaacatatatttgggtcttgttcttaatccactgacaatctctgtcttttaagcgatgtttaaagtgattattgatatacttagattagtatactcagtatttgtgattgttttctatttatatcaaccttgtaatttgttacttttttggtattctactctttttctcctctccctgattttaattgagcattgtataagattctgctttttcatacaaaaaattagccaggcatggtggtgcacacctgtaatcccagctattcgggaggctgagcccggagaattgcttgaacctgggaggtggaggttgtggtgagctgaaatcgtgccattgcactccagcccg

SEQ ID NO: 1886283 - DNA, 4001 bp, Homo sapiens
atgacttctcacaccttcttgcaaggattggcactattttgagcctcagcttaattctattgagcatgatttttacattattacgtctcctgaagatactctttatacatatatttacgttgtcttgtaaacccttaccagaatagcatccttaaacaacggttgcagggacagaggatcagttaaattcactgcagcatgcctgtgcggtagcacttgcctctgtgacaacaccagagggtgctcttctcagcagtctttatctacaggcataggaatgggaccatagttcaaaatcagacataaattgttcatgtgtatatggcttacacaggctatttcttagtggacagatacggtccgtactaccacaaaaagacatattactaaggctctagaccattgactcatcaacatcataaggacaaggtatgccaggtttttgacactgagtaatctgcgatattatcatatatcatactatagagatggtaaacatgactgaacacattccaacattattttaatataatctcagtaaaaagtgaacattttttgaaagaattccatcaagtaggccagtcactcattgaaaataaaaacctataatgagatccatgattctaaatttgtgaacccagtcatttcaaagtccatattaggaataagtgtcatcatttctaacatgtgctttcattattctgaaaatagtggggtcacatgtgtgaaaggaaaataaacttgggaccccaatttactacgccaagagaaaaaaaaaataagctgaaagctgagtcatgcaagaatttccttttgatcttaagcagatagctacagattaaaggttaaagatctccacaggtagcttctctatgttcaccttatcttatgtaaagtgctgatttactgagcatgagatgaatacattattgactatacccctacctgctccttttgtcttggaacatacggattatcataccctcccttttccccctccagcccacttttcccctttaaacactgaagccctcaaaatcatctttggagaaagacatagaccccagacggtttctgtgattttgggtttatttcttctgagcatgtgcttaaccttggcaaaatccacttctaaataaacttctaaatctcagatactttttggtttacacatgataggaactgaaatttgagtatcaatttggtgatcaaattactaaatatttaagttttataggcaaagtacatactgatcctcacattctcctccccattaccacggtctcttccattaccatggtctcacagttacagaaagttcatcagtaactcaaaacagtgaaacactgttagagcccccacaataataatataaaaaatttttgtctagtcatgtatctacagccaaatgtatattaaatattggactaggtaacagtgaatttaaaaaatcttcaatattgattgtatgaagttcagataaaaagtaaagattttgtcataaggattatatcataaagcaaaactcatattgaagttcagattacctgaaggtgtaaaactaattcccttaggtgggagtcttccatagctcaatgttctagatagaatatacacgtcggtaaaggaagctactgatcttttataatagaatggcacatctcttggcagcatgtcttactgaaatacacaataagagaaaaagccaaagaatgagacctgaatataccttactattagaaattaaaggtcactgaagcaaagcttataggctgagaattttttgttcatttataggtgcactgatacagttgggcaaacaagttacccataaagattttgttatttcaagttcaaaataaaattccccttgaagggaaataagaagtcactattatctgtttcagcattttcatctaggtaggctgagcctcagcataatcctattgagtgtaattttaaggcattatttctcaccaaatcagaagatttcattattgatgaaagacatagtactccccatgcacacttgagaaggcttcctgaagctgtgatgctaggatgcattggtgtcaagagcattttcattaaaggacacctgggtgctgtcaactgtcccagtcacaacaggccaaagagtgcttttcttccatatcatcatctaagggacagatgtagagcaaatgtcaaagggagaactacatctcacctgtgtatatgagtcatgtttgttaattgagcaatattgacaatactaaaaaaatgacccattataaaggttttagtccactggttcacaaaatataataaggacaaatcatacaggtcacttggctttggagaagcaattcagtggttttctgcagaaacaaaacatcccattaatcatcgctttatatattcaaggaagctgtatcagtaacaattagcatggtttactgtatatgaactttcataaaatacagacactctggaagccacttgcatctcaggatctagaaatcagttatcagggcacatggagttgtattcatttacatgcatcttggccaaaatgcccagttttcatattgtgaaccctcatcaaatgacccacaaacatgacaaaatggaataacatgaaaatattataataggtagaggtgaaggccaggcacgggggctcaagcctgtaatcccagcactttgggaggcagaggtgggcagatcacaaggtcaggagttcaagaacagcctgaccaacatggtgaaaccatgtctctactaaaattacaaaaaaattagccaggaatggtagcacgtgcctgtaatcccagctactcaggaggctgaggcaggagaatcgcttgaacctgggaggcagaggttgcaatgagctgagatcgcaccactgtactctagcctgggcaacagagcgagactccgtctcaaaaaaaaaaaaaaaaaaggtagaggttaatctatgtctactcttatatgtagatgaaaagaatattacattgtttcatcattatttcagtaaaatttcaataaaaagacttgttttaatcatgaggaagccataaagaatgtcaagtcacttactgaggagtagaatgcccactgggacacatatgttgccgctttggtgaacctactcacctcaaaggccctttcaggaccaactggaagcattcacagcctgtattttcattatactgaaaatgatgaagtcacatgatatttggggtttataattcagatactagtttacccatcaacttattcagttctctgtttcatgaggaaagcaaattactgatgttacatatttgtgtccactggcatgatatttctgttatgaaaagtttaccagtgagtaaactggccataccattacaatatcttaacacttttaaggtaaaacaagaaaaaatttgatgtagttgtatatatgtacccaagtgaacactgcatgttagattgggcattattaatcaagtgaaacagaaaataaattaatatgttctcaactttcaatcccaccaaattcaggtaaaaagtaaagattttgtcatagcatcatatcagataggtcagtcactcactgagaagaaaatctatactgagatccagattttttaaatgagtaaacataatagccttaagagagaatcatcactagcctagtgatctattttgaatgtatgtgtgacgaaggcagtcactctgctttcattaatgggatgattgcatctcttgcagcactgaaagatacaatgaaagatacaatgagagaagaagaaccaaggaatgagtcctaaatgtctcatactattaggaattataaataatggaaacaatgcttaaaggatgaaaatgtgttgtttacccaaaaatgcatacacagggtttggcaaagcaagttcgccacaatggtgtctttttctcaagctccaaaattattcacctaaaagaaacaaggatttctaacttcttgtcttaggtttgtcacttatgtt

SEQ ID NO: 1886284 - DNA, 4001 bp, Homo sapiens
actcacatttttatcccaattgcaaggacccttaagtcataaagattcattaatgatcaaaacatatcctagcactgttaaaatattatactaacattacagaaaattttgtctgtatatttagaccacgataactgtagcgcattgagcaaaattccaatgtatcatatttctcaaccctgaaaacaatcaatcgtagggcaaaagtaaggattttctcatgaggattgcatcacatgtgtcagtcaatcattgagaagaaaaccctatcgtgatattcatgttgtctgaatgaataaatctaattattatagagctcagtcttcactagttcaattatctatttgaaatttttcagtcagcaaaggcagcctctcacctccactcaatagaatagtgccagtaggacttactaaatcatccaatgagagaaaaagagcaagggtcttagtgccaaatatccaagaaaattaggaattgtaggaaacttaaatagcacttaaagaatcagaatttatagtttacttagaagcacacagatagaagcgtgcaaaacaagtttcgcaataagattccattgccagaatcccaaaataaagtccccaatggaaggaaactaagaaatccaaacttcttgtctcacaattgttacctaggctgggcctcagcgtaatccaactgaacttaatttttacgtcatcatttctcttcaaggtaacatctcatcattgacccagcccatggcactcatgtgcatatgcacacttggatcaaatatgcttaccagagatggtttccttaaacactgatggtaaagtggactggatgccacattttcagtgccaggcagttgagtggtgtcagtttctccctgaacaacagggtaaagggttttcttcctccacagtcttttctgtaaaagacaagagtaggctatagtcaaagggtgggattacatctcttatatgtgcatgactcctaattgctgttcctaatttctacaagactgagatgtgtgatactccaaatatgacccgttacttaagctgtggtagaccactgattccccgtgtacagtaagggccaagcacataggtatcatgtcttttgatgacctggtaagggattatttccctgcagaaataaaagcttcttatcgtcttcatatcagtaacaactggcatcatacatagtgtatgcatttctttataatgaatctaatgacacctgagtgagactcaggataaggaaatgagatttcagactacctgtattgtattcaatttcaatcaagggtaacctatagctgaatctcaagccattccctaaaattgccaaagtctttcagttgtgagtagtgcctcaatgatccacaaacatcataacaccatacacagcaaccaaaaaataaaataatagaaaaggattgtctatttgtgcaatcactaaagagttgattgcaatgaattactaaatgtcacatctttaaatcaaagtacgttcaggcaaaaaaaaaaaaaaaaaaaaaaggagttttaatgaggacctcattagatcagtcactcattggaaagaatagatcattgctcactaattttgtatgaacaggtaaatgtaatcattttgaaggccaatgtttaatattcaaatggtccacttgaaattttttaattacgaaagacagaactcatatatataatccgtgtaatgacacacctcttgctggatgaacattctgaagcacaccatgaggaaaaaataaaccaagatattctctctaataatgtatgagtattaagaataaagacaagataaaagaattttaaaagttcctttagaagtaggtagaggcaaatgatgtaagattcccccaagggtttcttcctaccaagttcaaaatggaataacccataccccccaaatctaatgacttctcacaccttcttgcaaggattggcactattttgagcctcagcttaattctattgagcatgatttttacattattacgtctcctgaagatactctttatacatatatttacgttgtcttgtaaacccttaccagaatagcatccttaaacaacggttgcagggacagaggatcagttaaattcactgcagcatgcctgtgcggtagcacttgcctctgtgacaacaccagagggtgctcttctcagcagtctttatctacaggcataggaatgggaccatagttcaaaatcagacataaattgttcatgtgtatatggcttacacaggctatttcttagtggacagatacggtccgtactaccacaaaaagacatattactaaggctctagaccattgactcatcaacatcataaggacaaggtatgccaggtttttgacactgagtaatctgcgatattatcatatatcatactatagagatggtaaacatgactgaacacattccaacattattttaatataatctcagtaaaaagtgaacattttttgaaagaattccatcaagtaggccagtcactcattgaaaataaaaacctataatgagatccatgattctaaatttgtgaacccagtcatttcaaagtccatattaggaataagtgtcatcatttctaacatgtgctttcattattctgaaaatagtggggtcacatgtgtgaaaggaaaataaacttgggaccccaatttactacgccaagagaaaaaaaaaataagctgaaagctgagtcatgcaagaatttccttttgatcttaagcagatagctacagattaaaggttaaagatctccacaggtagcttctctatgttcaccttatcttatgtaaagtgctgatttactgagcatgagatgaatacattattgactatacccctacctgctccttttgtcttggaacatacggattatcataccctcccttttccccctccagcccacttttcccctttaaacactgaagccctcaaaatcatctttggagaaagacatagaccccagacggtttctgtgattttgggtttatttcttctgagcatgtgcttaaccttggcaaaatccacttctaaataaacttctaaatctcagatactttttggtttacacatgataggaactgaaatttgagtatcaatttggtgatcaaattactaaatatttaagttttataggcaaagtacatactgatcctcacattctcctccccattaccacggtctcttccattaccatggtctcacagttacagaaagttcatcagtaactcaaaacagtgaaacactgttagagcccccacaataataatataaaaaatttttgtctagtcatgtatctacagccaaatgtatattaaatattggactaggtaacagtgaatttaaaaaatcttcaatattgattgtatgaagttcagataaaaagtaaagattttgtcataaggattatatcataaagcaaaactcatattgaagttcagattacctgaaggtgtaaaactaattcccttaggtgggagtcttccatagctcaatgttctagatagaatatacacgtcggtaaaggaagctactgatcttttataatagaatggcacatctcttggcagcatgtcttactgaaatacacaataagagaaaaagccaaagaatgagacctgaatataccttactattagaaattaaaggtcactgaagcaaagcttataggctgagaattttttgttcatttataggtgcactgatacagttgggcaaacaagttacccataaagattttgttatttcaagttcaaaataaaattccccttgaagggaaataagaagtcactattatctgtttcagcattttcatctaggtaggctgagcctcagcataatcctattgagtgtaattttaaggcattatttctcaccaaatcagaagatttcattattgatgaaagacatagtactccccatgcacacttgagaaggcttcctgaagctgtgatgctaggatgcattggtgtca

SEQ ID NO: 1886285 - DNA, 4001 bp, Homo sapiens
ttttccactaaatcaggaggaaagaattgataagtggtcttctagaagctaatagaaacaggtgagagaaactatatcccaaatatatttctttatcttaagctcaaactagaataccccagaaaagataaggaccagccagtctagttttcatgtcatctcatgtcctcaagacaacataaggtcttattgttgaaacaagccatggaactctacaatcacatattcactttgtctgaaaatacctaccagagtggcatccttaaatcctggttgaaagttcacaggagaccaaacagatatctgggtgtgtcagctgtgctggtgtcaacaagccaaagagtactcttcctcagtcatccttatctaaggggaggaggataagacagtagatcaagatgacaaatattacctcctgtatgtatggcttatgcatgctatttcttaatgaagagatatgattagtactggaaaaactgatccattagataggctataggccatttattcatcaaacagaataaagactaactatacaggtctcttgaatttggagaatatctcaggtagtttaatgcagaaataagaccttcaattgatcagtcttgtttacatattcaaggaagccatatcaataacaattggcattaacatgttgcttgcactccatcatataatgatcatactggagccaggtgaaactcagattttagaaaacagacatcatactactcataattgtatttaatttaatgaatgatgggatatgtatatatcagaattagaacatgtagccataatgccatagtctttatgttgtgagtcatcatcaataaaccacaaacattgtaaaaacatagcaacctgacatatataaattagaagttaatatgttaacttctatatttagaccaaatgagcatcacatcttagagatgataccaataatcacaaaacttgtcaacattatatcgatgcaattttagtaaaaaataaagtttccctcttgtagatcctggcaagtatgctagtcactcattgagaagaagaatgcataacgataatcatgtggcctgaaggaacggccctgactgtcattcatataagtgtccataaaggtcttatttaccattggcattattcacagcacacactttcatcataatgaaaacgaagccaaaggtacttgagaaagaaaagtcaggcaccagattgctcatcaatttatctaatttcaagtttcatgggcaaacacatattattgaaactcacatttttatcccaattgcaaggacccttaagtcataaagattcattaatgatcaaaacatatcctagcactgttaaaatattatactaacattacagaaaattttgtctgtatatttagaccacgataactgtagcgcattgagcaaaattccaatgtatcatatttctcaaccctgaaaacaatcaatcgtagggcaaaagtaaggattttctcatgaggattgcatcacatgtgtcagtcaatcattgagaagaaaaccctatcgtgatattcatgttgtctgaatgaataaatctaattattatagagctcagtcttcactagttcaattatctatttgaaatttttcagtcagcaaaggcagcctctcacctccactcaatagaatagtgccagtaggacttactaaatcatccaatgagagaaaaagagcaagggtcttagtgccaaatatccaagaaaattaggaattgtaggaaacttaaatagcacttaaagaatcagaatttatagtttacttagaagcacacagatagaagcgtgcaaaacaagtttcgcaataagattccattgccagaatcccaaaataaagtccccaatggaaggaaactaagaaatccaaacttcttgtctcacaattgttacctaggctgggcctcagcgtaatccaactgaacttaatttttacgtcatcatttctcttcaaggtaacatctcatcattgacccagcccatggcactcatgtgcatatgcacacttggatcaaatatgcttaccagagatggtttccttaaacactgatggtaaagtggactggatgccacattttcagtgccaggcagttgagtggtgtcagtttctccctgaacaacagggtaaagggttttcttcctccacagtcttttctgtaaaagacaagagtaggctatagtcaaagggtgggattacatctcttatatgtgcatgactcctaattgctgttcctaatttctacaagactgagatgtgtgatactccaaatatgacccgttacttaagctgtggtagaccactgattccccgtgtacagtaagggccaagcacataggtatcatgtcttttgatgacctggtaagggattatttccctgcagaaataaaagcttcttatcgtcttcatatcagtaacaactggcatcatacatagtgtatgcatttctttataatgaatctaatgacacctgagtgagactcaggataaggaaatgagatttcagactacctgtattgtattcaatttcaatcaagggtaacctatagctgaatctcaagccattccctaaaattgccaaagtctttcagttgtgagtagtgcctcaatgatccacaaacatcataacaccatacacagcaaccaaaaaataaaataatagaaaaggattgtctatttgtgcaatcactaaagagttgattgcaatgaattactaaatgtcacatctttaaatcaaagtacgttcaggcaaaaaaaaaaaaaaaaaaaaaaggagttttaatgaggacctcattagatcagtcactcattggaaagaatagatcattgctcactaattttgtatgaacaggtaaatgtaatcattttgaaggccaatgtttaatattcaaatggtccacttgaaattttttaattacgaaagacagaactcatatatataatccgtgtaatgacacacctcttgctggatgaacattctgaagcacaccatgaggaaaaaataaaccaagatattctctctaataatgtatgagtattaagaataaagacaagataaaagaattttaaaagttcctttagaagtaggtagaggcaaatgatgtaagattcccccaagggtttcttcctaccaagttcaaaatggaataacccataccccccaaatctaatgacttctcacaccttcttgcaaggattggcactattttgagcctcagcttaattctattgagcatgatttttacattattacgtctcctgaagatactctttatacatatatttacgttgtcttgtaaacccttaccagaatagcatccttaaacaacggttgcagggacagaggatcagttaaattcactgcagcatgcctgtgcggtagcacttgcctctgtgacaacaccagagggtgctcttctcagcagtctttatctacaggcataggaatgggaccatagttcaaaatcagacataaattgttcatgtgtatatggcttacacaggctatttcttagtggacagatacggtccgtactaccacaaaaagacatattactaaggctctagaccattgactcatcaacatcataaggacaaggtatgccaggtttttgacactgagtaatctgcgatattatcatatatcatactatagagatggtaaacatgactgaacacattccaacattattttaatataatctcagtaaaaagtgaacattttttgaaagaattccatcaagtaggccagtcactcattgaaaataaaaacctataatgagatccatgattctaaatttgtgaacccagtcatttcaaagtccatattaggaataagtgtcatcatttctaacatgtgctttcattattctgaaaatagtggggtcacatgtgtgaaaggaaaataaacttgggaccccaatttactacgccaagagaaaaaaaaaataagctgaaagctgagtcatgcaagaattt

SEQ ID NO: 1886286 - DNA, 4001 bp, Homo sapiens
ctgcacagggaacctgggctgcctcccagaggagcccagagccagggttgtgccccccggagatgccgttcagagcctcagggtctcctgcctaaaatatactggccatgctggggaacttgggatcccagcatcctcttccaaaattctcacctaggctgggcctcagcgtaatcctattgagcatgatttttaagtcatcacctctcttcagaacaatataaggttctcatcattgacccgacccagtgcatccccctccctgcacacgtatccagaggaacccagatgtgctcaccacagctcagtgcaggagaccaggatgccaggaagggcctgagcttcagctcaccaggtgttgagcacatggctgagagacactggcctggggccagcggacccaatgcacgtcttcctctggggtcaccatctggaggggtgggggacacgtatagaaatacggcctcacgcctccatgcaggaaagtgggcagggggtgctggctcacacatgctgtccctccatggactcaagagatgggatccatgtaaacagtaacgatcatgaatgtggggaacccttggccctccttgccacagctccctcacatgactctatgccacaatgggaccactgggcagggccaggaccaccaacaagctcagagcaaaccaagtaggctgacctgaatgctacgtgccactacagaccccctgtaaaagctcacaccagaaatcaaatcctggagccccagggccacatgccttctctgatgggtccccattcgtgcaccgcacacctccaaatgcagagccaggccatgctcagtcaatcagggaacacatgatgtcttcccctttccttcggctcaagaccccgccactttggaggtgaacccatggcttagaagcagcctgggcaacaaattgccaggacaggacccttgacagtgggacttctaccacaggatgccatccttctggccactccactttggggaggggtgacctttagcgggacacagactgcacccttggcccaaagcccaaattcccagggccagcctgcagcaccaccaggtgaaggccagagctcaggcttgacccaaccccactaaggtcacaccacccccacaaggctcaaggatgcaccaccgggatggcccattgctctacaggttcggcccatgctgggccatgggttgggcccaatccttgaatcttcacggcctgactccataagtccgatcacccacaccctgcccctctgcaagcctcggggacagagagcaccctcataacacccgtggcccctggagaccctgtggaccccctcatgtggcctgggaagtcctccaggcctgacttgtgcactgagtctcagctaggatgtgcactgcattgagttgaaggaagcccttcctgcttggacgtccatcatctctgcacggcttcagggaaggcatccttcttgggaccgacttccaaggaagctgtcctcctggagaaaccatccgtccctggtgggtttcagatgggctccctgaggaatccctcgtggcctgaagggtgactctcagtgacccaaagcgacctggctcatggtccacgaccccagcaggatccacttacctatcccacttaaggccaggggtccccctgggcagaagagctcgctgaaagacacaggggagaatgggggctcaggaaggagcctccaatgtgcctcaaccccagggaactggagggctgacaccaagcccgcaagggagcctgggctgcctcaaggaggagcgcagagatggggtcgggcacccctaagatgcccttcagggcctccaggtctccagcccaaaatacagtggccctgccagagaccttgggatctcagcatcctcttccaaaattctcaccaaggctgggcctcagcgtaatcctattgagcatgatttttaagtcatcacctctcttcaggacaatataaggttctcatcatcgatccaacccagggcaccctcctccccatgcatgcatccagtgggacctggatgggctcaccacagcttagggcaggaggccagggcaccaggaagggcttgagctcaagtgcaccaagggctgggcacctggatgacaaccactggcctggggccagcggtcccaaagcaagtcttcttccacagtcaccatctggggggacaggaggaggacatgtgtccaaccatgggctcacgcctccatacagggaatggggttgggggtgccagctcacacatgctctctctccgtggacccatgtgatgggatccatgggaaacactgatgtgtcatagatcagcggaaccctttgctctcccagccactgaaccatggaaggacagggcaggtgggttcctgggctcaggcaagacacctgggctgtgccctactgcaggccccttgagcacctccattgcccatgctagctcccctgcatgaccccgggtggtatctggatccttgggtaggggccacggacaccaaagagctcacagcaaaccaaggaccctggcccggacaccacgtgctgttgcctacctggcagttgcacagtctgccctgtgcatggagggcacccaccctcctttcctcaaggtgcactggaaatcgcagcctggggctccagggccacaagctttctctggtgtgtcccaatccatgccccacacaacacctcccacacacacagcagggccacactcagccaaccgggagacatatggtatcttctcctttctttgggcctaagacccgcccctgccccccaacccgctggagttgtcctaatggctgagaagcagcctggactgcaaatttccaggaaaggtccttccactgcgggccttcccaactcaggaggccattactgccactcgcccacaatgaaggggtgacccccagcgggacatgggctgcagccttggcccagagcccacgagtcccaggagtggattgcaccaccatcaggcactggccagagctagtcttgacccaacctcagagaaacagcgccgccccacaaatggctcaaagaggtgccactgggagggcccactgcttatagggtcagtcccattgagggtcctgggtttgctgcaatccatgaatctccatggcctgaccccatggaccgaatcacccacccttctccagggttggagagcccccgtgagatgcccttggctccccggagcccttgttgcccccctcatgtggcctggccatgttagaggcctgacccaagcaccaagtctgagctgagcactgccctgcgtggggctgaggaaaccctttcctgcctggacaactgccacccctgcggggcttcagagaaggcctcctccttatgtctgattcccaaggaagctgccctcctggagaacacatccccagttgggattcagatcagctcctgaggaaacccaggtggcccgagggctgacccttggggaccccacgcagcttggctcatggcccatgacaccagcagtctccactcacctatgctcgtcaatcccaggggtctgctggggggaagagctcactgaaagacacagaggataatggggctcacggaggagccgccaacgtgtcccaccccagggaagctgagcgtggacaccaagcccacacagaaagtctggtgtgcctaatagaggagcacagacaggattgggcccctccatgaggtgcccttcagggcctcgaggtatccagcctaaaatacagcagccctgctggggacctcgggattctagtgtccccttccaaaattctcacctaggctgggcctcagcgtaatcctattgagcatgatttttaagtcatcacctctcttcagaacaatataaagttctcatcatcgacccaacccagggcacccccctccctgcctaggcatccagtggcacccggatgggctcacccaagctcaacgcaggagaccaaggtgacaggaagggc

SEQ ID NO: 1886287 - DNA, 4001 bp, Homo sapiens
aaaattctcacctaggctgggcctcagcgtaatcctattgagcatgatttttaagtcatcacctctcttcagacaatataaggttctcatcatcgacccaacccagggcaccccccaccacacacacccatccagtgggacccggatgtgctcaccacagctcagtgcaggagaccagagcaccaggaagggcctgagcttcagtgcaccaaggctgggcacctggatgacaaccactggcctggggccagcaacccaatggcaagtcttcctccacagacaccatctggggggacaggaggaagacatgtgtccaaccaggggctcagacctctatacagggaagggggtggggggtgtcagctcacgcttgctctctctctatggacccatgtgatgagatccatgtgaaacactgatgtgtctcagacgtgggggaccctttgccctcccagccaccgaaccatggaaggacagggccggcaggatcctgggctcaggcaagacccccgggctgtgccctactgcaggcctcccttgcccacgctggctcccctcatgaccccaagcagcactgggacccctgggcaggcgtcaaggacaccaaccagctcacagcgaaccaaggacgctggcccggatgccacgcaccactgccaacttggcagctgcacagcctgccctgtgcatggagggtgagcacccagtccccttcccaaggtgcactggaaattgcagcttggggttccagtgccacgagctttctctggtgggtcccaatccatgccccacacaacacctcccacacacagagtggagccatactcaaccaatcgggagacatatggtgtcttctcctttccttgggcccaagaccccgccaccccggagatgacctcatggctcagaagcagtctggactgcaaatttccaggaaagttccttccacagcgggccttcctacctcaggaggatacccttcccaccactccctcataaggaaggggtgatccccagtaggacacgggctgcacccttggcccaaagcccacgagtcccaggactggactgcaccaccatcaggcactggccggagctagtcttgacccaacctcagagaaacagcgccacccaccacatggctcaaagaggtgccactgggatggcccattgcttaatagggtcggtcccattgagggatatgggtttggtgcaatccttgaagctccatgacccgacccaatgggccaaattgcccacccttctccagggttggagagcccccatgagatgtctgtggtgccctggagcccttgtggcccccgtcatgtggcctggccatcctagaggcctgacctgagcaccaagtctgagctgagcactgcccagctccactgtcctgtgtggagctgaggaaaccctttcctgcctggaccaccaccacccctgcagggctccagagaaggcctcctccttgtgtcagattcccaaggaagctgccctcctggagaacacatccccagtcaggattcagatcagctcctgaggaaacccaggtgacccgagggctgacccttggggaccccacgcagcttggctcacagcccatgacacgagcagtatccactcacctttgccagtcaatcccagggggcctgctggggggaagagctcactgaaagacacagaggagaatgcgactcaggaaggagccaccaatgtgtcccacccccggggaagctgagtgcagacaccaagcccacacaggaagcctggtgtgcctaatggaggagcacagactgggttgggtacccctccatgatatgcccttcagggcctcgaggtctcccgcctaaaatacagtggtcctgccggggaccttgtgattcccagcatcctctttcaaaattctcacctaagttgggcctcagcgtaatcctattgagcatgatttttaagtcatcacctctcttcaggacaatataaggttctcatcatcgacccaacccaggacacccccatccccactcacacatccagagggacctggatggactcaccacacctcagtgcaggataccaggatgacaggaaggacctgagctttagcgcacgggaggctgagcacgtggctggcagacactggtccggggccaaagggcctaacgcaattcttcctctgtgctcaccatctggagggacggggaaaggtgtccaaatagggccttaagattccatgcaggaaagcggggaggggctgctggctacacatgctctacatccgtggactcatgtgatgggatccatgtgaaacgaggacagttatggacctggggaacccttgtatctccccaccaccaaaccctggaaggacaggacaggcgagtaactaggctcaggcaagatgccgaggctgtgccctaccgcaggcccctggagcacctccactgtccaagccggcttccctgcacttcctgggctgcattgtgacccctgggtaggagccagggccaccaaccagctaaggccaaccaaggaagcttgctctgaagctaggcgccactgtagacctggcagacgcacagcctgcccctgtgcagggagggtgcccagactccctctccaagcacgcaccaaaaatcacagcctggggccaccttcatgtggcttgggcagtcctcaaggccagaccctagcaccaagtctcagctgggagctgacctgcatgggactaatggaaccctttcctgcctggaccaatgtcactcctgtagcacttcagggaaggtgtcctccttgggtcagattcccaaggaggcggcccttctggagaaccaatccctcaccagtggggattcaggttgtctccctgaggaatccctcctgtcctgatagctgaccctcagtgaccccacgtggcctggtccatggcccatgaccccagtaggatccactgacctatgctgctcaaggccaggggtcctcctgggcaaacgagttcactgaaagacacaaggggagaacaggggctcagggatgagccacccacatgcaccaccaaggggaatctgagcaccgacacgaagctcgcacagggagcctggactgcctcatggaggaacgtagagacaggtttgggccccctccagatgcccttcaaggactccaggtctccagcccaaaatacagtggccctgtcagggacctagggatcccagcgtcctcttccaaaattctcacctaggctgggcctcagcgtaatcctattgagcatgatttttaagtcatcatctctcttcagaacaatgtaaggttctcatcattgacccaacccagggaacccccctccctgcttaggcatccagtggcaaccggatgggctcacccaagctcaatgcaggagaccagggcaacaggaagggcctgagcttcagtgcaacaggggctaggcacccggctgatggccactggcccggggacagtgggcccaatgcaagtcctcctctggggtcaccatctcgaggaacaggaagaggacaggtgccaaatgcaacctcacccttccatgctggcagaaggtggggtgtgccagctcagggatgctcgccttccatggacccatgtgatgagatccatgtggaatactggcccatcacagacgtgggccacctgatgctctctccgccactgaaccctgaaaggacaggacaggcaggtcactgggctcaggctagaagccagggctgctccctactgcagaccacacgagcacctccactacacatgccagctcccctacatgacaccagggtcaccccaggactactgggcacaggccagggccagcaaccagttcatggtcaaccaaggaggctggcccgtatgcctgatgctgctgcacagctggcagtcacatagccagtccctgtgcatggtaggcacccacccatatgccatatccaagcacatactggaaaccacaacctggggccccagggcca

SEQ ID NO: 1886288 - DNA, 4001 bp, Homo sapiens
aaactctcacctagactgggcctcagcgtaatcctattgagcatgatttttaagtcatcacctctcttcaggataatataaggttctcatcatcgacccaactcagggcacgtccttcccggcgcatgcatccagcaggacccggatgtgctcatcacagctcggtgcagcacaccagggtgccaggaagtgcccaatcttcagtgcaccaggggctcagcacctagctgatggatgctggcctgggaccattgggaccaattcaagtcttcctccaggctcaatacctggggaaacaggagtaggacaggcgtccacacacaacctcacccctccatggaggcagaaggtggggtgtggcggctcagggatgcttgccgtccatggatccacgtgatgggatccatgcagaacactggcttgtcacagacacaagtcaccctgtactctcaaccactgaaccctggaaggacagggcaggtgggtcactgggctcgggcaagaagacctggctgtgtcctaccgcaggtcccacgagcacctccactgcccatgccggctccctcgcatgaccccaggattacgacagagctactgggcacaggccagggccaccaaccagttcatggccaaccaaggaggctggcccggatgccagatgccgctgcaaagctggcagtcacatagcctgccccggtgcattgtgggcacccatccaggtgccctatcccagcatgaactggaaatcacaacctggagtcccagggccacatgctttctctggtgggtccccatccatgccccacacacctcctaaacacagagcagggccacacttggctaatcaggggacacatggtgacttctttcctttggcccaatacccactatcctggaggtgaccctatggctcagaagcagtgtgggtggcatattccagggacaagaccctcaacagcaggccttccacctcaggaggccacccttcctcacacttgccaatggggaaggggtgacttccagccacagggaaggggagatccccagcaggacgtggactgatcccttggcctaaagctaacaagtccgtggctggactgtagcaccaccaggcactggccagagctcagccttgaccaaaacctagggaaacagcaacaccccatccaggcccaaagaggtaccataggatggatggcacattgctcaacagggtcggtcccattcagggctataaatcctgtgtgatccttaaatatctgcagctcaactccatgggctctatgcccacctttctccagggatggggagctcttgtgtgaccccatggcatcccaaagcccctgtggcccccctcacgtggcctggtcagtcctcgaggccagaccagtgcactgagactcagctgggagctgccctgcatgagattgaaggaaacttttcctgcctggaccaccgtcatcactgcagggctgcaggaaagatatcatccttgggtccgattcccaaaaaaacagccctcttggaggaccaacctacccttccatggtgtggattcaggtcagctgcctgtggaaaccctcctgtctcaaaggctgactcttggtgaccccacactgcatgactgatgacccatgaccccagcgggaccactcacctatgctggtcaatgccagggggttgcacctgggtggaagagctcactgaaagacacaaggggagaatgggggttcacagaaccggagcactaacaccaagcccacacagggagcctgggctgcctcacagaggagcacggagaaggggttgggcccccacgagatgctgctgttcagggcctcaaggtctccagcccaaaatacattggtcattccagggaactccggatcccagcaccttcttccaaaattctcacctaggctgggcctcagcgtaatcctattgagcatgatttttaagtcatcacctctcttcaggacaatataaggttctcatcatcgacccaacccagggcatcaccctccactgccccgcaacccatgcatccagtgggacccagataggctcaccgcagctcagtgcagcagaccagggtgccaggaagggcctgagcttcagctcaccaggggctgagcccagagccagtgggcccaacgcaagtcttcctctggggtcaccatctggaagggtgggggacaggtgtccaaacaaggcctcatgcctccatgcaggaaagtgggcagggggtgctggctcacacatgctctccctccatggactcatgagatgagatccatgtaaaacagtgatggtcatttacgcgaggaacccttggccactgaaccctggaaggacggggcaggagggtcacagggttcgagcaaaacgcccaggctgcaccctagtgcaggaccctggagcacctccactgcccacgccaaatcccctgctcgaatctgggctgcatcaggaccactgggcagggccatgggcaccaaatagctcacagcaaatcaaggaggctggcctggatgccacgtaccactgcagacctggcagtcacatggcctgcccctgggcattaaatgaacccatccaggcaccctttataagcacacaccagaaatcacatcctggggccccagggccacatgccttctctggtgggtccccattcatgcaccgcacacctcctaaacacagagctgggccacgctcggccaatcagaggacacatgatgtcctcaactttcctttggctcaagaccctgctaccctggaggtgactccatggctcagaagtagcctgggcatcaaattgccaggacaggacccttaacggtgggtcttccaccacaggatgccacccttccatccactccacttccggtagggatgaactccagtgggacacaggctgaacccttggcccaaagcccacgattcccagggccaaacaccaggtgctggccagagctcagccttgatccaagcccactgaggccgcactgcccccaccaggctcaaggaggcaccagtgggatagcccattgctcaacagggtcggtcccatcagggccatgggttgggcccaatccttgaatcttcacggcctgactgcataagctcgatcaccgacatcctacccccctgcaagccttggggacggagagctcctgcataacacccgtggcccccagagacccagtggacccctcatgtggcctgggcagtgctccacacctgacccatgcaccaagtgcacgttgctcaacagggtcagtcccatttaggtcaataagtcctgtgcgatccttaaatctctgcaactcaactccacgggccctatgcccacctttctccagggagggggagcatcaaggcaacaagctgctgcactgtattgggttgaaggaactctctgctgcctgggcctccattacccctgcagggtttcagggaaggcgtccttcttgggatcaattaacaaggaagctgcccttccggagaaaccatccatctctggtggggattcaggtcagctccctaaggaaaccctcgtggcctgaaaggtgaccctcagcgaccccccgtggcctggctcttggcccgtgaccccagcaagatccactcacctatgccgctcaagggcaggggcccgcctgggtagaagagctcactgaaagacacagagaagaacgggggctcagggaggagccgtcgatgtgctccacccccagggaaccagaatgccaacaccaagcctgcacaaggagccttggctgccacacagaggagtgcagagactgggttgggcaccccgaaggtgtccttcagggcctcaaggactccagcccaaaatacagtggcccttccaggggacttcggatctcagcatcctcttccagaattctcacctaagctgggcctcagcgtaatcctattgagcatgatttttaagtcatcacctctcttcaggacaatataaggttctcatcatt

SEQ ID NO: 1886289 - DNA, 4001 bp, Homo sapiens
agcatcctcttccaaacctctcacctagactgggcctcagcgtaatcctattattgagcatgatttttaagttatcacctctcttcaggacaatataaggttctcattgacccaacccagggcacccccttccccgcacacgcatccagcaggatccggatgtgctcaccacagctcaatgcaggagaccagggcaccaggaagggcccgatcttcagtgcaccaggggctggacacctggctgatggacgctgacctggggccattgggcccagtgcaagtcttcctctgggctcaacatctggggaaacaggagtaagacaggtgtgaaaacacaacctcacccctccatgggggcagaaggtggggtgtgtcagcccagggatgctcaccctccatggatccatgtgatgggatgcatgcagaacactggcccgtcacggacacagggcaacaaaagctctctcagccaccgaaccctggaaggacagggcaagcgggtcactgggcttgggcaagaagccccgactgtgtcctactgcaggtcccataagcacctccactgcccatgccggctcccccacacgaccccagggtcataccagatatactgggcacaggccagcgccaccattcagttcacggcccaccaaggaggctggcctggatgccagatgccgctgcagacctgcaagtcacatagcctatccctgtgcactgtggacacccacacaggtgccctatcccagcatgtcctagaaattgcaacctggggtccctgggccacatgctttctctggtgggtccccatccatgccccacacacctcctaaacacagagcagggccgcacttggctaatcgggggacacatggtgacttctcctttccttgggcccaagacccgctaccctggaggtgaccccatggctcagaagcagcatgcgtggcatattccagggacaagaccctcaacaggacttccacctcaggaggtcacccttcctgacacttgccaatggggaaggggtgacttccagccacagggaaggggagatccccagtaggacgtgggctgaccccttggcgtaaagctaacgagtccatgacaggactacagcaccaccaggcactggccagagctcagccttgacccaaacctagggaaacagcaccacccccttcaggctcaaagaggtgccctgggatgggacattgctcaacagggtgggtcccattcagggcaataattcgtgtgcgattcttgaatctctgcagctcgaatccatgggttctatgcccacctttctctggggatggagagatcctgtgtgaccccactgcatcccgaagcccctgttgcccccctcacgtggcctggtcagtcctggaggccagaccaatgcactgagactcagctgggagctgacctgcgtgagactgaaggaacccttccctgcctggaccaccgtcatccccgcagggctgcagggaaggtatcctccttgggtctgattccgaaaaaaaacagccctcttggaggaccaatctatccctccatggtgtggattcaggtcggctgcctgtggaaaccctcctgtctcaaaggctgacccttggtgactccaacctgctgatgacccatgaccccagcaggaccactcacctatgccggtcaatgcctgggggccccacctaggaggacgagctcactgaaacacacgagggagaatgggggctcagggaaccagagcccaagcctgcacagggaacctgggctgcctcccagaggagcccagagccagggttgtgccccccggagatgccgttcagagcctcagggtctcctgcctaaaatatactggccatgctggggaacttgggatcccagcatcctcttccaaaattctcacctaggctgggcctcagcgtaatcctattgagcatgatttttaagtcatcacctctcttcagaacaatataaggttctcatcattgacccgacccagtgcatccccctccctgcacacgtatccagaggaacccagatgtgctcaccacagctcagtgcaggagaccaggatgccaggaagggcctgagcttcagctcaccaggtgttgagcacatggctgagagacactggcctggggccagcggacccaatgcacgtcttcctctggggtcaccatctggaggggtgggggacacgtatagaaatacggcctcacgcctccatgcaggaaagtgggcagggggtgctggctcacacatgctgtccctccatggactcaagagatgggatccatgtaaacagtaacgatcatgaatgtggggaacccttggccctccttgccacagctccctcacatgactctatgccacaatgggaccactgggcagggccaggaccaccaacaagctcagagcaaaccaagtaggctgacctgaatgctacgtgccactacagaccccctgtaaaagctcacaccagaaatcaaatcctggagccccagggccacatgccttctctgatgggtccccattcgtgcaccgcacacctccaaatgcagagccaggccatgctcagtcaatcagggaacacatgatgtcttcccctttccttcggctcaagaccccgccactttggaggtgaacccatggcttagaagcagcctgggcaacaaattgccaggacaggacccttgacagtgggacttctaccacaggatgccatccttctggccactccactttggggaggggtgacctttagcgggacacagactgcacccttggcccaaagcccaaattcccagggccagcctgcagcaccaccaggtgaaggccagagctcaggcttgacccaaccccactaaggtcacaccacccccacaaggctcaaggatgcaccaccgggatggcccattgctctacaggttcggcccatgctgggccatgggttgggcccaatccttgaatcttcacggcctgactccataagtccgatcacccacaccctgcccctctgcaagcctcggggacagagagcaccctcataacacccgtggcccctggagaccctgtggaccccctcatgtggcctgggaagtcctccaggcctgacttgtgcactgagtctcagctaggatgtgcactgcattgagttgaaggaagcccttcctgcttggacgtccatcatctctgcacggcttcagggaaggcatccttcttgggaccgacttccaaggaagctgtcctcctggagaaaccatccgtccctggtgggtttcagatgggctccctgaggaatccctcgtggcctgaagggtgactctcagtgacccaaagcgacctggctcatggtccacgaccccagcaggatccacttacctatcccacttaaggccaggggtccccctgggcagaagagctcgctgaaagacacaggggagaatgggggctcaggaaggagcctccaatgtgcctcaaccccagggaactggagggctgacaccaagcccgcaagggagcctgggctgcctcaaggaggagcgcagagatggggtcgggcacccctaagatgcccttcagggcctccaggtctccagcccaaaatacagtggccctgccagagaccttgggatctcagcatcctcttccaaaattctcaccaaggctgggcctcagcgtaatcctattgagcatgatttttaagtcatcacctctcttcaggacaatataaggttctcatcatcgatccaacccagggcaccctcctccccatgcatgcatccagtgggacctggatgggctcaccacagcttagggcaggaggccagggcaccaggaagggcttgagctcaagtgcaccaagggctgggcacctggatgacaaccactggcctggggccagcggtcccaaagcaagtcttcttccacagtcaccatctggggggacaggaggaggacatgtgtccaaccatgggctcacgcctccatac

SEQ ID NO: 1886290 - DNA, 4001 bp, Homo sapiens
gcctcagcgtaatcctattgagcatgatttttaagtcatcatctctcttcagaacaatgtaaggttctcatcattgacccaacccagggaacccccctccctgcttaggcatccagtggcaaccggatgggctcacccaagctcaatgcaggagaccagggcaacaggaagggcctgagcttcagtgcaacaggggctaggcacccggctgatggccactggcccggggacagtgggcccaatgcaagtcctcctctggggtcaccatctcgaggaacaggaagaggacaggtgccaaatgcaacctcacccttccatgctggcagaaggtggggtgtgccagctcagggatgctcgccttccatggacccatgtgatgagatccatgtggaatactggcccatcacagacgtgggccacctgatgctctctccgccactgaaccctgaaaggacaggacaggcaggtcactgggctcaggctagaagccagggctgctccctactgcagaccacacgagcacctccactacacatgccagctcccctacatgacaccagggtcaccccaggactactgggcacaggccagggccagcaaccagttcatggtcaaccaaggaggctggcccgtatgcctgatgctgctgcacagctggcagtcacatagccagtccctgtgcatggtaggcacccacccatatgccatatccaagcacatactggaaaccacaacctggggccccagggccacatgctttctctggtgagtctccatccatgcccttcacacctcgcaaacacacagcctggccacactcagctaatcggggggcacagtgtcttctcctttcttcgggtccaagaccccaccacactggtggtgactccatggctcagaagcagcatgggcagcaaattgccaggagcagaccctcaatagcgggccttcccacttcaggaggccacccttcccaacactcgcccatgaggaagggataacttccagccacagggaaggggtgactttcagtgggatgcaggctgcccccttggcccaaagcccacgagtccaagggctggactgcagcaccaccaggtggcggccagaggtcagctttgacctaaacccagtgaaacagcaccgccccccttcaggctcgaagaggcccatgggatggcccattgctcaacagggtgggtcccattcagggccatgtgtcaggtgcaaaacttgcatctcaacagctcaactccatgggcccaatcacccacctttctccagggacagagagtgcctgtgtgaccccatggcaccccagagccactgtggcacccctcatatggccagggcagtccttaagtccagacgcaagcaccgagcctcagctgggagctgccctgggtggaactgaaggaaccctttcctgcctggaccaccgtcacccctgcagggcttcagggaaggggacctccttggttcttgtttcccaggaagtcgccctcctggagaacccatatcttcccagtggggattcaggttggctccctgaggaaacccttctttcccgaaggctgacccttggcgacctcacgcggcctggctcatggcccatgatgccagccactcacctatgccagtcaatgacaggggtcttccatgtggaagagctcactgaaagacacaagaggagaacggggctcagaaaggagcttcccatgtgcctcaaacccagggaactggagggctgacaccaagcctgcacagggagcctgggctgcctcaaggaggagcgcagagacagggttgggcacccacaagatgcccttcagggcctccaggtctccagccaaaaatacaggggccctcctggggacctcggaatcccagcatcctcttccaaacctctcacctagactgggcctcagcgtaatcctattattgagcatgatttttaagttatcacctctcttcaggacaatataaggttctcattgacccaacccagggcacccccttccccgcacacgcatccagcaggatccggatgtgctcaccacagctcaatgcaggagaccagggcaccaggaagggcccgatcttcagtgcaccaggggctggacacctggctgatggacgctgacctggggccattgggcccagtgcaagtcttcctctgggctcaacatctggggaaacaggagtaagacaggtgtgaaaacacaacctcacccctccatgggggcagaaggtggggtgtgtcagcccagggatgctcaccctccatggatccatgtgatgggatgcatgcagaacactggcccgtcacggacacagggcaacaaaagctctctcagccaccgaaccctggaaggacagggcaagcgggtcactgggcttgggcaagaagccccgactgtgtcctactgcaggtcccataagcacctccactgcccatgccggctcccccacacgaccccagggtcataccagatatactgggcacaggccagcgccaccattcagttcacggcccaccaaggaggctggcctggatgccagatgccgctgcagacctgcaagtcacatagcctatccctgtgcactgtggacacccacacaggtgccctatcccagcatgtcctagaaattgcaacctggggtccctgggccacatgctttctctggtgggtccccatccatgccccacacacctcctaaacacagagcagggccgcacttggctaatcgggggacacatggtgacttctcctttccttgggcccaagacccgctaccctggaggtgaccccatggctcagaagcagcatgcgtggcatattccagggacaagaccctcaacaggacttccacctcaggaggtcacccttcctgacacttgccaatggggaaggggtgacttccagccacagggaaggggagatccccagtaggacgtgggctgaccccttggcgtaaagctaacgagtccatgacaggactacagcaccaccaggcactggccagagctcagccttgacccaaacctagggaaacagcaccacccccttcaggctcaaagaggtgccctgggatgggacattgctcaacagggtgggtcccattcagggcaataattcgtgtgcgattcttgaatctctgcagctcgaatccatgggttctatgcccacctttctctggggatggagagatcctgtgtgaccccactgcatcccgaagcccctgttgcccccctcacgtggcctggtcagtcctggaggccagaccaatgcactgagactcagctgggagctgacctgcgtgagactgaaggaacccttccctgcctggaccaccgtcatccccgcagggctgcagggaaggtatcctccttgggtctgattccgaaaaaaaacagccctcttggaggaccaatctatccctccatggtgtggattcaggtcggctgcctgtggaaaccctcctgtctcaaaggctgacccttggtgactccaacctgctgatgacccatgaccccagcaggaccactcacctatgccggtcaatgcctgggggccccacctaggaggacgagctcactgaaacacacgagggagaatgggggctcagggaaccagagcccaagcctgcacagggaacctgggctgcctcccagaggagcccagagccagggttgtgccccccggagatgccgttcagagcctcagggtctcctgcctaaaatatactggccatgctggggaacttgggatcccagcatcctcttccaaaattctcacctaggctgggcctcagcgtaatcctattgagcatgatttttaagtcatcacctctcttcagaacaatataaggttctcatcattgacccgacccagtgcatccccctccctgcacacgtatccagaggaacccagatgtgctcaccacagctcagtgcaggagaccaggatgccaggaagggcctgagcttcagctcacca

SEQ ID NO: 1886291 - DNA, 4001 bp, Homo sapiens
tgtggcctggccatcctagaggcctgacctgagcaccaagtctgagctgagcactgcccagctccactgtcctgtgtggagctgaggaaaccctttcctgcctggaccaccaccacccctgcagggctccagagaaggcctcctccttgtgtcagattcccaaggaagctgccctcctggagaacacatccccagtcaggattcagatcagctcctgaggaaacccaggtgacccgagggctgacccttggggaccccacgcagcttggctcacagcccatgacacgagcagtatccactcacctttgccagtcaatcccagggggcctgctggggggaagagctcactgaaagacacagaggagaatgcgactcaggaaggagccaccaatgtgtcccacccccggggaagctgagtgcagacaccaagcccacacaggaagcctggtgtgcctaatggaggagcacagactgggttgggtacccctccatgatatgcccttcagggcctcgaggtctcccgcctaaaatacagtggtcctgccggggaccttgtgattcccagcatcctctttcaaaattctcacctaagttgggcctcagcgtaatcctattgagcatgatttttaagtcatcacctctcttcaggacaatataaggttctcatcatcgacccaacccaggacacccccatccccactcacacatccagagggacctggatggactcaccacacctcagtgcaggataccaggatgacaggaaggacctgagctttagcgcacgggaggctgagcacgtggctggcagacactggtccggggccaaagggcctaacgcaattcttcctctgtgctcaccatctggagggacggggaaaggtgtccaaatagggccttaagattccatgcaggaaagcggggaggggctgctggctacacatgctctacatccgtggactcatgtgatgggatccatgtgaaacgaggacagttatggacctggggaacccttgtatctccccaccaccaaaccctggaaggacaggacaggcgagtaactaggctcaggcaagatgccgaggctgtgccctaccgcaggcccctggagcacctccactgtccaagccggcttccctgcacttcctgggctgcattgtgacccctgggtaggagccagggccaccaaccagctaaggccaaccaaggaagcttgctctgaagctaggcgccactgtagacctggcagacgcacagcctgcccctgtgcagggagggtgcccagactccctctccaagcacgcaccaaaaatcacagcctggggccaccttcatgtggcttgggcagtcctcaaggccagaccctagcaccaagtctcagctgggagctgacctgcatgggactaatggaaccctttcctgcctggaccaatgtcactcctgtagcacttcagggaaggtgtcctccttgggtcagattcccaaggaggcggcccttctggagaaccaatccctcaccagtggggattcaggttgtctccctgaggaatccctcctgtcctgatagctgaccctcagtgaccccacgtggcctggtccatggcccatgaccccagtaggatccactgacctatgctgctcaaggccaggggtcctcctgggcaaacgagttcactgaaagacacaaggggagaacaggggctcagggatgagccacccacatgcaccaccaaggggaatctgagcaccgacacgaagctcgcacagggagcctggactgcctcatggaggaacgtagagacaggtttgggccccctccagatgcccttcaaggactccaggtctccagcccaaaatacagtggccctgtcagggacctagggatcccagcgtcctcttccaaaattctcacctaggctgggcctcagcgtaatcctattgagcatgatttttaagtcatcatctctcttcagaacaatgtaaggttctcatcattgacccaacccagggaacccccctccctgcttaggcatccagtggcaaccggatgggctcacccaagctcaatgcaggagaccagggcaacaggaagggcctgagcttcagtgcaacaggggctaggcacccggctgatggccactggcccggggacagtgggcccaatgcaagtcctcctctggggtcaccatctcgaggaacaggaagaggacaggtgccaaatgcaacctcacccttccatgctggcagaaggtggggtgtgccagctcagggatgctcgccttccatggacccatgtgatgagatccatgtggaatactggcccatcacagacgtgggccacctgatgctctctccgccactgaaccctgaaaggacaggacaggcaggtcactgggctcaggctagaagccagggctgctccctactgcagaccacacgagcacctccactacacatgccagctcccctacatgacaccagggtcaccccaggactactgggcacaggccagggccagcaaccagttcatggtcaaccaaggaggctggcccgtatgcctgatgctgctgcacagctggcagtcacatagccagtccctgtgcatggtaggcacccacccatatgccatatccaagcacatactggaaaccacaacctggggccccagggccacatgctttctctggtgagtctccatccatgcccttcacacctcgcaaacacacagcctggccacactcagctaatcggggggcacagtgtcttctcctttcttcgggtccaagaccccaccacactggtggtgactccatggctcagaagcagcatgggcagcaaattgccaggagcagaccctcaatagcgggccttcccacttcaggaggccacccttcccaacactcgcccatgaggaagggataacttccagccacagggaaggggtgactttcagtgggatgcaggctgcccccttggcccaaagcccacgagtccaagggctggactgcagcaccaccaggtggcggccagaggtcagctttgacctaaacccagtgaaacagcaccgccccccttcaggctcgaagaggcccatgggatggcccattgctcaacagggtgggtcccattcagggccatgtgtcaggtgcaaaacttgcatctcaacagctcaactccatgggcccaatcacccacctttctccagggacagagagtgcctgtgtgaccccatggcaccccagagccactgtggcacccctcatatggccagggcagtccttaagtccagacgcaagcaccgagcctcagctgggagctgccctgggtggaactgaaggaaccctttcctgcctggaccaccgtcacccctgcagggcttcagggaaggggacctccttggttcttgtttcccaggaagtcgccctcctggagaacccatatcttcccagtggggattcaggttggctccctgaggaaacccttctttcccgaaggctgacccttggcgacctcacgcggcctggctcatggcccatgatgccagccactcacctatgccagtcaatgacaggggtcttccatgtggaagagctcactgaaagacacaagaggagaacggggctcagaaaggagcttcccatgtgcctcaaacccagggaactggagggctgacaccaagcctgcacagggagcctgggctgcctcaaggaggagcgcagagacagggttgggcacccacaagatgcccttcagggcctccaggtctccagccaaaaatacaggggccctcctggggacctcggaatcccagcatcctcttccaaacctctcacctagactgggcctcagcgtaatcctattattgagcatgatttttaagttatcacctctcttcaggacaatataaggttctcattgacccaacccagggcacccccttccccgcacacgcatccagcaggatccggatgtgctcaccacagctcaatgcaggagaccag

SEQ ID NO: 1886292 - DNA, 4001 bp, Homo sapiens; identical to SEQ ID NO: 1886217

SEQ ID NO: 1886293 - DNA, 4001 bp, Homo sapiens; identical to SEQ ID NO: 1886218

SEQ ID NO: 1886294 - DNA, 4001 bp, Homo sapiens; identical to SEQ ID NO: 1886220

SEQ ID NO: 1886295 - DNA, 4001 bp, Homo sapiens
tcctggcctgacaccacgccaacccaacagctgaagaccaaggccttcaatcagtaggatgtgaattttgacctggagaccatgcggacataggcccaaggtggctcgcctaccagtcaactcccctggtgtgagtacacactcctcctcacgggacatctgatgtcctgagcagacactgtctctagccgccctctcaggtgaggcgtacctggtggaaaaccaatcacaacctgtgctggagggcgcctttgcaatggccagcacatcagcctgaaacttggcgtcaaggccagaggtggtcttcccaatctagccaaaggacctcaagacacagccttcctcccctccactcagtccatgtgcctgcactatgccctctcgacacacaaacggaatggctgcttttccaatgggacgtcccccctaccgatgtcccaaggaccaggcggatgggatacactgcctttcattttccttgcattggacacacccacagggctatcctgtactgacctctgaggcaacatcccattatgcagccaacttgactgcactactacccgccgcaatgcctcaaagtcaacactacctgaacaccaccactgggtctacatgcatgcagctagtgagtgagctgcgagctcagaaccacccatcctttccaacattcctaagccatctgcatgcccttcaacatggcatggctgtcctggctgcgctgagacttcaaaccggttaagggagccaaaacagttcatcacccctagggtgtagtggactccaacacttaaatattgccaacatgcagaggtgtgaggcatcccaagtaaaaggactctgtggcagcacccctgggattgcacccgtgttgcctggaatgcacacagacctccatggatagctccaagtgtgacgagtacctacggcacagacttgggccagagccagggtcagggcacattcactctggaccttcaggactgaagctgctttccaagcaggaaagaggatccagagcagtatttgctcatacaagctgcagcaggtggagccgcccaataatggcgggccaagagaccatttataggaagatttgcacaatggaggagcccattactctcctgggaagactggaagtgacccagggccacgggcaccaactcgatcctcgtgctccccaggacctggcctcgaagacccctgctggccaacctgtcttccaccagaaaaatccatgggaagcccatcacccctgaatgacagcccaagcctgctaatgacactcatgtccatgtgatccctctaccacctttcccctggagtaccttcctacctaggcctctgccactgcaccacaggcatctcacagctcaggaggcaaagaaatcccttccaggagggctcctggtgaccaatgctgcagggtaggctgaagaggctttcactgtttgccccgacacctattgctctgcactctcccctaacaccttggcactcccctgttctcaactaatcaaaaatcaacaccaaggtctgcctgaggtctgggccttgggctctcctcgacatgaaaacagacacctggtcttctgcactgagatgaccactgtgaggtccgggtcttccttctgggagcttaccagtagcacacacccctgtgctggcaacatttccacttcccctaggcctgcaacatttctgcctgcttccacggccaccacgccatcacagagcggccgaatcccccatcactctcccacccatgtacctcacacagagggaatgttcctaacgtgcctgtgacacgagacttttgtctgtggatgccctgggtggtggaacctatgggaatcagtggaagttgtccctcactcctacaggccccagaggaagcaacatgctggacctcagttccgatgagaatgacgttatgagttctcactcattttgttcagcttttccaaggaatgtttttataggggactcatcatcgatccaagcacatttgacaaggggcaagacatttgacaccacaggctgggaaggggcgagctgatgaccttaaagacattcagcatgctggggaagccagagctgcaccactgagcaatgggcacagaccatccactctaggagtggaacttgccatgtcattcgctgctgacaaacagctccttgaaggtataggacatccaaaagccactctcattcagcacgtggggcagaggaatgcttaccgtcctaagccatccaccagcattgggtgcaccatggatgccaggccacagtgactacaggactctgcagggcctccattgatcagaagaatcaaccatcttccttgccagcaggcggctggcctcccatgacaacttctccggggaattgtaaagaaatcaaatacacacttgagaaacaggcccaggtccattgctcaccacttccatgccattctctactgtagttcaaccagtgcacctacttgtccttggcctccatgactgatctccatctttatgaatatacaatacccatgccattctgtggatacctagggaacatgtgtggccagaactactgcacgtgcccgtttctgcgtctatttgcttttttctgtgggctcctgtgtgtgtgtgtgtgagtgtgtgtgtttatttgtcattttctgtctgtgtgttgtgtttgtgagtttgcgtgtgtgtgtgtgtgtgtgtgtgtgtgtgtgtgtgtgtgtgtgtccctccctggggtgcgcatatgtttccgaacactgcaaagggccacgatggtctgcagcctccaggtccgaccctgtggcaaccggacagctcaagaacaaggtcttcaatcagtaggatgtgaactctgacctcaggccatgcagacataggtctgaggtccctcccctaacagccaccactcctggcgcgagcacatgctcttcctcatggggcttctgatgtctggaactgacactgtctttggccactgtcccaggtgaggtgtacctagccaaaaaccaaccacaaccagcactggagagcaccatcacaacagccagcacgtcagtctggaactcagcatcaagcccagagacagtcttccccatgtagccaaaggacctcaagacatgagcttcctcccctccactcagtcctggtgcctgcaccatgccctcaggacatccgaaggtaatgtctccttttattacaggatgtcctgcctgatcctacaaggaccaagcagacaggacacatcaccttccatcaccctttccttgatcacatccataggatttttatgcactgacctcccaggcaccatcccatcctgcagccaacttgacaacactatcactgaccccagtgcctccaggtcaacacggcctcaacaccaccactgggactaattaatattgtcaaaatatccatactacccaaagttatctactgattcactataattcctatcaaaatcacaatcacatttttccagaaatagagaaaaaaatcatacaatttatctggatccacaaaagaaccaaaatagctaaatcaatattcagcatgaaacacaaaggtggaggcacttcttgatttccaagtatataacaaagctatagtaattcaaaatactagaatactggcaaaaaacagacataatctaatggaaaagaatgaagaatgcagaaataaatccatgtactctactcaatttatctttgacatgggtgctcagagcacagtttatctaactaatcatatttggcatactggatatccgcaaattaaaaaaaaaaagtaaactgaatccttaccttacaacatacacaaaaatcaactcaaaataaattaagtacttaaagatacatcttgacattgtaaaactagaagaaaacacatggaaacccttcttgtttttgtcaataagtttttgaatgtgacactaaaagtataaccaacaaaagcaaaaacagacaagcaagactacatcaaacc

SEQ ID NO: 1886296 - DNA, 4001 bp, Homo sapiens
cccatcctaagcctggacagaccccttggtgcaacccacgtcaatgaatgagaggtagacctccatctctagcccctgttgaagcagtgtgctggacctcagtttgaagaggatgacagtataaagttttcactcattttgttcaactttccaaggaacccacgtatggaagtcatcattgatccatgcacagtcctcatacctgcaaacatggaacattaggtgcctttggaaaaccaatacttaccatcctgaggtatccaccagcctgaaggagaccatgccaaacatgtttagaagcactttgccatctccaaaaatctcccaagatcaaagtcatcccttgcggtcactggccttccttccataccaacgccacctaagaagtgcagaagcaaaacagtgtgcttgagaaaggcagtgaggtgcataggtggcaagggtcatgtcatttgtcctgttgtggagtaatctgtatctacctcccatgggctccccttctttctgcacacatgcatgggtttgcccaaacatgaaggtaggaggcaggcatgaattttgaaggcaccatcaactagagagcactaagcatgaagaacactctcaacaccactcttataacacctccaactcaaaaacccttctcctggccatcagagaagacaaaggctatggtgatacttcagtgaggagagtttggaggggaaacctcttcctatgcaaaggttaactttcctttggccttgaggcatttttaccccttgggtccttcacactcttcccatccagaaacatcacaaatcaacctccatgtgcactacacaggtacagatcagggacccagaagagcaccaggcattctgaatcctacaagatttctaaggtgctgcagctaagaaaacaagatcttaaggcacttgcctgtgaacataacatcagagtccaacacctatccatcattggcctgtggatggtagccctgtcctaccacacaacgactatttcacaaagaagactgctgtgaagaattaggaggaatttgaaaataccctaatatcaggagacgctgaggtatataagcaaggagaccttcgcaggtcacatttccaagtagaagtcaccacgatgtggggaatgacacactcttataaaccccaactgcatcaagatgtctgagcggttcagaggcaaatgacatcaggctctcccaagcaaaccatcctgaggatatcacgaaatggaccttgggcaccctgcaatgtcttaaagagcctcacagtcatcactccacgacccacatggaatgatgccaggtaaaggcacacacagacctctccccttcccacagccactacccttcttgggccatgaaatttggaattctacttatagatgtacaagttcactgtagagagcttctccaggctcctttccagagagcaaatcagcatcaccactggcttcaagatggccagcccttgatgctacccaaacaccataagaagtcccatgtccccggccacagatgaaagacagttgaagaagtgctcaggaatggcaccgtgctgtctcctcatgtggaataaattgtcttcttctggggggtgacgaacccaagaggtatgaatcaaggacagacccagccatgcagaggtgggcaactggataccgccttcctgtggcacctgcaggtttaccttctcctgcacactggcaggatgctaccccaccttctcacaggtaagtcgttcaacaaacgtatctctcagccaggggagtacaaaatactcagctactcagtttcactgaaagacaactacatcctaagccttggtgcacaccatgataacaaacagatgttggccccctaaatctaggccctgatggagaagcgtgctggacctcagttagatgaggatgatggtactgagttttcactcattttgttcacctttccaaaaaaaaaaaaaaaacgtatatatgtaagtcatcatcaacctacacatagtctttgtccctgcaagtgaggaaaatcagaatgctttcagaagaaatcacttacattcaggagaaatccaaaagcctccaaaggagcccacaccatttgtatccaggggcctcatggcatctcaaagatcacacaagacgaagaccatccttcttggacaagggccttccttccatgccaatgacaccaggaaggtgcagaggaaatgagtgtgcttcagaaagacagacaggtacataggtcaggaaggctatgtcatatagactcctgtggtacatatgaaatctgcttatctatggcttcacatatctgtgttcacagaaacacatatacagagttgcacatgtggattccgggtaccctgggagggcgtcatgccactaaagagtatgggcgtagagcatcccaatcaacaccatggcttcaatacttgcaatttgtgtacaaaagacttggtgccctggatgctgaaagccaaaaacttgtaccactactcagttcaagataagataagagatgacatgccagtcagcccaacattggaacaaaagcaaaaacattcaggaaatatgtacttcctcaacatataaaaaaaacaaggaaactttctccatgaatgttggtgaaaggctgtgattggtgaccagaacctggctaaaaatcaatcatgcaacaaaaatccaaaacctagcattaagggtgaaaccaacttgacaccaagaagagtaacactaaaaaaattcatgggctacccaagtatgattctcaaatacatttatgataaagaattttactatggtcaaaacgaccacaaaaattgaatgccagtgcctgggtagtgaagtaccatgtaatatgacagttacccgtgaaccacaataagccaaagtggaggcaatgtgctggacctcagttccgatgagaacgacggtatgagttctcactcattttgttcagcttttccaaggaatgtttttatgggggactcatcatcgatccaagcacattcaaagacgcaggatgtttgacatcataggctgggcagtgggtgagccgatgaccttaaacatgttcggcaccctggggaacccagagctgtgccactgagcaaaaggtacagaccatccactctaggagaggaactcagcatgccattagtggcctactgaaaaactgttcattgtgggtcttgggaatcccaaagacaccctcactcagcacgaagggcagaggaatgcttaccgtcctgagccacccaccagcacggggtgcactgtggataccaggccacactgaaaccaggactctacgtggcctttgttgcttgggagaatcgaccatcttccttccagcaggcctgcgcctcccatggcaactgcccctgagaagtgtaaagaaaccaaatgcatgcttgagaaatgggcccaggtccactggtcacttcaaacccattcttacctgtggggcaacttgcatgcctgcttctccttggcctccatgattgatctccatctccatgaatgtatcttacctctgtcactctgtggacacataggaagtgtgtgtgcctggaacaacctcatgtgcccattgctgcgagtatttgcctgtggctgtgcacacgtgtgtgtgtgtgtgtgtgtgtgtgtgtgtgtgagattcccactgcaatgggcggttatagtctgcagcctccagacctgatccccccaacaaatcaaaggttcaagaccttcaatcagtaggatgtgcactctgatctcaaggccacgtggaaataggcctgatgtccctcgtgtaacagccaccacacccctggcgcgaatacaggctactcctcacagggcctctgatgtcgggaccagacactgtctcttgctgcactcccaggtaaggcacatctggcggaaaaccaaccaaaacctgtgctggaaggcacctgcccaatgctcagaatgttgcactgatacatgacgtcaaagccagaggtggt

SEQ ID NO: 1886297 - DNA, 4001 bp, Homo sapiens
acagacaagcatcccacaggggttcctgaacacagatctctcaaaccaagtcagtctgcgaagtggcaggaacacagggacttgcaatctcattcccatcccagcaccccaaggtcatcatgaaatggagcatgggcaccctacaactcccaaaagaggctcatagtcattgctccacgacccacatggaatgtcgcttggtacatgcatgcacagccctctccccttcccaccaccagtacactgcagggaccaaaggacttgggtttcctcctatggacatacgagttcaatgtggataccctccctgggctcctctgcagaaagcaaatcagctcaccacccacctcatggctgcctgcccctgatgctacccaagtaccatgggaactcccacatcctcgactgagaatgaaagtaagccgaacaagtgtccaggaatgacatgctctctccccaaaggaaagcaatggtattcctgtgcaagcggggaggcgacaaaccaaaaagctatgaatcaaggacacacacagtcatgcacaaagagactactggctactgcttcctgtgccatctgcagcttcaagttctgcaggctggcagtgtgcttaccccaccttctcagaggaaattccttcaaccaagctgtctctcagctacagaagtccaaaaagcccagacgcttgcatttgcccaaagaggaccacatcctaagccaaggtgtagaccatgtcaacaaacagatgttggccccctctccttgccctccaatgtagcagcatgctgggacctcagttcaatgaggatgatggtatagagttttcattcattttattcagctttccaaggaatgtatatatggaagtcatcattgatccaggcacaatctttgtttctgcaaatgaggaaaatcagggctttgggaagggcttgcttacattcacgacggatccaaaagcctctgaaggagcccatgccacatgtgtcaaggggcttcctggcatctccaaggatcacatgagaggatgatcatccctcacagacacagtccttccttccatgccaacgccacctgggaggtacagatgaaacatgggcatgtttgagaaaggcagacatgtgcagaggttatgagggccatgccatctggccccctgcagtacatctgcaatctgcccatctctggcttcacctgtttatggacgcagaactgcatagacacagggatgcacgtctggatcctgggagcccatggagtacataatcccactagagagaactgatgttgagcatccctttaaacacccgtgcacacctgcaaagttgatcataaaagcctcggggacctgcacccctaacgaggaagcctttgacctacaccaggtttgagataagccagagactcgttgcctatcagccccagcttagggcaggaggccaactgtatgtcttcataacacagagggtacaacagaggcactctggcctggatgtgaagcatgcaggtgaccagaaatctatgtacatacacaaggataaaaatgagccaaaaatgaggcaaaagtgtaggcttgtcctctcttcccaacgagaaggacctgccttcctcccgatgatgagagaaccaagaactaagactcaagaacaaactgggggacacagagcctaagtcctttgtgtcacctgcacattcacctagtcttgaagatggtgtgtgtgctaccctggcctcactaagagatgtccttcacaccaggaatctcctgtgcatgggagctcccactcccctggggctaccccttgccaaaagagaaccccatcctaagcctggacagaccccttggtgcaacccacgtcaatgaatgagaggtagacctccatctctagcccctgttgaagcagtgtgctggacctcagtttgaagaggatgacagtataaagttttcactcattttgttcaactttccaaggaacccacgtatggaagtcatcattgatccatgcacagtcctcatacctgcaaacatggaacattaggtgcctttggaaaaccaatacttaccatcctgaggtatccaccagcctgaaggagaccatgccaaacatgtttagaagcactttgccatctccaaaaatctcccaagatcaaagtcatcccttgcggtcactggccttccttccataccaacgccacctaagaagtgcagaagcaaaacagtgtgcttgagaaaggcagtgaggtgcataggtggcaagggtcatgtcatttgtcctgttgtggagtaatctgtatctacctcccatgggctccccttctttctgcacacatgcatgggtttgcccaaacatgaaggtaggaggcaggcatgaattttgaaggcaccatcaactagagagcactaagcatgaagaacactctcaacaccactcttataacacctccaactcaaaaacccttctcctggccatcagagaagacaaaggctatggtgatacttcagtgaggagagtttggaggggaaacctcttcctatgcaaaggttaactttcctttggccttgaggcatttttaccccttgggtccttcacactcttcccatccagaaacatcacaaatcaacctccatgtgcactacacaggtacagatcagggacccagaagagcaccaggcattctgaatcctacaagatttctaaggtgctgcagctaagaaaacaagatcttaaggcacttgcctgtgaacataacatcagagtccaacacctatccatcattggcctgtggatggtagccctgtcctaccacacaacgactatttcacaaagaagactgctgtgaagaattaggaggaatttgaaaataccctaatatcaggagacgctgaggtatataagcaaggagaccttcgcaggtcacatttccaagtagaagtcaccacgatgtggggaatgacacactcttataaaccccaactgcatcaagatgtctgagcggttcagaggcaaatgacatcaggctctcccaagcaaaccatcctgaggatatcacgaaatggaccttgggcaccctgcaatgtcttaaagagcctcacagtcatcactccacgacccacatggaatgatgccaggtaaaggcacacacagacctctccccttcccacagccactacccttcttgggccatgaaatttggaattctacttatagatgtacaagttcactgtagagagcttctccaggctcctttccagagagcaaatcagcatcaccactggcttcaagatggccagcccttgatgctacccaaacaccataagaagtcccatgtccccggccacagatgaaagacagttgaagaagtgctcaggaatggcaccgtgctgtctcctcatgtggaataaattgtcttcttctggggggtgacgaacccaagaggtatgaatcaaggacagacccagccatgcagaggtgggcaactggataccgccttcctgtggcacctgcaggtttaccttctcctgcacactggcaggatgctaccccaccttctcacaggtaagtcgttcaacaaacgtatctctcagccaggggagtacaaaatactcagctactcagtttcactgaaagacaactacatcctaagccttggtgcacaccatgataacaaacagatgttggccccctaaatctaggccctgatggagaagcgtgctggacctcagttagatgaggatgatggtactgagttttcactcattttgttcacctttccaaaaaaaaaaaaaaaacgtatatatgtaagtcatcatcaacctacacatagtctttgtccctgcaagtgaggaaaatcagaatgctttcagaagaaatcacttacattcaggagaaatccaaaagcctccaaaggagcccacaccatttgtatccaggggcctcatggcatctcaaagatcacacaagacgaagaccatccttcttggacaagggccttccttccatgc

SEQ ID NO: 1886298 - DNA, 4001 bp, Homo sapiens
gtattcattcctgtaaaggaagaacattagggtcttttgagaaatgaacacataccgtatgaagggatccaccggcacccaaaggagcccatgccacatgtgtccatgggttccctgccatctccagggatctcccaagatgaagtttatcccttgcagcctctgtctttctttgcatgcccatgccacctgggaagtgcagaggaaaaacaggtgtgcttgagaaaggcaggcaggtacacagtttgcaagggccatgccattcctcctgccatgctgtattctatatctacctcccatgggtgacctctctttggggacttatgcacagatatacccaggcatgaaggtataaggcaggcatgcatttcaagggcaccatcaaactagagaacactaagcgcgaagaattctctcaataccacactttcaccacccctgactcaaaagccattctcttggccatcagagaagacaacagccatgaggatatttcaatggggagagctgcagggaaaaagtgttccagcacaaagaacaactttccttcggccttgaagctccttccacacactttgcattgagaaacacattcaatcacacatcaacctccacctctggccttcctcacaggtgcagctcagggaaccagaaaagcatcagacatgctgaatcctacagggcttctatggtgctgtccctgagaacacgatacgtcttaagccacttgcctgtgaacatggccacagagtacaaaactctccatcactggcctgtggatgacagccctcatacaacttcatgactgtttcacaaagaggactgttgtgaagaattaggaggaatttgaaaataacctaacatcataagataatggagaatttaagtgcagagaccttgacgggtcacttttctgagtagatgctaccacgacatgggaagtgacacactcttaacctcaactgcattgaagtgcctgagcagttcagaagcaaatggcatcaggctctcctgggcaaaacttcccctcatcaatacagagggagcaacaagcccttccagcagtatgtacaaccatggaagggtagaaaccctgggccaatatctgctcaaatgcctaacacagacaagcatcccacaggggttcctgaacacagatctctcaaaccaagtcagtctgcgaagtggcaggaacacagggacttgcaatctcattcccatcccagcaccccaaggtcatcatgaaatggagcatgggcaccctacaactcccaaaagaggctcatagtcattgctccacgacccacatggaatgtcgcttggtacatgcatgcacagccctctccccttcccaccaccagtacactgcagggaccaaaggacttgggtttcctcctatggacatacgagttcaatgtggataccctccctgggctcctctgcagaaagcaaatcagctcaccacccacctcatggctgcctgcccctgatgctacccaagtaccatgggaactcccacatcctcgactgagaatgaaagtaagccgaacaagtgtccaggaatgacatgctctctccccaaaggaaagcaatggtattcctgtgcaagcggggaggcgacaaaccaaaaagctatgaatcaaggacacacacagtcatgcacaaagagactactggctactgcttcctgtgccatctgcagcttcaagttctgcaggctggcagtgtgcttaccccaccttctcagaggaaattccttcaaccaagctgtctctcagctacagaagtccaaaaagcccagacgcttgcatttgcccaaagaggaccacatcctaagccaaggtgtagaccatgtcaacaaacagatgttggccccctctccttgccctccaatgtagcagcatgctgggacctcagttcaatgaggatgatggtatagagttttcattcattttattcagctttccaaggaatgtatatatggaagtcatcattgatccaggcacaatctttgtttctgcaaatgaggaaaatcagggctttgggaagggcttgcttacattcacgacggatccaaaagcctctgaaggagcccatgccacatgtgtcaaggggcttcctggcatctccaaggatcacatgagaggatgatcatccctcacagacacagtccttccttccatgccaacgccacctgggaggtacagatgaaacatgggcatgtttgagaaaggcagacatgtgcagaggttatgagggccatgccatctggccccctgcagtacatctgcaatctgcccatctctggcttcacctgtttatggacgcagaactgcatagacacagggatgcacgtctggatcctgggagcccatggagtacataatcccactagagagaactgatgttgagcatccctttaaacacccgtgcacacctgcaaagttgatcataaaagcctcggggacctgcacccctaacgaggaagcctttgacctacaccaggtttgagataagccagagactcgttgcctatcagccccagcttagggcaggaggccaactgtatgtcttcataacacagagggtacaacagaggcactctggcctggatgtgaagcatgcaggtgaccagaaatctatgtacatacacaaggataaaaatgagccaaaaatgaggcaaaagtgtaggcttgtcctctcttcccaacgagaaggacctgccttcctcccgatgatgagagaaccaagaactaagactcaagaacaaactgggggacacagagcctaagtcctttgtgtcacctgcacattcacctagtcttgaagatggtgtgtgtgctaccctggcctcactaagagatgtccttcacaccaggaatctcctgtgcatgggagctcccactcccctggggctaccccttgccaaaagagaaccccatcctaagcctggacagaccccttggtgcaacccacgtcaatgaatgagaggtagacctccatctctagcccctgttgaagcagtgtgctggacctcagtttgaagaggatgacagtataaagttttcactcattttgttcaactttccaaggaacccacgtatggaagtcatcattgatccatgcacagtcctcatacctgcaaacatggaacattaggtgcctttggaaaaccaatacttaccatcctgaggtatccaccagcctgaaggagaccatgccaaacatgtttagaagcactttgccatctccaaaaatctcccaagatcaaagtcatcccttgcggtcactggccttccttccataccaacgccacctaagaagtgcagaagcaaaacagtgtgcttgagaaaggcagtgaggtgcataggtggcaagggtcatgtcatttgtcctgttgtggagtaatctgtatctacctcccatgggctccccttctttctgcacacatgcatgggtttgcccaaacatgaaggtaggaggcaggcatgaattttgaaggcaccatcaactagagagcactaagcatgaagaacactctcaacaccactcttataacacctccaactcaaaaacccttctcctggccatcagagaagacaaaggctatggtgatacttcagtgaggagagtttggaggggaaacctcttcctatgcaaaggttaactttcctttggccttgaggcatttttaccccttgggtccttcacactcttcccatccagaaacatcacaaatcaacctccatgtgcactacacaggtacagatcagggacccagaagagcaccaggcattctgaatcctacaagatttctaaggtgctgcagctaagaaaacaagatcttaaggcacttgcctgtgaacataacatcagagtccaacacctatccatcattggcctgtggatggtagccctgtcctaccacacaacgactatttcacaaagaagactgctgtgaagaattaggaggaatttgaaaataccctaatatcaggaga

SEQ ID NO: 1886299 - DNA, 4001 bp, Homo sapiens
agaaaggcagacgggtgcacaggtcacgaggaccatgctatcttccccctgtggtttatctggaatatgcctgtctctggcttcccttgttcgtgaacccagaaatttatggacacaagtatgctcatcttggggatggcagccctcagaatgcatcatcccgctaaagagcactgatgttgagcatccttctcaatacccttgtttcaacacctgcaatgccagtcacaaaataatcaaggccctgcacccctaaagaggaagccattgacctgtatctggtttgggataacccagagcctcgctgtctatcagccccagtttggagaggaagcctgcctgttcatgccaaatatacatcctcacaatgcacagtacacaacatgggcacataggcacagaggctatgccgggtaaacacaactccaacatcctcagctaaggataaaatgagccaactaatggcaaaggtgtagccttttgctctccccgcaaccagaaggatctgtcttcctctgggggacttcggtacccagagcttggactcaaggacaaacttggccatcagaggcaggctaccagttaactcttcccatgcaatctgccattcacctagtcctccagacagcacatgagttatccagccctaggacacagaagtccttcaaacaaggtatgtcctgtgcatgggagatcctactcccctgtgtctaccattcacccaaagaaaccccatcctaagcctggatggtccccttggtgccacccatgtcaacgaatcaatgttggccctctctgtctagcccctgttggagtaatgtgctggacctcagttcgacgagaatgacggtatagagttttcactcattttgttcagctttccaaggaatgtatatatggaagtcatcatcgatccacacacaatctttgtttctgcaaatgaggaaaatcagggtgcactgggaaggaattgcttacattcaggagagatccaacagcctccaaggaagcctacaccatgtgtgtccaggagcttcctggcttctctgaggttaacatgagatgatgattgtccctcaccaacatggtcctggccaattcatcacttccacgtgggaggtgaagaggaaacacgggtgtgcttgagaaaatctgacagatgtgcagtacacaaaggccatgtcctctgatcccctgcagtgtatctggttgatacccaactctggctttacctgattttggacacagaaatgcatggacaagggctcaggtgcccttgtagtagtgcatcagcacactaaagagcactgacattgagcatccctctcaacacccttacatcgatacctataatgtcactcacaaaagctacagggccatgcaattttaatgaggaagccattgacgtacactgggctggggttaagctagagactccttgcctatcaggctcagcttgcagtgggaacctgtgtgttcctgccatatgcatgtactcacaatgcatggaacacaacatgaaagctatgccaggtgattggaactccactgttctcaaactaagaatgaaaaaaagaaaggcaaaagtatggccttgttctctcttcccaagcacaattacttgtcttcctccaggggttgtgggaacccagagccaggagtcaaggacaatcttggccacccagaggcaggctacaggttaactctccctgagcaacctgcacattcacctagtcccacggactgcatgtgtgctaccccagccttgtagacagaagtcctgtgcacatagcctcaactcccctgtgactctccttcacccaaacggaatcccttcctaagcctggaagaatgcttcatgcaacgggcatcaaaaaaaatgacagttgtccctctatagcccccggtggacctcagttcaactaagatgatagtacagagttcccactcattttgttcagctttccaaggaatgcatgtatggaagtcatcattggtccatgcacagtattcattcctgtaaaggaagaacattagggtcttttgagaaatgaacacataccgtatgaagggatccaccggcacccaaaggagcccatgccacatgtgtccatgggttccctgccatctccagggatctcccaagatgaagtttatcccttgcagcctctgtctttctttgcatgcccatgccacctgggaagtgcagaggaaaaacaggtgtgcttgagaaaggcaggcaggtacacagtttgcaagggccatgccattcctcctgccatgctgtattctatatctacctcccatgggtgacctctctttggggacttatgcacagatatacccaggcatgaaggtataaggcaggcatgcatttcaagggcaccatcaaactagagaacactaagcgcgaagaattctctcaataccacactttcaccacccctgactcaaaagccattctcttggccatcagagaagacaacagccatgaggatatttcaatggggagagctgcagggaaaaagtgttccagcacaaagaacaactttccttcggccttgaagctccttccacacactttgcattgagaaacacattcaatcacacatcaacctccacctctggccttcctcacaggtgcagctcagggaaccagaaaagcatcagacatgctgaatcctacagggcttctatggtgctgtccctgagaacacgatacgtcttaagccacttgcctgtgaacatggccacagagtacaaaactctccatcactggcctgtggatgacagccctcatacaacttcatgactgtttcacaaagaggactgttgtgaagaattaggaggaatttgaaaataacctaacatcataagataatggagaatttaagtgcagagaccttgacgggtcacttttctgagtagatgctaccacgacatgggaagtgacacactcttaacctcaactgcattgaagtgcctgagcagttcagaagcaaatggcatcaggctctcctgggcaaaacttcccctcatcaatacagagggagcaacaagcccttccagcagtatgtacaaccatggaagggtagaaaccctgggccaatatctgctcaaatgcctaacacagacaagcatcccacaggggttcctgaacacagatctctcaaaccaagtcagtctgcgaagtggcaggaacacagggacttgcaatctcattcccatcccagcaccccaaggtcatcatgaaatggagcatgggcaccctacaactcccaaaagaggctcatagtcattgctccacgacccacatggaatgtcgcttggtacatgcatgcacagccctctccccttcccaccaccagtacactgcagggaccaaaggacttgggtttcctcctatggacatacgagttcaatgtggataccctccctgggctcctctgcagaaagcaaatcagctcaccacccacctcatggctgcctgcccctgatgctacccaagtaccatgggaactcccacatcctcgactgagaatgaaagtaagccgaacaagtgtccaggaatgacatgctctctccccaaaggaaagcaatggtattcctgtgcaagcggggaggcgacaaaccaaaaagctatgaatcaaggacacacacagtcatgcacaaagagactactggctactgcttcctgtgccatctgcagcttcaagttctgcaggctggcagtgtgcttaccccaccttctcagaggaaattccttcaaccaagctgtctctcagctacagaagtccaaaaagcccagacgcttgcatttgcccaaagaggaccacatcctaagccaaggtgtagaccatgtcaacaaacagatgttggccccctctccttgccctccaatgtagcagcatgctgggacctcagttcaatgaggatgatggtatagagttttcattcattttattcagctttccaaggaatgtatatatggaagtcatcat

SEQ ID NO: 1886300 - DNA, 4001 bp, Homo sapiens
ggtctttctcacaggtgcagctcaagcacccagaaggtgtgagccaccgtgcccagccccatctcaaattcttaatgaagacaagcattccacagagggcctgaacacaaacctgccaaaccaagtcaagtctgtggagttgcgggaacacatggattcgcaattacattcccatcccagcatcccaagatcatcataaaataaaccgtatgcaccctataacacccaaaagaggctcacagtcatctctccacaacccagacagaagactgtgtggtaaatgcatgtgcagctttctccccttctaaccaccaggacccttctgggaccatgcggtttgggtttcctcctatggacatacaagttcagtgtggataccctctctgggctcctctgcagaaagcaaatcagcatcgccatcctcctgaagactgcctgcctgcccctgatgctatccaaacaccatgggaagtcctacgtcccttgacaaggatgaaagtgagtgaaagaggtgtctgggaatgaccttgtgctgtctccccatgtggaagcaatagtcttcctctggaggacaagggacccaaggtacaaattgacgacacacctggctgccttcaaccaagctgtctcttagttacaaacgtccaaaattcccagctactctcctctgccagaaaaagaccccaccccaagccttggtgcagtctgtgtcaacaaatggatgttgttcctctctctcgagcccctgatggagcagtgtgctggacctcagtttgacgaggatgacggtatagagttttcactcattttgttcagctttccaaggaatgtatatatggaagtcatcatcgatccacacacaatctccatccctgcaaatgaggaaactcagggtgctttgaaatggaatcacttacatccaggaggatcccaacagcctctggaggagcccccacaccatgtatgtccagggcttcctgccatctccaaggatcacacaagatgatgaccatccctcatgacacgggtttgccttttacaccaacactacctgcgaagtgcagaggataaagaagcatgcttcagaaaggcagacgggtgcacaggtcacgaggaccatgctatcttccccctgtggtttatctggaatatgcctgtctctggcttcccttgttcgtgaacccagaaatttatggacacaagtatgctcatcttggggatggcagccctcagaatgcatcatcccgctaaagagcactgatgttgagcatccttctcaatacccttgtttcaacacctgcaatgccagtcacaaaataatcaaggccctgcacccctaaagaggaagccattgacctgtatctggtttgggataacccagagcctcgctgtctatcagccccagtttggagaggaagcctgcctgttcatgccaaatatacatcctcacaatgcacagtacacaacatgggcacataggcacagaggctatgccgggtaaacacaactccaacatcctcagctaaggataaaatgagccaactaatggcaaaggtgtagccttttgctctccccgcaaccagaaggatctgtcttcctctgggggacttcggtacccagagcttggactcaaggacaaacttggccatcagaggcaggctaccagttaactcttcccatgcaatctgccattcacctagtcctccagacagcacatgagttatccagccctaggacacagaagtccttcaaacaaggtatgtcctgtgcatgggagatcctactcccctgtgtctaccattcacccaaagaaaccccatcctaagcctggatggtccccttggtgccacccatgtcaacgaatcaatgttggccctctctgtctagcccctgttggagtaatgtgctggacctcagttcgacgagaatgacggtatagagttttcactcattttgttcagctttccaaggaatgtatatatggaagtcatcatcgatccacacacaatctttgtttctgcaaatgaggaaaatcagggtgcactgggaaggaattgcttacattcaggagagatccaacagcctccaaggaagcctacaccatgtgtgtccaggagcttcctggcttctctgaggttaacatgagatgatgattgtccctcaccaacatggtcctggccaattcatcacttccacgtgggaggtgaagaggaaacacgggtgtgcttgagaaaatctgacagatgtgcagtacacaaaggccatgtcctctgatcccctgcagtgtatctggttgatacccaactctggctttacctgattttggacacagaaatgcatggacaagggctcaggtgcccttgtagtagtgcatcagcacactaaagagcactgacattgagcatccctctcaacacccttacatcgatacctataatgtcactcacaaaagctacagggccatgcaattttaatgaggaagccattgacgtacactgggctggggttaagctagagactccttgcctatcaggctcagcttgcagtgggaacctgtgtgttcctgccatatgcatgtactcacaatgcatggaacacaacatgaaagctatgccaggtgattggaactccactgttctcaaactaagaatgaaaaaaagaaaggcaaaagtatggccttgttctctcttcccaagcacaattacttgtcttcctccaggggttgtgggaacccagagccaggagtcaaggacaatcttggccacccagaggcaggctacaggttaactctccctgagcaacctgcacattcacctagtcccacggactgcatgtgtgctaccccagccttgtagacagaagtcctgtgcacatagcctcaactcccctgtgactctccttcacccaaacggaatcccttcctaagcctggaagaatgcttcatgcaacgggcatcaaaaaaaatgacagttgtccctctatagcccccggtggacctcagttcaactaagatgatagtacagagttcccactcattttgttcagctttccaaggaatgcatgtatggaagtcatcattggtccatgcacagtattcattcctgtaaaggaagaacattagggtcttttgagaaatgaacacataccgtatgaagggatccaccggcacccaaaggagcccatgccacatgtgtccatgggttccctgccatctccagggatctcccaagatgaagtttatcccttgcagcctctgtctttctttgcatgcccatgccacctgggaagtgcagaggaaaaacaggtgtgcttgagaaaggcaggcaggtacacagtttgcaagggccatgccattcctcctgccatgctgtattctatatctacctcccatgggtgacctctctttggggacttatgcacagatatacccaggcatgaaggtataaggcaggcatgcatttcaagggcaccatcaaactagagaacactaagcgcgaagaattctctcaataccacactttcaccacccctgactcaaaagccattctcttggccatcagagaagacaacagccatgaggatatttcaatggggagagctgcagggaaaaagtgttccagcacaaagaacaactttccttcggccttgaagctccttccacacactttgcattgagaaacacattcaatcacacatcaacctccacctctggccttcctcacaggtgcagctcagggaaccagaaaagcatcagacatgctgaatcctacagggcttctatggtgctgtccctgagaacacgatacgtcttaagccacttgcctgtgaacatggccacagagtacaaaactctccatcactggcctgtggatgacagccctcatacaacttcatgactgtttcacaaagaggactgttgtgaagaattaggaggaatttgaaaataacctaacatcataagataatggagaatttaagtgcagagaccttgacgggtcact

SEQ ID NO: 1886301 - DNA, 4001 bp, Homo sapiens
tctggcttccctggttatggataaaaccggaactgcaatgtccttgaacaatgatgaaaatgagtggaaaaaacagcaaaggtggggctttgtgctctcttcccaagcacaaacacctgtctttcctcaagggaatgatggaacccagagctaagactcaaggacaaatatggccaccagaggcaggctacaggctaagtcttcccatgtcaccttcacattcacatagtcctacagacggtgtgtgtgtgttaccttgcagagagaagtccctaaaacaatttcctatttatgagagatctcacaaccctgtgactaccccttgcagaaagggagcccctcctacaactgaacaaaccccttggtgcaacctgcagcaacaaatgaaacttggccctcactccagcccctgtaagagcaatgtgctggacctcagttcgacgaggatgacggtatagagttttcactcattttgttcagctttccaaggaatgcatgtatgaaagtcatcatcgatccatgcacagtcttcatgcccacaaaggagtaacattagggggttttggggaatagatacttaccagcacctgaagaagcccacaccacacatgtcctaggactccctgccacatccagtgatctgctaagaacaagatcatccattgtctccactggccttccttccatgcccacaccacctaggaagtacagaggcaacacgggtgtgcttgagaaaggcaggcaaacacataggtcacaagggccatgccattcaaccccctgtgggataccctatcgctacttcccatgggatacccatttcaggatgtgtgcatgggagtacccatgcatgaaggtttgaggcacacatacattttgagggcaccagcaagcttcagagcactaaatgtgaagaactctggacaccactcatttggtgccccgactcaaaagcccttcccttggccatcagagaagacagagaccatagagatatttgaatggggagagttttgggaaaaaaaaaactcttcctgtgcatagggcaattttcctttagccttgaagcatttttactgcaagcatccatcaacacacttcacattcaagaaacatgctcaatcacaattcagcctccacctcggggtctttctcacaggtgcagctcaagcacccagaaggtgtgagccaccgtgcccagccccatctcaaattcttaatgaagacaagcattccacagagggcctgaacacaaacctgccaaaccaagtcaagtctgtggagttgcgggaacacatggattcgcaattacattcccatcccagcatcccaagatcatcataaaataaaccgtatgcaccctataacacccaaaagaggctcacagtcatctctccacaacccagacagaagactgtgtggtaaatgcatgtgcagctttctccccttctaaccaccaggacccttctgggaccatgcggtttgggtttcctcctatggacatacaagttcagtgtggataccctctctgggctcctctgcagaaagcaaatcagcatcgccatcctcctgaagactgcctgcctgcccctgatgctatccaaacaccatgggaagtcctacgtcccttgacaaggatgaaagtgagtgaaagaggtgtctgggaatgaccttgtgctgtctccccatgtggaagcaatagtcttcctctggaggacaagggacccaaggtacaaattgacgacacacctggctgccttcaaccaagctgtctcttagttacaaacgtccaaaattcccagctactctcctctgccagaaaaagaccccaccccaagccttggtgcagtctgtgtcaacaaatggatgttgttcctctctctcgagcccctgatggagcagtgtgctggacctcagtttgacgaggatgacggtatagagttttcactcattttgttcagctttccaaggaatgtatatatggaagtcatcatcgatccacacacaatctccatccctgcaaatgaggaaactcagggtgctttgaaatggaatcacttacatccaggaggatcccaacagcctctggaggagcccccacaccatgtatgtccagggcttcctgccatctccaaggatcacacaagatgatgaccatccctcatgacacgggtttgccttttacaccaacactacctgcgaagtgcagaggataaagaagcatgcttcagaaaggcagacgggtgcacaggtcacgaggaccatgctatcttccccctgtggtttatctggaatatgcctgtctctggcttcccttgttcgtgaacccagaaatttatggacacaagtatgctcatcttggggatggcagccctcagaatgcatcatcccgctaaagagcactgatgttgagcatccttctcaatacccttgtttcaacacctgcaatgccagtcacaaaataatcaaggccctgcacccctaaagaggaagccattgacctgtatctggtttgggataacccagagcctcgctgtctatcagccccagtttggagaggaagcctgcctgttcatgccaaatatacatcctcacaatgcacagtacacaacatgggcacataggcacagaggctatgccgggtaaacacaactccaacatcctcagctaaggataaaatgagccaactaatggcaaaggtgtagccttttgctctccccgcaaccagaaggatctgtcttcctctgggggacttcggtacccagagcttggactcaaggacaaacttggccatcagaggcaggctaccagttaactcttcccatgcaatctgccattcacctagtcctccagacagcacatgagttatccagccctaggacacagaagtccttcaaacaaggtatgtcctgtgcatgggagatcctactcccctgtgtctaccattcacccaaagaaaccccatcctaagcctggatggtccccttggtgccacccatgtcaacgaatcaatgttggccctctctgtctagcccctgttggagtaatgtgctggacctcagttcgacgagaatgacggtatagagttttcactcattttgttcagctttccaaggaatgtatatatggaagtcatcatcgatccacacacaatctttgtttctgcaaatgaggaaaatcagggtgcactgggaaggaattgcttacattcaggagagatccaacagcctccaaggaagcctacaccatgtgtgtccaggagcttcctggcttctctgaggttaacatgagatgatgattgtccctcaccaacatggtcctggccaattcatcacttccacgtgggaggtgaagaggaaacacgggtgtgcttgagaaaatctgacagatgtgcagtacacaaaggccatgtcctctgatcccctgcagtgtatctggttgatacccaactctggctttacctgattttggacacagaaatgcatggacaagggctcaggtgcccttgtagtagtgcatcagcacactaaagagcactgacattgagcatccctctcaacacccttacatcgatacctataatgtcactcacaaaagctacagggccatgcaattttaatgaggaagccattgacgtacactgggctggggttaagctagagactccttgcctatcaggctcagcttgcagtgggaacctgtgtgttcctgccatatgcatgtactcacaatgcatggaacacaacatgaaagctatgccaggtgattggaactccactgttctcaaactaagaatgaaaaaaagaaaggcaaaagtatggccttgttctctcttcccaagcacaattacttgtcttcctccaggggttgtgggaacccagagccaggagtcaaggacaatcttggccacccagaggcaggctacaggttaactctccctgagcaacctgcacattcacctagtcccacggactgcatgtgtgctaccccagccttgtaga

SEQ ID NO: 1886302 - DNA, 4001 bp, Homo sapiens
aatcacaaatcaacctccacctctgggttttcctcaaaggtacagctcggggacccagaagagcacaagacatgctgaatcctacagggcttccaaggcactatgactaagaacaccatacatcttaagccacttggctgtgaacatggctgtggagtccaaaacttatccatcactggcctacagacactagccctgtcatacaattcaaggacaatttcacaaagacttgtgtgaattgtcacacacaattaggaggaatttgaaaataacctaacatcacaagccactaaggtatttaagcacagagaccttgctgggtcacatttctgagtagaagtcaccaggatacagaaacccacacactcattatcagacacctcaaatgcaccaaggaaaagtatcccacagaggttcctcaacacagaccttccaaaccaagtcagtctgcagagatgcaggagcacgtggacctacaattacattcccatcccagcaccctgaggtcatcatgaaatggactatgggcaccctacaatgcccgaaagaggctcacagtcgtcgctctgtgacccagacagaaggctgtgtggtacacgcatgcacggccctctccccttccactgccaggatgcttcaggggccacgggacttgggtttccccctcctatggacatacaattcaacgtggataccctctctgggcttctctgcagaaagcaaatcagtattgccaccctcctcacgactgcctgcccttgatgatacccatacaccacaggaactcccatgtccccgacttaggataaaagtgagccgaagaagtgcctgggaacaacattgtgctgtgtccccatgcagcagtaactgtcttcctctggggagtgcaggagccaaggggtatgaatcgataacacacatagccacacagagggaagagcttcaaccaagctgtctctcagccacagaagtccaaaatgcccagctactccacttcacccaaagacgatcccatcccaagcattgatgcagcctgtgtcaacaaatggatgttgtctctctctctagcccctgatgaacagtgtgctggacctcagttcgacgaggatgacggtatagagttttcactcattttgttcagctttccaaggaatgtatatatggaagtcatcatcgatccatgcacattattcatgcccaaaaatgaggaaaatcaggactttggaaagtggacacttacattcagaagggatacaacagcctccaaaggagcccacaccacatgtgtccaggggcctcatggcatctccaaggatcgcacaagaagaagattgtccctcgaagatacctcctttcctcatgccaacaccacctgggaagtgcagcggaaatacgagtgtgcttcaaaaaagcagacacattcacaggtcatgagggccgtgtcatctggccccctatggcatatctgctatctgcctgtctctggcttccctggttatggataaaaccggaactgcaatgtccttgaacaatgatgaaaatgagtggaaaaaacagcaaaggtggggctttgtgctctcttcccaagcacaaacacctgtctttcctcaagggaatgatggaacccagagctaagactcaaggacaaatatggccaccagaggcaggctacaggctaagtcttcccatgtcaccttcacattcacatagtcctacagacggtgtgtgtgtgttaccttgcagagagaagtccctaaaacaatttcctatttatgagagatctcacaaccctgtgactaccccttgcagaaagggagcccctcctacaactgaacaaaccccttggtgcaacctgcagcaacaaatgaaacttggccctcactccagcccctgtaagagcaatgtgctggacctcagttcgacgaggatgacggtatagagttttcactcattttgttcagctttccaaggaatgcatgtatgaaagtcatcatcgatccatgcacagtcttcatgcccacaaaggagtaacattagggggttttggggaatagatacttaccagcacctgaagaagcccacaccacacatgtcctaggactccctgccacatccagtgatctgctaagaacaagatcatccattgtctccactggccttccttccatgcccacaccacctaggaagtacagaggcaacacgggtgtgcttgagaaaggcaggcaaacacataggtcacaagggccatgccattcaaccccctgtgggataccctatcgctacttcccatgggatacccatttcaggatgtgtgcatgggagtacccatgcatgaaggtttgaggcacacatacattttgagggcaccagcaagcttcagagcactaaatgtgaagaactctggacaccactcatttggtgccccgactcaaaagcccttcccttggccatcagagaagacagagaccatagagatatttgaatggggagagttttgggaaaaaaaaaactcttcctgtgcatagggcaattttcctttagccttgaagcatttttactgcaagcatccatcaacacacttcacattcaagaaacatgctcaatcacaattcagcctccacctcggggtctttctcacaggtgcagctcaagcacccagaaggtgtgagccaccgtgcccagccccatctcaaattcttaatgaagacaagcattccacagagggcctgaacacaaacctgccaaaccaagtcaagtctgtggagttgcgggaacacatggattcgcaattacattcccatcccagcatcccaagatcatcataaaataaaccgtatgcaccctataacacccaaaagaggctcacagtcatctctccacaacccagacagaagactgtgtggtaaatgcatgtgcagctttctccccttctaaccaccaggacccttctgggaccatgcggtttgggtttcctcctatggacatacaagttcagtgtggataccctctctgggctcctctgcagaaagcaaatcagcatcgccatcctcctgaagactgcctgcctgcccctgatgctatccaaacaccatgggaagtcctacgtcccttgacaaggatgaaagtgagtgaaagaggtgtctgggaatgaccttgtgctgtctccccatgtggaagcaatagtcttcctctggaggacaagggacccaaggtacaaattgacgacacacctggctgccttcaaccaagctgtctcttagttacaaacgtccaaaattcccagctactctcctctgccagaaaaagaccccaccccaagccttggtgcagtctgtgtcaacaaatggatgttgttcctctctctcgagcccctgatggagcagtgtgctggacctcagtttgacgaggatgacggtatagagttttcactcattttgttcagctttccaaggaatgtatatatggaagtcatcatcgatccacacacaatctccatccctgcaaatgaggaaactcagggtgctttgaaatggaatcacttacatccaggaggatcccaacagcctctggaggagcccccacaccatgtatgtccagggcttcctgccatctccaaggatcacacaagatgatgaccatccctcatgacacgggtttgccttttacaccaacactacctgcgaagtgcagaggataaagaagcatgcttcagaaaggcagacgggtgcacaggtcacgaggaccatgctatcttccccctgtggtttatctggaatatgcctgtctctggcttcccttgttcgtgaacccagaaatttatggacacaagtatgctcatcttggggatggcagccctcagaatgcatcatcccgctaaagagcactgatgttgagcatccttctcaatacccttgtttcaacacctgcaatgccagtcacaaaataatcaaggccctgcacccctaaagaggaagccattgacctgtatctggtttgggata

SEQ ID NO: 1886303 - DNA, 4001 bp, Homo sapiens
ctttgcccaaacgagaccccatcctaagcctggacagaaccccttggtgcaatgggcatcatcaaatgaaatttgtccctctctctctagcccctgtaagagcaatgtgctggacctcagttcgacgaggatgacggtatagagttttcactcattttgttcagctttccaaggaatgtatataaggaagtcatcatcgatccaggcacagtctttgtccctgcagaggaggaatatctggagcttctgagaaatggacacttaccatcctaaggaatccactagcacctgaaggagcccatgccacacatatcaagggactccctatcatttccaggatctcccaagaccaagattgtccctcgtggccactggccttccttctatgcccacgccacctggaaagttcagaggaaaaacaggtgtgtttgacaacagcaggcaggtacacacattgcaagggccatacaattcatcccactgtggtgtatcgtgtatgtatctcccacaggcagcccctcttactgggacatgtgcatgggtgtaagcaggcatgaagctatcatgcacacaataattttgagggctccttccagctacagagcaccaagcataacaaactctctcaacaccattcatttgccacctctgaatcaaaagtcctgcttttggccatcagagaagatgaagcccatgaggatatttcagtggggacaggttcaaggaaagcctcttcttgagtgaagggcaattttcctttggtcctgaagtactttcaccccaggctcctttgacactcttcccactgagaaacatgctcaatcacaaatcaacctccacctctgggttttcctcaaaggtacagctcggggacccagaagagcacaagacatgctgaatcctacagggcttccaaggcactatgactaagaacaccatacatcttaagccacttggctgtgaacatggctgtggagtccaaaacttatccatcactggcctacagacactagccctgtcatacaattcaaggacaatttcacaaagacttgtgtgaattgtcacacacaattaggaggaatttgaaaataacctaacatcacaagccactaaggtatttaagcacagagaccttgctgggtcacatttctgagtagaagtcaccaggatacagaaacccacacactcattatcagacacctcaaatgcaccaaggaaaagtatcccacagaggttcctcaacacagaccttccaaaccaagtcagtctgcagagatgcaggagcacgtggacctacaattacattcccatcccagcaccctgaggtcatcatgaaatggactatgggcaccctacaatgcccgaaagaggctcacagtcgtcgctctgtgacccagacagaaggctgtgtggtacacgcatgcacggccctctccccttccactgccaggatgcttcaggggccacgggacttgggtttccccctcctatggacatacaattcaacgtggataccctctctgggcttctctgcagaaagcaaatcagtattgccaccctcctcacgactgcctgcccttgatgatacccatacaccacaggaactcccatgtccccgacttaggataaaagtgagccgaagaagtgcctgggaacaacattgtgctgtgtccccatgcagcagtaactgtcttcctctggggagtgcaggagccaaggggtatgaatcgataacacacatagccacacagagggaagagcttcaaccaagctgtctctcagccacagaagtccaaaatgcccagctactccacttcacccaaagacgatcccatcccaagcattgatgcagcctgtgtcaacaaatggatgttgtctctctctctagcccctgatgaacagtgtgctggacctcagttcgacgaggatgacggtatagagttttcactcattttgttcagctttccaaggaatgtatatatggaagtcatcatcgatccatgcacattattcatgcccaaaaatgaggaaaatcaggactttggaaagtggacacttacattcagaagggatacaacagcctccaaaggagcccacaccacatgtgtccaggggcctcatggcatctccaaggatcgcacaagaagaagattgtccctcgaagatacctcctttcctcatgccaacaccacctgggaagtgcagcggaaatacgagtgtgcttcaaaaaagcagacacattcacaggtcatgagggccgtgtcatctggccccctatggcatatctgctatctgcctgtctctggcttccctggttatggataaaaccggaactgcaatgtccttgaacaatgatgaaaatgagtggaaaaaacagcaaaggtggggctttgtgctctcttcccaagcacaaacacctgtctttcctcaagggaatgatggaacccagagctaagactcaaggacaaatatggccaccagaggcaggctacaggctaagtcttcccatgtcaccttcacattcacatagtcctacagacggtgtgtgtgtgttaccttgcagagagaagtccctaaaacaatttcctatttatgagagatctcacaaccctgtgactaccccttgcagaaagggagcccctcctacaactgaacaaaccccttggtgcaacctgcagcaacaaatgaaacttggccctcactccagcccctgtaagagcaatgtgctggacctcagttcgacgaggatgacggtatagagttttcactcattttgttcagctttccaaggaatgcatgtatgaaagtcatcatcgatccatgcacagtcttcatgcccacaaaggagtaacattagggggttttggggaatagatacttaccagcacctgaagaagcccacaccacacatgtcctaggactccctgccacatccagtgatctgctaagaacaagatcatccattgtctccactggccttccttccatgcccacaccacctaggaagtacagaggcaacacgggtgtgcttgagaaaggcaggcaaacacataggtcacaagggccatgccattcaaccccctgtgggataccctatcgctacttcccatgggatacccatttcaggatgtgtgcatgggagtacccatgcatgaaggtttgaggcacacatacattttgagggcaccagcaagcttcagagcactaaatgtgaagaactctggacaccactcatttggtgccccgactcaaaagcccttcccttggccatcagagaagacagagaccatagagatatttgaatggggagagttttgggaaaaaaaaaactcttcctgtgcatagggcaattttcctttagccttgaagcatttttactgcaagcatccatcaacacacttcacattcaagaaacatgctcaatcacaattcagcctccacctcggggtctttctcacaggtgcagctcaagcacccagaaggtgtgagccaccgtgcccagccccatctcaaattcttaatgaagacaagcattccacagagggcctgaacacaaacctgccaaaccaagtcaagtctgtggagttgcgggaacacatggattcgcaattacattcccatcccagcatcccaagatcatcataaaataaaccgtatgcaccctataacacccaaaagaggctcacagtcatctctccacaacccagacagaagactgtgtggtaaatgcatgtgcagctttctccccttctaaccaccaggacccttctgggaccatgcggtttgggtttcctcctatggacatacaagttcagtgtggataccctctctgggctcctctgcagaaagcaaatcagcatcgccatcctcctgaagactgcctgcctgcccctgatgctatccaaacaccatgggaagtcctacgtcccttgacaaggatgaaagtgagtgaaagaggtgtctgggaatgaccttgtgctgtctccccatgtggaagcaat

SEQ ID NO: 1886304 - DNA, 4001 bp, Homo sapiens
cctgcaatttatctactatctgcctgtctctggcctcccctgttcatggaggcagaaatgcatggatgcagggatgctcgtctcggggctgggggcccctgcagtacaccatcctgctaaagagcactgacattgaccatccctctcaacatcactgcttcaacgcctgcaatgccactcacaaaagccttgcggccctgaacccctaaggaggaaggctttaacctaccatgagtttaggataagccagggactcctttggtatcagaaccagcttggagcaggagctcacctttacgtgcaaaatacatgtcctcaaaacacgtgggatacaacacgggcacaaaggcacataggctatgcctggtgaccaaaactctaatgtcctcaaccaaggacaaagttagccaacaaatgacaaagatgcggccttgtacccacctctcaaccacacagatctgttttcctccgtgggacctgagaacccagaacaaggactcaagaacaaattggcaaccagaggcgggctaccagctaactcttgctaggccacatggacattcacctagtcctgcagacaatgcatgtgttacccaccctcactgacagtccttcaaacaagaaatttcctatacatgggagccaccactctcctgtgacccccatcacccataagagaccacattctaagcctgaacagacgccttgatataacccatgtcaacaaacggatgttggccttctctgtctagcccctgttggagtaatgtgctggacctcagttcgacgaggatgacagtatagagttttcactcattttgttcagctttccaaggaatgtatatatggaagtcatcatcgatccacacacaggtttcatccctgcaaatgaggaaactcagggtgctttggaatgaaatcacttacattcaggagggtttcaacagcctgtgaaagagtccacaccatgtgtttccaggggcttcctgccatctccaagaatcagacaagatgacaatcattcctcatgatacaagcctgcctttcatgccaacaccacctgtgaagtgcagaggaaacacaggcgtgcttcagaaaggcagacaggttgcacacgtcacgagggccatgttatccagtcccctgtgacacatctgctatttgcctgtctatggcctcgcctgttcatggacacagaaatgcatggacacgcagatgctcgtcccagggccaggggccctcgaggtgcaccatcctgctaaagagcactgatgttgggcatccctctcaacatcgttgcttcaacacctgcaatggtgctcacaaaagccttggggccatgaatcctgaaagaggaagccactgacctaaatcaggtttggaataacccagagactccttgcctgacagccccagcttggagcagaagcctgcctgatcatgcaatacacaaatcctcataacatatgggatatgacatggaaatgcggcaaagaggctatgctgggtgcctggaaatacaacgtcctccgccaaggacaaaacaagctaacaagtgagaatagtgtaggcttgtgctctccccgcaaccaggggatctgtcttcctctgggaatccagagcttggactcaagaacaaacttggccaccagaggcagactacccacaaactctttccatgccacctgccattcacctagtccttcagacagtaggtgagttatcccgcccagggagaaagaagtccttcaaataaggaatttcctgtgcatgggagctcccacttccctgtgacttccaattgcccaaagggaccccatcctaagcctggatggaccccttgatgcaacccatatcaacaaacgaatgttggccctctctgtctagcccctgatggagtaatgtgctggacctcagttcgacgaggatgacggtatagagttttcactcattttgttcagctttccaaggaatgtatatatggaagtcatcatcgatccacgcacagtgtttgtccctgcaaatgaggaaaatcagagcgctctgggaaagaactgcttacatgcagaagggatccaacaacttccaaagaagcctttgccatttgtgtccaggggtttcctggtatccctgcggctcacacaagataacaattgtccctcaccaacatgggcctgccttccatgccaatgctacctgggaggtgtagaggaaacacaagcgtgcttcagaaaggcagacaggtacacaggtgacaagggccatgtcatccagccccctgcgatacatctggaatctggctgtctggcttcaactatttatggacacagaaatgcacgtacatagggatgcacgtctgggttcagggtgcccttatagtgcatcatctcgctaaagagcactaatgttgagcatccctctcaacacccttgcttccacacctgcaatgcagctcacaatagcctcggggccatgcaatcctactgggaagactttgatctacaccgggatcaggataagccagagtctcattgcctatcagactcagcttggagtggcagcctatgtgttcatgccacatgcatgtgctcacaatgcatgggacacaacatgggcacgctggcctgaaagctatgcctgctgaccacaacttcattgtcctcaatggacgatgaaatgagcagaaaaacaacaaaagtatggtactgtgctgtcttctcaagcaaaatcacctatcctcctccaaggaacatggaaatccagagccaggacccaaggacaaactgccatgcagaggcaggctacaggctaactcttcctgggcaactgcacattcacctactcctgcggacagcatgtgtggtaccctggcctcacaaatagagtccttcaaacaaggaatctcctgtgtacatagcctccactcccctgccattctcctttgcccaaacgagaccccatcctaagcctggacagaaccccttggtgcaatgggcatcatcaaatgaaatttgtccctctctctctagcccctgtaagagcaatgtgctggacctcagttcgacgaggatgacggtatagagttttcactcattttgttcagctttccaaggaatgtatataaggaagtcatcatcgatccaggcacagtctttgtccctgcagaggaggaatatctggagcttctgagaaatggacacttaccatcctaaggaatccactagcacctgaaggagcccatgccacacatatcaagggactccctatcatttccaggatctcccaagaccaagattgtccctcgtggccactggccttccttctatgcccacgccacctggaaagttcagaggaaaaacaggtgtgtttgacaacagcaggcaggtacacacattgcaagggccatacaattcatcccactgtggtgtatcgtgtatgtatctcccacaggcagcccctcttactgggacatgtgcatgggtgtaagcaggcatgaagctatcatgcacacaataattttgagggctccttccagctacagagcaccaagcataacaaactctctcaacaccattcatttgccacctctgaatcaaaagtcctgcttttggccatcagagaagatgaagcccatgaggatatttcagtggggacaggttcaaggaaagcctcttcttgagtgaagggcaattttcctttggtcctgaagtactttcaccccaggctcctttgacactcttcccactgagaaacatgctcaatcacaaatcaacctccacctctgggttttcctcaaaggtacagctcggggacccagaagagcacaagacatgctgaatcctacagggcttccaaggcactatgactaagaacaccatacatcttaagccacttggctgtgaacatggctgtggagtccaaaacttatccatcactggcctacagacactagccctgtcatacaattcaaggacaatttcacaaagacttgtgtgaattgt

SEQ ID NO: 1886305 - DNA, 4001 bp, Homo sapiens
cctgtgacacatctgctatttgcctgtctatggcctcgcctgttcatggacacagaaatgcatggacacgcagatgctcgtcccagggccaggggccctcgaggtgcaccatcctgctaaagagcactgatgttgggcatccctctcaacatcgttgcttcaacacctgcaatggtgctcacaaaagccttggggccatgaatcctgaaagaggaagccactgacctaaatcaggtttggaataacccagagactccttgcctgacagccccagcttggagcagaagcctgcctgatcatgcaatacacaaatcctcataacatatgggatatgacatggaaatgcggcaaagaggctatgctgggtgcctggaaatacaacgtcctccgccaaggacaaaacaagctaacaagtgagaatagtgtaggcttgtgctctccccgcaaccaggggatctgtcttcctctgggaatccagagcttggactcaagaacaaacttggccaccagaggcagactacccacaaactctttccatgccacctgccattcacctagtccttcagacagtaggtgagttatcccgcccagggagaaagaagtccttcaaataaggaatttcctgtgcatgggagctcccacttccctgtgacttccaattgcccaaagggaccccatcctaagcctggatggaccccttgatgcaacccatatcaacaaacgaatgttggccctctctgtctagcccctgatggagtaatgtgctggacctcagttcgacgaggatgacggtatagagttttcactcattttgttcagctttccaaggaatgtatatatggaagtcatcatcgatccacgcacagtgtttgtccctgcaaatgaggaaaatcagagcgctctgggaaagaactgcttacatgcagaagggatccaacaacttccaaagaagcctttgccatttgtgtccaggggtttcctggtatccctgcggctcacacaagataacaattgtccctcaccaacatgggcctgccttccatgccaatgctacctgggaggtgtagaggaaacacaagcgtgcttcagaaaggcagacaggtacacaggtgacaagggccatgtcatccagccccctgcgatacatctggaatctggctgtctggcttcaactatttatggacacagaaatgcacgtacatagggatgcacgtctgggttcagggtgcccttatagtgcatcatctcgctaaagagcactaatgttgagcatccctctcaacacccttgcttccacacctgcaatgcagctcacaatagcctcggggccatgcaatcctactgggaagactttgatctacaccgggatcaggataagccagagtctcattgcctatcagactcagcttggagtggcagcctatgtgttcatgccacatgcatgtgctcacaatgcatgggacacaacatgggcacgctggcctgaaagctatgcctgctgaccacaacttcattgtcctcaatggacgatgaaatgagcagaaaaacaacaaaagtatggtactgtgctgtcttctcaagcaaaatcacctatcctcctccaaggaacatggaaatccagagccaggacccaaggacaaactgccatgcagaggcaggctacaggctaactcttcctgggcaactgcacattcacctactcctgcggacagcatgtgtggtaccctggcctcacaaatagagtccttcaaacaaggaatctcctgtgtacatagcctccactcccctgccattctcctttgcccaaacgagaccccatcctaagcctggacagaaccccttggtgcaatgggcatcatcaaatgaaatttgtccctctctctctagcccctgtaagagcaatgtgctggacctcagttcgacgaggatgacggtatagagttttcactcattttgttcagctttccaaggaatgtatataaggaagtcatcatcgatccaggcacagtctttgtccctgcagaggaggaatatctggagcttctgagaaatggacacttaccatcctaaggaatccactagcacctgaaggagcccatgccacacatatcaagggactccctatcatttccaggatctcccaagaccaagattgtccctcgtggccactggccttccttctatgcccacgccacctggaaagttcagaggaaaaacaggtgtgtttgacaacagcaggcaggtacacacattgcaagggccatacaattcatcccactgtggtgtatcgtgtatgtatctcccacaggcagcccctcttactgggacatgtgcatgggtgtaagcaggcatgaagctatcatgcacacaataattttgagggctccttccagctacagagcaccaagcataacaaactctctcaacaccattcatttgccacctctgaatcaaaagtcctgcttttggccatcagagaagatgaagcccatgaggatatttcagtggggacaggttcaaggaaagcctcttcttgagtgaagggcaattttcctttggtcctgaagtactttcaccccaggctcctttgacactcttcccactgagaaacatgctcaatcacaaatcaacctccacctctgggttttcctcaaaggtacagctcggggacccagaagagcacaagacatgctgaatcctacagggcttccaaggcactatgactaagaacaccatacatcttaagccacttggctgtgaacatggctgtggagtccaaaacttatccatcactggcctacagacactagccctgtcatacaattcaaggacaatttcacaaagacttgtgtgaattgtcacacacaattaggaggaatttgaaaataacctaacatcacaagccactaaggtatttaagcacagagaccttgctgggtcacatttctgagtagaagtcaccaggatacagaaacccacacactcattatcagacacctcaaatgcaccaaggaaaagtatcccacagaggttcctcaacacagaccttccaaaccaagtcagtctgcagagatgcaggagcacgtggacctacaattacattcccatcccagcaccctgaggtcatcatgaaatggactatgggcaccctacaatgcccgaaagaggctcacagtcgtcgctctgtgacccagacagaaggctgtgtggtacacgcatgcacggccctctccccttccactgccaggatgcttcaggggccacgggacttgggtttccccctcctatggacatacaattcaacgtggataccctctctgggcttctctgcagaaagcaaatcagtattgccaccctcctcacgactgcctgcccttgatgatacccatacaccacaggaactcccatgtccccgacttaggataaaagtgagccgaagaagtgcctgggaacaacattgtgctgtgtccccatgcagcagtaactgtcttcctctggggagtgcaggagccaaggggtatgaatcgataacacacatagccacacagagggaagagcttcaaccaagctgtctctcagccacagaagtccaaaatgcccagctactccacttcacccaaagacgatcccatcccaagcattgatgcagcctgtgtcaacaaatggatgttgtctctctctctagcccctgatgaacagtgtgctggacctcagttcgacgaggatgacggtatagagttttcactcattttgttcagctttccaaggaatgtatatatggaagtcatcatcgatccatgcacattattcatgcccaaaaatgaggaaaatcaggactttggaaagtggacacttacattcagaagggatacaacagcctccaaaggagcccacaccacatgtgtccaggggcctcatggcatctccaaggatcgcacaagaagaagattgtccctcgaagatacctcctttcctcatgccaacaccacctgggaagtgca

SEQ ID NO: 1886306 - DNA, 4001 bp, Homo sapiens; identical to SEQ ID NO: 1886303

SEQ ID NO: 1886307 - DNA, 4001 bp, Homo sapiens; identical to SEQ ID NO: 1886304

SEQ ID NO: 1886308 - DNA, 4001 bp, Homo sapiens
ccctcatgcacatgtgtttcccaacaccgcaacaggaggccatagtctgcagcctccagacctgaagcccctgcaacccgaaggctcaagaccaaggtcttcaatcagtaggatgtaaaatcaggccaggaggacataggcctgaggtccctcacctaacagccaccacccctggagtgagcacatgctcctcctcatggggcatctgatgttgtgacctgacactgtctctggctgcactcccaggtgaggctcacttggcggaaaaccaaccacaaccagcacgtgagggcgccttcacaattaccaacccataggtctgaaaatggcatcaagccagaggcaatcttcccaacctagccaaaggatctcaagacacgggcttcctccactcagtccacatgcccgcactgcaccttcaggacaaccgaagggaatggctgttttccaacaggacgtcccttccccaaggaccaggttgacaggacacactgccttccatggtccttgcactggttacacccacagggcttctctgcacagaactctgaggcaacatcccatcatgcagccaacttgactgcattaccacccatcccaactcctgcaagtcaacactgcctcagcaccatcaccaggtctacaagtaaacagctactaatgagctgcgatctgcagaaccaccaatcccttccaacattcctaatgcagtcgtgggcccctcaacatgatatggctgtcctggctgcactgtgacatcaaactgtttaagggagctgaaatgcttcatcacccttagggtgtagcagaatgcaacactggaacatcaccaacatgggaggtgcaggggcatcccaagtcaacgaactctccatggcaggcccctagaatgttgcctggaatgcacccggatctccatggatagccacgtgtgaccaatgcccacagcagagttcctggccagggccaggacacataccctctggacgccttcaggatggaagctgctttcaaagcaggaaagaggatccagagccatatttgctcacacgagctgcagcaggtgtggccgctcggcaatggcgggccaagagacgacttccaggaagatgtgcccaacagtggagcccactactctgtcaggaagacgagaagtgaccaagggccaggagcacaagtctgacccttgtattccctggaacctgccctctgacacctctgctggccaacttgtcatccactagagaaataaatggaaagcccatcaacgctgaacaacagcccaagactgctgatgacacacatgtccacataagccccctaccacctcttctgtggagtaccttccagtccaggcttccaccatagcaccaggggcatctcacggctcaggggatgaagaaatccctgctggggggcctccatgactggatgctgggtggagggccaaagaggctttggctctctgtcacaacaccctttgttatacactgtcccccatcacccttggcactcccttgtcctcagctaatcaaaaatcaggaccaacatctgcctgaggcctgggccttgtgctctccccggcaagaaaacaaggactcagtcctctgctcagagacgcctgccacgaggtccgcgtctcccttcctaggagctcaccaagccaagatcaggcgcacactaccctaggcctgcgatatttctgtctgcttccatggccaccaggccatcacagagcagccgttccccccaggactctcctacctgtgtacctcacaaaaagggaatgttcctaatgagcatttgatgggagactttggctgtggatgccttgggtggtggaacctatgggaatcagtggaagttgtccctcactcctacagtccccggggaaggcaacgtgctggacctcagttccgatgagaatgacggtatgagttttcactcattttgttcagcttttccaaggaatgttttttttggggactcatcatcgatccaagcacatttgaaggggcaaggggcaggatatttgacaccacaggctgggcagtgggtgagccaatgaccttaaagaccttcggccccactagagcgatgccactgagcaatgagcacagactatccactctaggagaggaactcgccatgccattagtggttagctgagaaactgctccttgcgggtcttggaaatccgaaagacaccctcattcagcatactgggcagagaaatgcttaccgtcctgagccacctgccagcacacagtgcgccatggatgccaggccacacagaatccaggactccgtgtggccttcgttgctcagaagaattgagcatcttccttccagcagttaccacacctcccacagcaactgcctctgagaagtgtaaagaaatcaaataaacgcttgagaaatgggctcaggtccactggtcaacacttcaatcccattctttcccgttgggcaacttgcacacccgttattccttggcttccacgactgacctccatctccatgaatatatcttacatgtgttactctgtggatacctaaaagtgcacgtggtcacatacgcccattgctgcatgtatttgcctgtggctcggcatgcctctgtgtgtgtgtgtgtgtgtgtatgaatgtgtgtgtgtgtgtctccctcatgcacatgtgtttcctaacatgtgtgtttcccaacactgcaacaggcagtcatagtctgcagcctcctggcctgacaccacgccaacccaacagctgaagaccaaggccttcaatcagtaggatgtgaattttgacctggagaccatgcggacataggcccaaggtggctcgcctaccagtcaactcccctggtgtgagtacacactcctcctcacgggacatctgatgtcctgagcagacactgtctctagccgccctctcaggtgaggcgtacctggtggaaaaccaatcacaacctgtgctggagggcgcctttgcaatggccagcacatcagcctgaaacttggcgtcaaggccagaggtggtcttcccaatctagccaaaggacctcaagacacagccttcctcccctccactcagtccatgtgcctgcactatgccctctcgacacacaaacggaatggctgcttttccaatgggacgtcccccctaccgatgtcccaaggaccaggcggatgggatacactgcctttcattttccttgcattggacacacccacagggctatcctgtactgacctctgaggcaacatcccattatgcagccaacttgactgcactactacccgccgcaatgcctcaaagtcaacactacctgaacaccaccactgggtctacatgcatgcagctagtgagtgagctgcgagctcagaaccacccatcctttccaacattcctaagccatctgcatgcccttcaacatggcatggctgtcctggctgcgctgagacttcaaaccggttaagggagccaaaacagttcatcacccctagggtgtagtggactccaacacttaaatattgccaacatgcagaggtgtgaggcatcccaagtaaaaggactctgtggcagcacccctgggattgcacccgtgttgcctggaatgcacacagacctccatggatagctccaagtgtgacgagtacctacggcacagacttgggccagagccagggtcagggcacattcactctggaccttcaggactgaagctgctttccaagcaggaaagaggatccagagcagtatttgctcatacaagctgcagcaggtggagccgcccaataatggcgggccaagagaccatttataggaagatttgcacaatggaggagcccattactctcctgggaagactggaagtgacccagggccacgggcaccaactcgatcctcgtgctccccaggacctggcctcgaagacccctgctggccaacctgtcttccaccagaaaaatccatgggaagcccatcacccctgaatgacagcc

SEQ ID NO: 1886309 - DNA, 4001 bp, Homo sapiens
ccaaaaggctcgagacccaaggccttcaatcagtaggatgcgaattttgacctaggggtcagacagacattggcctgatgtccctcgactaacagccagcacccctggcggtgcaagcacacagtcctccttacggggcatataatgtcgtgaccagacactgtctctcgccgctctcccaggtaaggcacacctgacaccaaaccaaccaaaacttgcactggaaggcacctttgcaatggccaccacgttggtcttaaacacggcacacggcatcaaggccagagacagtcttctgaacccagccaaaggacctcaagacacacacttccttcctccaatcagttcacatgcccgcaccatgccttcaggacacacaaagggaatggctagttttccaacaggacattcctgcctgaacccctaaagacaaggtggacaggacacaccacctttcattttccttgcattggacacacctacagggcttcgctgcaccgacatctgaggcaacatcccatcatgcagccaacttaactgcactaccaaccaccccaacgtcagcaagtcaacaccatctcaacaccatcaccaggtttacatgcaaacagctatgaagtgagctgcgagacatagaaccaccaaccctttccgactgtcctaagtcaactatgtgccatgccaatgtggcacggctgtcctggctgcactatgatgtcaaaccggctaagtgagctgaaacgcttcattgccctgaggatgtagcagaatccaatactggaacatcgccaacacacaaaggcgaggaggcatcccaaatcaagagactctccacggcagtgcccctggtattgcacatgtgttgcctggaatgcacaaggacctccatgaatacgccaagtgtgactggaccccatcggagagtcccaggccagggccagggccagggcacattccctctggacgcctttgggatggaagctgctttcaaagcgggaaatgggatccagagcagtatttgctcacacgagctgcagcaggtggggccgcctggcaatggcgggccaagagaccatttccaggaagatggacacttctactactctgccaggaagaatggagtgacccaggaccacaggcatcagcccgaccctcatgctccctaggacctgcccttgaagacccccaatggccaacctgtcatccaccagagaaatccctggaaagcccatcaccaccaaatgacagcccaagaccactgatggcatgcatgtccacgtgagccctctacaaccttttctctggggtaccttcctgcccaggcttggccacaacaccacaggaatctcacagctcgagaggtgaaaaaagtctgtgctgggggccccctgggactgaccgtgaaaggagggacagaaaggctttagctgtctgccacaacatccattgctgtgcgctctcccctatcacccttggcactcccctgtcctcagctaaccaaagatcaagaccaaggactgtctgaggcctgggcctcatgctctccttgaaagcagaactggaacacgtacctggtcctctatgcaaggatgcccgcagcgatttccaggtcccccttcctgggagctcaccaagccgaggccagccccacactcccctaagcctgcgacatttccatccacttccacggccactatgccatcacagagcagccagtcaccctatgactctctgacctgtgtacctgacacagaggaaatgttcctttttttgggaggggagtggggggaatgtttgtaatatgacaggagaccttcacctgtgaacgccatgggtgttagaacctatagggactagtggaagttgtccctcactagtaaaggccccagaggaagcaatgtgctggacctcagttccgatgagaatgacggtatgagttttcactcattttgttcagcttttccaaggaatgttttttttggaggactcatcatcgatccaaccacattcaaagaggcaggacatttgacactgcaggctgggcagtgtgcgagctgatgaccttaaaggcctcgacaatgcccttaatggccagctgaaaaacttccttgtgggactcagaaattctaaagacaccctcactcatcatgcggggcagaggaatgcttactgtcctgagccatccaccagcacagggtgcactgtggatgcgaggccacaccgactccacgactccatggagattccactgctcggaagaactgaccatctgtcatgccagcaggcggtgggcctctcaaggcaactgcccctgaaaagtgtaaagaaatcaaatgcacgcttgagaaataggcccacgtccactggtcaccacgtcaatgtcattctttcccacggggcaactcgtacccctgcttctccttggaccctatgactgacctccatctccatattcataccactactctgctgggaggaccagaagtgacccagggccatggacaccatcccgacactcactcgcccagaaacatgccttcaaagacccattcataccttacctgtgtcactccatggacacctataagtgtgtgtggcctaacgattgcacacacccattgctgcatctatttgtctgtggctgtgcacacatgtgtgcatgagtgtgtctctgtgtggatgtgtgtccccctaatgcacatgtgtttcccaacaccccagcgggcagtcatagtctgcagcctccagaccggaaccaaccccactaaaccaaagactcaagaccccagccttcaatcaataggatgtgaactttgacctcaaggccatgaggaaagaggtccaaggtcccttgcctaacagccagcacccctggcacgagcacatgctcctcctcacagagcatctgatgtcatgaccagacactgtctctggcccctttaccaggtgaggtgcacctgatggaaaaccaaccacaaccagcactggagggcgcctttgcaatggccagcacatcactctgaaacagcatcagggccacaggtagtcttcccaacctagccaaaggacctcaagacacacgcttccttccctccactcaatccatgtgcctgcaccatgccctctggacactcaaagagaatggctgcctttccaaaaggacatctccacctgaccccccaaagaccaggcagacaggacattgtcattatccttgcattagacacacccacagagtttccctgcaccaacctctgagacaatatcccatcactcagccagcttgaccatgctaccacccaccccaatgccagcaagtcaacactgcatcaacaccacccggtctacatgcatgcagctactaagtgagctgcaagatgtacgaccaccaatcctttccaatttttctgtgccaactgtatgcccttgaaagtggcatggctgtcctgcctgctctgtgacttcaaaccagctaagggagctgaaatgctttatcacgcctagggacttttggagtccaacactggaacatcgccagcacacagtcacatggagacatgccaagtcaagactctctgtggcaatgcccctgggattgcaaacacactgctcagaatgcacatagatctccacgggtagcctcatgcatgactggagcccaaaggagagtcccaggccagggacagggcacattcgctctggacacttttgggatggaaagcgggaatgatacagagcagtatttgctcacgagagcagcagcaggtggggccacccgacaacgaaggccaagagaccatttccaggaagatgtgcacaacagtagagccccctactctgctgggaacaacagaagtgacccagggccatggacaccatcctcacactcactcacccagagacatgccctcaaagacccaccctggctgacctgtcatccaccagagaaatccatggaaagcctatcactgccaaattaaagcccaatgcacactcatgtc

SEQ ID NO: 1886310 - DNA, 4001 bp, Homo sapiens
atccagctccctgcaatacatctgctgtctgcctgtctctggcctcacctgttcataaacacagaagttaacggacacaaggatgctcatctgggggtcaggagccttcagagtacgtcatcccactaaagagcatgttcagcatccttctcaacatcgttgcttcaatacctacaatgatactcacaaaagccttgggaccctgggcccctaatgagaaaggctttaacctatattgggtttaggataagccagggactccttgggtatcagaagcaatgagcaggagctcactagttcatgcaatgtacatgtcccccaaacacatgggatacaacacgggcacacaggcacataggctatgcctggtgaccaaaactctaatgtcctcaaccaaggacaaagttagccaacaaacgacaaagatgtggccttgtattctcctcccaaccagacaaatctgtttccttccaggaactcagaacaaggactcaagaacaaattggcaaccagaggcgggctaccagctaactcttgctaggccacatggacattcacctagtcctgcagacaatgcatgtgttacccaccctcactgacagtccttcaaacaagaaatttcctatacatgggagccaccactctcctgtgacccccatcacccataaaagaccccatcctaagcctgaacggatgccttggtataacccatgtcaaaaaacagatgttggccctctctgtctagcccctgttggagtaatgtgctggacctcagttcgacgaggatgacggtatagagttttcactcattttgttcagctttccaaggaatgtatatgtggaagtcatcatcgatccacgcacagtatttgtccctgcaaatgaggaaactcagagtgctctgggaaagaagtgcttacattcagaagggatccaacaacttccgaaggagcctttgccatttgtgtccaggggcttcctggtatctccgcagctcacacaaggtaacaattgtccctcaccaacatgtgcctgccctccatgccagtgctacctgggaggtgcagagttaacacaggcgtgcttcagaaagacagacaggtgcacaggtcacgagggccatgtcatccagtcccctgcaatttatctactatctgcctgtctctggcctcccctgttcatggaggcagaaatgcatggatgcagggatgctcgtctcggggctgggggcccctgcagtacaccatcctgctaaagagcactgacattgaccatccctctcaacatcactgcttcaacgcctgcaatgccactcacaaaagccttgcggccctgaacccctaaggaggaaggctttaacctaccatgagtttaggataagccagggactcctttggtatcagaaccagcttggagcaggagctcacctttacgtgcaaaatacatgtcctcaaaacacgtgggatacaacacgggcacaaaggcacataggctatgcctggtgaccaaaactctaatgtcctcaaccaaggacaaagttagccaacaaatgacaaagatgcggccttgtacccacctctcaaccacacagatctgttttcctccgtgggacctgagaacccagaacaaggactcaagaacaaattggcaaccagaggcgggctaccagctaactcttgctaggccacatggacattcacctagtcctgcagacaatgcatgtgttacccaccctcactgacagtccttcaaacaagaaatttcctatacatgggagccaccactctcctgtgacccccatcacccataagagaccacattctaagcctgaacagacgccttgatataacccatgtcaacaaacggatgttggccttctctgtctagcccctgttggagtaatgtgctggacctcagttcgacgaggatgacagtatagagttttcactcattttgttcagctttccaaggaatgtatatatggaagtcatcatcgatccacacacaggtttcatccctgcaaatgaggaaactcagggtgctttggaatgaaatcacttacattcaggagggtttcaacagcctgtgaaagagtccacaccatgtgtttccaggggcttcctgccatctccaagaatcagacaagatgacaatcattcctcatgatacaagcctgcctttcatgccaacaccacctgtgaagtgcagaggaaacacaggcgtgcttcagaaaggcagacaggttgcacacgtcacgagggccatgttatccagtcccctgtgacacatctgctatttgcctgtctatggcctcgcctgttcatggacacagaaatgcatggacacgcagatgctcgtcccagggccaggggccctcgaggtgcaccatcctgctaaagagcactgatgttgggcatccctctcaacatcgttgcttcaacacctgcaatggtgctcacaaaagccttggggccatgaatcctgaaagaggaagccactgacctaaatcaggtttggaataacccagagactccttgcctgacagccccagcttggagcagaagcctgcctgatcatgcaatacacaaatcctcataacatatgggatatgacatggaaatgcggcaaagaggctatgctgggtgcctggaaatacaacgtcctccgccaaggacaaaacaagctaacaagtgagaatagtgtaggcttgtgctctccccgcaaccaggggatctgtcttcctctgggaatccagagcttggactcaagaacaaacttggccaccagaggcagactacccacaaactctttccatgccacctgccattcacctagtccttcagacagtaggtgagttatcccgcccagggagaaagaagtccttcaaataaggaatttcctgtgcatgggagctcccacttccctgtgacttccaattgcccaaagggaccccatcctaagcctggatggaccccttgatgcaacccatatcaacaaacgaatgttggccctctctgtctagcccctgatggagtaatgtgctggacctcagttcgacgaggatgacggtatagagttttcactcattttgttcagctttccaaggaatgtatatatggaagtcatcatcgatccacgcacagtgtttgtccctgcaaatgaggaaaatcagagcgctctgggaaagaactgcttacatgcagaagggatccaacaacttccaaagaagcctttgccatttgtgtccaggggtttcctggtatccctgcggctcacacaagataacaattgtccctcaccaacatgggcctgccttccatgccaatgctacctgggaggtgtagaggaaacacaagcgtgcttcagaaaggcagacaggtacacaggtgacaagggccatgtcatccagccccctgcgatacatctggaatctggctgtctggcttcaactatttatggacacagaaatgcacgtacatagggatgcacgtctgggttcagggtgcccttatagtgcatcatctcgctaaagagcactaatgttgagcatccctctcaacacccttgcttccacacctgcaatgcagctcacaatagcctcggggccatgcaatcctactgggaagactttgatctacaccgggatcaggataagccagagtctcattgcctatcagactcagcttggagtggcagcctatgtgttcatgccacatgcatgtgctcacaatgcatgggacacaacatgggcacgctggcctgaaagctatgcctgctgaccacaacttcattgtcctcaatggacgatgaaatgagcagaaaaacaacaaaagtatggtactgtgctgtcttctcaagcaaaatcacctatcctcctccaaggaacatggaaatccagagccaggacccaaggacaaactgccatgcagaggcaggctacaggctaactcttcctgggcaactgcacattcacctactcctgcggacagcatgtgtggtac

SEQ ID NO: 1886311 - DNA, 4001 bp, Homo sapiens
tgactgcatcgaggtgcctgagtggttcagaggcaaagtatgcacaacctacgataggtagaaaccctgggccgatataagctcaaatgcctaatggagacaagcatctcacagagggtcctgaacacagaccttccaaaccaagtcagtctgaggagttgcagaagcacgtggacccgcaatcacattcctgtcccagcaccccgaggtcatcatgaaatgaaatgggggcctgctacaatgcccgaaagaggcccacagtcatcactccatgacccacatggaatatgctgtccagtacatgcacatgcagacctctccccttcccactgccaggacccttcaggggccatgggactggtttcctcctatggatatacaagttcaacatggataccctctctggctcctctgcagaaagcaaatcagcatcaacatcctcctgaggactgcctgccctcaatgctacctaaacaccatgggaactgccacgtccccaaatgagggtgaaagtgaaccaaagaagtgcacaggaacaacattgtgtggtgtccccatgcagaagccactgtcttcctctggggagtgcaggagccaaggagtttgaatcaaggacacacatagctgcgcagagggaagtgcttcaactaagctgtctctcagccacagaagtccaaaatgcccagctactccacttcacccaaagacgaccccatcccaagtgttgacacagcccttgtcaacaaacggatgttgtccctctctctagcccctgatgagcagtatgctggacctcagttcgacgaggatgacggtatagagttttcactcattttgttcagctttccaaggaatgtacatatggaagtcatcatcgatccagtccttgcccctgcaaatgaggaaaatcagcatgctttaagaaggaatcacttacattcaggagggatccaacagcctccgaaagagcccacactccatgtgtcccgggacttctgccatctcccaggatcgcatgagacgacaatcatcccttgctgatgtaagcctgctttttataccaacaccaccggggaggtgcagagaaaacatggacgtgcatcagaaaggcaggcatgtgcacaggttccaagggccatgtcatccagctccctgcaatacatctgctgtctgcctgtctctggcctcacctgttcataaacacagaagttaacggacacaaggatgctcatctgggggtcaggagccttcagagtacgtcatcccactaaagagcatgttcagcatccttctcaacatcgttgcttcaatacctacaatgatactcacaaaagccttgggaccctgggcccctaatgagaaaggctttaacctatattgggtttaggataagccagggactccttgggtatcagaagcaatgagcaggagctcactagttcatgcaatgtacatgtcccccaaacacatgggatacaacacgggcacacaggcacataggctatgcctggtgaccaaaactctaatgtcctcaaccaaggacaaagttagccaacaaacgacaaagatgtggccttgtattctcctcccaaccagacaaatctgtttccttccaggaactcagaacaaggactcaagaacaaattggcaaccagaggcgggctaccagctaactcttgctaggccacatggacattcacctagtcctgcagacaatgcatgtgttacccaccctcactgacagtccttcaaacaagaaatttcctatacatgggagccaccactctcctgtgacccccatcacccataaaagaccccatcctaagcctgaacggatgccttggtataacccatgtcaaaaaacagatgttggccctctctgtctagcccctgttggagtaatgtgctggacctcagttcgacgaggatgacggtatagagttttcactcattttgttcagctttccaaggaatgtatatgtggaagtcatcatcgatccacgcacagtatttgtccctgcaaatgaggaaactcagagtgctctgggaaagaagtgcttacattcagaagggatccaacaacttccgaaggagcctttgccatttgtgtccaggggcttcctggtatctccgcagctcacacaaggtaacaattgtccctcaccaacatgtgcctgccctccatgccagtgctacctgggaggtgcagagttaacacaggcgtgcttcagaaagacagacaggtgcacaggtcacgagggccatgtcatccagtcccctgcaatttatctactatctgcctgtctctggcctcccctgttcatggaggcagaaatgcatggatgcagggatgctcgtctcggggctgggggcccctgcagtacaccatcctgctaaagagcactgacattgaccatccctctcaacatcactgcttcaacgcctgcaatgccactcacaaaagccttgcggccctgaacccctaaggaggaaggctttaacctaccatgagtttaggataagccagggactcctttggtatcagaaccagcttggagcaggagctcacctttacgtgcaaaatacatgtcctcaaaacacgtgggatacaacacgggcacaaaggcacataggctatgcctggtgaccaaaactctaatgtcctcaaccaaggacaaagttagccaacaaatgacaaagatgcggccttgtacccacctctcaaccacacagatctgttttcctccgtgggacctgagaacccagaacaaggactcaagaacaaattggcaaccagaggcgggctaccagctaactcttgctaggccacatggacattcacctagtcctgcagacaatgcatgtgttacccaccctcactgacagtccttcaaacaagaaatttcctatacatgggagccaccactctcctgtgacccccatcacccataagagaccacattctaagcctgaacagacgccttgatataacccatgtcaacaaacggatgttggccttctctgtctagcccctgttggagtaatgtgctggacctcagttcgacgaggatgacagtatagagttttcactcattttgttcagctttccaaggaatgtatatatggaagtcatcatcgatccacacacaggtttcatccctgcaaatgaggaaactcagggtgctttggaatgaaatcacttacattcaggagggtttcaacagcctgtgaaagagtccacaccatgtgtttccaggggcttcctgccatctccaagaatcagacaagatgacaatcattcctcatgatacaagcctgcctttcatgccaacaccacctgtgaagtgcagaggaaacacaggcgtgcttcagaaaggcagacaggttgcacacgtcacgagggccatgttatccagtcccctgtgacacatctgctatttgcctgtctatggcctcgcctgttcatggacacagaaatgcatggacacgcagatgctcgtcccagggccaggggccctcgaggtgcaccatcctgctaaagagcactgatgttgggcatccctctcaacatcgttgcttcaacacctgcaatggtgctcacaaaagccttggggccatgaatcctgaaagaggaagccactgacctaaatcaggtttggaataacccagagactccttgcctgacagccccagcttggagcagaagcctgcctgatcatgcaatacacaaatcctcataacatatgggatatgacatggaaatgcggcaaagaggctatgctgggtgcctggaaatacaacgtcctccgccaaggacaaaacaagctaacaagtgagaatagtgtaggcttgtgctctccccgcaaccaggggatctgtcttcctctgggaatccagagcttggactcaagaacaaacttggccaccagaggcagactacccacaaactctttccatgccacctgccattcacctagtccttcagacagtaggtgagttat

SEQ ID NO: 1886312 - DNA, 4001 bp, Homo sapiens
tggaagttgtctctctctctccagctccagttggagccacgtgctggacctcagtttgacgaggacgacggtatagagttttcactcattttgttcagctttccaaggaatgcatgtattgaggtcatcatcgatccatgcacagtctttatccctgcaaagaaggaacatcaggggcttttggaaaatggacatttaccaacctgtgggatccaccagcacccaacagagatcacattccacatgtcaaggggctccctgccctctctagggatctcccaagatgaagactgtccctcgtagccactggccttacttccatggccacaacacctgggaagtgcagaggaaaaacgggtgtgcttaagaacgggaggcaggtacacatgtcaaaagggccattccactcgactcactgtggtatatcccatatgtgcttcccacaggctactccccttttgggatgggtgtatgggtctacccaggaatgaagatagcaggcacgtgttaattttgaaggcaccatcaagctacagagccctaagtgtaagaactctctcaaaaccactcatttgccatcactgactcaaaagccctcctcttggtcatcagagaagacacaagccacagggctatttaaatgaggagagttttggggaaaaactcttccagtacaaaaggcaattttccttcagtcttgaagacttttcaccctgggctgcttgaacacttttcagattgagaaaaacgttcaataacaacttaacctctacctcagcgtcttcctcacaggtgcagctcagaggaccaccagacacactgaatcccacatggcttctaaggcactgtggctgagaacaccatacattttaaggcacttgcctttgaacatggccgcgcagtgcaaaacctatgcatcactgcctgtggataccagccctgtcctacaacaagatgactatttcacaaagaagactcctgggaagaattaggaggaattagaaaataacctaacatcacgagctactaaggtatttaagcacagagaccttcctggaccatgtttccgagtagagatcaccaggatatgggaagtcacactcttataatcgggcacgttgactgcatcgaggtgcctgagtggttcagaggcaaagtatgcacaacctacgataggtagaaaccctgggccgatataagctcaaatgcctaatggagacaagcatctcacagagggtcctgaacacagaccttccaaaccaagtcagtctgaggagttgcagaagcacgtggacccgcaatcacattcctgtcccagcaccccgaggtcatcatgaaatgaaatgggggcctgctacaatgcccgaaagaggcccacagtcatcactccatgacccacatggaatatgctgtccagtacatgcacatgcagacctctccccttcccactgccaggacccttcaggggccatgggactggtttcctcctatggatatacaagttcaacatggataccctctctggctcctctgcagaaagcaaatcagcatcaacatcctcctgaggactgcctgccctcaatgctacctaaacaccatgggaactgccacgtccccaaatgagggtgaaagtgaaccaaagaagtgcacaggaacaacattgtgtggtgtccccatgcagaagccactgtcttcctctggggagtgcaggagccaaggagtttgaatcaaggacacacatagctgcgcagagggaagtgcttcaactaagctgtctctcagccacagaagtccaaaatgcccagctactccacttcacccaaagacgaccccatcccaagtgttgacacagcccttgtcaacaaacggatgttgtccctctctctagcccctgatgagcagtatgctggacctcagttcgacgaggatgacggtatagagttttcactcattttgttcagctttccaaggaatgtacatatggaagtcatcatcgatccagtccttgcccctgcaaatgaggaaaatcagcatgctttaagaaggaatcacttacattcaggagggatccaacagcctccgaaagagcccacactccatgtgtcccgggacttctgccatctcccaggatcgcatgagacgacaatcatcccttgctgatgtaagcctgctttttataccaacaccaccggggaggtgcagagaaaacatggacgtgcatcagaaaggcaggcatgtgcacaggttccaagggccatgtcatccagctccctgcaatacatctgctgtctgcctgtctctggcctcacctgttcataaacacagaagttaacggacacaaggatgctcatctgggggtcaggagccttcagagtacgtcatcccactaaagagcatgttcagcatccttctcaacatcgttgcttcaatacctacaatgatactcacaaaagccttgggaccctgggcccctaatgagaaaggctttaacctatattgggtttaggataagccagggactccttgggtatcagaagcaatgagcaggagctcactagttcatgcaatgtacatgtcccccaaacacatgggatacaacacgggcacacaggcacataggctatgcctggtgaccaaaactctaatgtcctcaaccaaggacaaagttagccaacaaacgacaaagatgtggccttgtattctcctcccaaccagacaaatctgtttccttccaggaactcagaacaaggactcaagaacaaattggcaaccagaggcgggctaccagctaactcttgctaggccacatggacattcacctagtcctgcagacaatgcatgtgttacccaccctcactgacagtccttcaaacaagaaatttcctatacatgggagccaccactctcctgtgacccccatcacccataaaagaccccatcctaagcctgaacggatgccttggtataacccatgtcaaaaaacagatgttggccctctctgtctagcccctgttggagtaatgtgctggacctcagttcgacgaggatgacggtatagagttttcactcattttgttcagctttccaaggaatgtatatgtggaagtcatcatcgatccacgcacagtatttgtccctgcaaatgaggaaactcagagtgctctgggaaagaagtgcttacattcagaagggatccaacaacttccgaaggagcctttgccatttgtgtccaggggcttcctggtatctccgcagctcacacaaggtaacaattgtccctcaccaacatgtgcctgccctccatgccagtgctacctgggaggtgcagagttaacacaggcgtgcttcagaaagacagacaggtgcacaggtcacgagggccatgtcatccagtcccctgcaatttatctactatctgcctgtctctggcctcccctgttcatggaggcagaaatgcatggatgcagggatgctcgtctcggggctgggggcccctgcagtacaccatcctgctaaagagcactgacattgaccatccctctcaacatcactgcttcaacgcctgcaatgccactcacaaaagccttgcggccctgaacccctaaggaggaaggctttaacctaccatgagtttaggataagccagggactcctttggtatcagaaccagcttggagcaggagctcacctttacgtgcaaaatacatgtcctcaaaacacgtgggatacaacacgggcacaaaggcacataggctatgcctggtgaccaaaactctaatgtcctcaaccaaggacaaagttagccaacaaatgacaaagatgcggccttgtacccacctctcaaccacacagatctgttttcctccgtgggacctgagaacccagaacaaggactcaagaacaaattggcaaccagaggcgggctaccagctaactcttgctaggccacatggacattcacctagtcctgcagacaatgcatgtgttacccaccctcactg

SEQ ID NO: 1886313 - DNA, 4001 bp, Homo sapiens
cacaggtctcaagggccatgccattcattcccttgtggtgcatcctgtatctacttcccacaggctactacagaaggaaccagaggcactataattcatgggtgtggtctggtttagcaacacctaagttttgctgacagccgtgagtgacaagatacaaacaaacccactgcttcatgcagttaaaaataacaacaaacctctgtaggtctgcaatgcttgtaactaagttctggtattccaagaaccattgccagtgatcaaggaacatatttcaaaggctcactaatccaagattgggcagaaatgtagaatatgacctggcaatttcatctgtgctacaaaccacagaaagcagaatttatagaaaagaaaacggtgtcttaaagaaacaaattaaactcttgagagaaatccttgcacttaaaacctgaaggatggttccatggaagctacacatggcaggaatgaggccccctgtgtaagagaaaagttggcctgtgaatgtctgctggacataaagagtccagtgggagccttgtggatatagaaaattatccaacactgccttgatactggacacaagtccacatgggataccctaattttgtgctctccctgtcacacaacccccaggcagtgaatcctgcaataagatttaggaagaaaactgcctttgaccttaggcaggaggtcaacactgccccaaaaccgacctctaacatacttcttattaaagggccccaagagaggtatccacaatgaccagacagtgcccccaaaacaatagaaattccagtagcactaggatagcagaatgactcagacttagcactgcagggagtatgagtacaaccacaaggacataaaatatctaaaaaagacctcctgaaagtttccagatcactgagattattgcagaaagagatgcataccagacttcaaacataggagagaatagggtcacttacgtaaaccaatatattttggttttgccactgttcacttgagctaccatccacactgctgttacatcaccacacttaatgttgggataaccacaacatttttttttctgatatcgacctgatatactccaataaaatgttccctggagaaaaacacgtgtgactggggatggagcaaagactgtcaggaaacaaaagcaatctgctgaaaggccctcccatgtagacatcagatcatattccattcccagcaccctaaggccaacatggcatttgtgatgtgcagtacacaccatgcaaaacagacgcgcaaatgtggcggaccatccccatcttagggtaccaagtcaacacatgtatggcgctttctcattcccacctggagtatccatcaccagccatgggatttcagtttctccctggagacacacaaatcataaatggagccgatctacagggtactctccagaaagaaaataagcatcaccaacctcctcacaactgacttccactgctgctacgaaaacaccatgggcactaaaaagtcctcagccatgaaaaaaaatgagccaaagaacaacaaagatgtggccttgggctctcttcccaaccacaaggagctatctacctctggggaacaagggaacccagagccagcactcaaggacaaacctggccacacagaggcgggttaccggctaactcttctgtgccacctgcacattcacccagtcctgcagacattgtgcgtgctacccagcctcacaaagagaagtccttcacacaaggaatctcctctgcacaggagcacctactgccctgtgactccctttgatccaaagtggaccccatcctaagcctggatggatggcttagtgcaacccacatcaaccaatggaagttgtctctctctctccagctccagttggagccacgtgctggacctcagtttgacgaggacgacggtatagagttttcactcattttgttcagctttccaaggaatgcatgtattgaggtcatcatcgatccatgcacagtctttatccctgcaaagaaggaacatcaggggcttttggaaaatggacatttaccaacctgtgggatccaccagcacccaacagagatcacattccacatgtcaaggggctccctgccctctctagggatctcccaagatgaagactgtccctcgtagccactggccttacttccatggccacaacacctgggaagtgcagaggaaaaacgggtgtgcttaagaacgggaggcaggtacacatgtcaaaagggccattccactcgactcactgtggtatatcccatatgtgcttcccacaggctactccccttttgggatgggtgtatgggtctacccaggaatgaagatagcaggcacgtgttaattttgaaggcaccatcaagctacagagccctaagtgtaagaactctctcaaaaccactcatttgccatcactgactcaaaagccctcctcttggtcatcagagaagacacaagccacagggctatttaaatgaggagagttttggggaaaaactcttccagtacaaaaggcaattttccttcagtcttgaagacttttcaccctgggctgcttgaacacttttcagattgagaaaaacgttcaataacaacttaacctctacctcagcgtcttcctcacaggtgcagctcagaggaccaccagacacactgaatcccacatggcttctaaggcactgtggctgagaacaccatacattttaaggcacttgcctttgaacatggccgcgcagtgcaaaacctatgcatcactgcctgtggataccagccctgtcctacaacaagatgactatttcacaaagaagactcctgggaagaattaggaggaattagaaaataacctaacatcacgagctactaaggtatttaagcacagagaccttcctggaccatgtttccgagtagagatcaccaggatatgggaagtcacactcttataatcgggcacgttgactgcatcgaggtgcctgagtggttcagaggcaaagtatgcacaacctacgataggtagaaaccctgggccgatataagctcaaatgcctaatggagacaagcatctcacagagggtcctgaacacagaccttccaaaccaagtcagtctgaggagttgcagaagcacgtggacccgcaatcacattcctgtcccagcaccccgaggtcatcatgaaatgaaatgggggcctgctacaatgcccgaaagaggcccacagtcatcactccatgacccacatggaatatgctgtccagtacatgcacatgcagacctctccccttcccactgccaggacccttcaggggccatgggactggtttcctcctatggatatacaagttcaacatggataccctctctggctcctctgcagaaagcaaatcagcatcaacatcctcctgaggactgcctgccctcaatgctacctaaacaccatgggaactgccacgtccccaaatgagggtgaaagtgaaccaaagaagtgcacaggaacaacattgtgtggtgtccccatgcagaagccactgtcttcctctggggagtgcaggagccaaggagtttgaatcaaggacacacatagctgcgcagagggaagtgcttcaactaagctgtctctcagccacagaagtccaaaatgcccagctactccacttcacccaaagacgaccccatcccaagtgttgacacagcccttgtcaacaaacggatgttgtccctctctctagcccctgatgagcagtatgctggacctcagttcgacgaggatgacggtatagagttttcactcattttgttcagctttccaaggaatgtacatatggaagtcatcatcgatccagtccttgcccctgcaaatgaggaaaatcagcatgctttaagaaggaatcacttacattcaggagggatccaacagcctccgaaagagcccacactccatgtgtcccgggacttctgccatctcccaggatcgcatga

SEQ ID NO: 1886314 - DNA, 4001 bp, Homo sapiens
tgatctgcccaccatggcctcccaaagtgctgggattacaggcataagccactgcgcccggccagcagtcatggattttatattggaaattaaatcccatatcttgctcactgaaacgtgctgaacacaatggataaatcaaaccatcaaaagagtatgtgcaagacatctatacagctgaaaacaaggattttatccccaaaaatacctgcacacaaagaagtatggtaggatagaagtccaagtctagatatgaaacactgcacccggaattatctgtgggaggcagggctgcgccagtggtttacctccgcctctctggaaaacacaaccatcctggaaatcgaagcatgtcttctacgctccattttcagactctttaacagaactcatagaaaaaccttgaaaagctacaggaaaataagccaacaaaccacagataaagccaactaagtattatacaaataattagcataattggaaattgttctggctttaccagtacaatcttttggattattcctccagagataaaaaaataagtggttaaatattttgtgacttgagtgtgacagaaaatgacatcactgaatatagtcacacaagcactgatcccaattcaaggtaacacctgttactgacatgcacatttggtcccttactaaaataagaagaggctatgttgcaaaaccatgttggtgtatcttctaaagccagaagaggcaaaaaccacgaagacagattagaacaccaacagtacaggaaaatgacaagtcttctttctatgcaactccatactctcttacatatgggatctgtgtctgcactggaagcatatcaaatcgaagtccacatttaaacagaaaaggtatatgcacaaacaaaagtgaaatggaatatttcttgtaggatcctcctggttccactgctttttctcttattctgaccagtagccgagtacagctgtgaaagttagaagagtaatgacaaataggaagagacatgaactcctccgccactgtgttaaattattgacatggtgggtaaaatggaaaacaaagaggctctgcagagagatgcttagggagcccacaaccacagccctccaaactggggagtcttctgtggctgcagaagcagaagctccaagtcccacctgctgaagtcagaaatggagaaaaaaagaggaaaaaaaaagaaaaaaggaaaatcaagcagagccactttcctcaaactggctggggctccaggtggcctgtggtggcagcagtggcaaaaaatcagtcagactccacctggcaaggcgaaggggcagcagaagtgggacacacggtgaggagcacaggccacgccaggtacatggggctcatgcaggcagatagcgtgcttcgcttgcttttgcaggcattcaccttggagggccaaaaaaggacctttcaggttctccctaatggatatatgcacaccctactatttactatggtttatggccagaggcctggccatcttgggtgatatgcctagcattcactgggaacattatgtggataatattctactgaattccacaaatttaagtcttctgaagaaaccaacttcctctaagggatgagggaatgcagagctaggacaagtcaaacctcgctgtgcagagacaggctgccatctaactcttcctgtgccacctgcacattcacctgctcctgcatagttatgtgtgctaccctgctctcacagaggtaaatccttcacacaaggaatctcctgtgcacaggaggccgcactcccctgtgactccctttgcccaaaggggaccccatcctaagcctggacaaacccctcaatggaacctgcgtcaacaaatggaagttttccctctctatctacccactgttggagcaatgtgctggacctcagttcaacgaagatgacggtatagagttttcactcattttgttcagctttccaaggaatgcatgtataaaagtcatcatcgatccatgcacagtctttgtacctacaaagatggaatatcagaagattttggaaaatggacatttaccatcctgagggatccaccagcacctgaagaagcccacgccacatatgctgcacgtgcccaggggctccccaccatctccaggaatctcccaagacaaagatgatccatcgcagcctctggccttcttccatgccagaccacctaggaattagaggcaaaacaggtgtgcttgagaaaggcaagcaggtacacaggtctcaagggccatgccattcattcccttgtggtgcatcctgtatctacttcccacaggctactacagaaggaaccagaggcactataattcatgggtgtggtctggtttagcaacacctaagttttgctgacagccgtgagtgacaagatacaaacaaacccactgcttcatgcagttaaaaataacaacaaacctctgtaggtctgcaatgcttgtaactaagttctggtattccaagaaccattgccagtgatcaaggaacatatttcaaaggctcactaatccaagattgggcagaaatgtagaatatgacctggcaatttcatctgtgctacaaaccacagaaagcagaatttatagaaaagaaaacggtgtcttaaagaaacaaattaaactcttgagagaaatccttgcacttaaaacctgaaggatggttccatggaagctacacatggcaggaatgaggccccctgtgtaagagaaaagttggcctgtgaatgtctgctggacataaagagtccagtgggagccttgtggatatagaaaattatccaacactgccttgatactggacacaagtccacatgggataccctaattttgtgctctccctgtcacacaacccccaggcagtgaatcctgcaataagatttaggaagaaaactgcctttgaccttaggcaggaggtcaacactgccccaaaaccgacctctaacatacttcttattaaagggccccaagagaggtatccacaatgaccagacagtgcccccaaaacaatagaaattccagtagcactaggatagcagaatgactcagacttagcactgcagggagtatgagtacaaccacaaggacataaaatatctaaaaaagacctcctgaaagtttccagatcactgagattattgcagaaagagatgcataccagacttcaaacataggagagaatagggtcacttacgtaaaccaatatattttggttttgccactgttcacttgagctaccatccacactgctgttacatcaccacacttaatgttgggataaccacaacatttttttttctgatatcgacctgatatactccaataaaatgttccctggagaaaaacacgtgtgactggggatggagcaaagactgtcaggaaacaaaagcaatctgctgaaaggccctcccatgtagacatcagatcatattccattcccagcaccctaaggccaacatggcatttgtgatgtgcagtacacaccatgcaaaacagacgcgcaaatgtggcggaccatccccatcttagggtaccaagtcaacacatgtatggcgctttctcattcccacctggagtatccatcaccagccatgggatttcagtttctccctggagacacacaaatcataaatggagccgatctacagggtactctccagaaagaaaataagcatcaccaacctcctcacaactgacttccactgctgctacgaaaacaccatgggcactaaaaagtcctcagccatgaaaaaaaatgagccaaagaacaacaaagatgtggccttgggctctcttcccaaccacaaggagctatctacctctggggaacaagggaacccagagccagcactcaaggacaaacctggccacacagaggcgggttaccggctaactcttctgtgccacctgcacattcacccagtcctgcagacattgtgcgtgctacccagcctcacaaagagaagtccttca

SEQ ID NO: 1886315 - DNA, 4001 bp, Homo sapiens
gttagttttccaataccctagtccctgtaaactccctcctcatgtttgcctggcatggtcccagtgctggacctcagctcacagaagtggcacagaaatgatttggtcactcattttgttcagattccgatgagatccattttttttatagtcatcatcgatccaggcacatttataaaagggaccttgagtctgagatatgtggcagacactgagcacatctgtcactctgggacacactgacccacactattcaatcatggagaccaggatcacagtcaatgaccagcccatggcggactagcatagccagagtctcacggttagcagagtgttatgattccctaagaggaaatgctggtattttcaggacaaaaggcttaccaatattagagttcccactggcccttgaggatgggagggcagcattattcccaatactttctttccttcttgtcttgcctcaaagggaagaataaattcatccatatgaaacctagatcttggtctatgctgtcctgtaggaagagagtatgtatacaaatctgagaagtatacacggacaatttttagccttgcataagacaggatgtttcactattaacatatatggaatatacactaacttagaactgctgttggacatttcatatgttattcaaagtagagaaaagaacaaaacctttatcaaaaggagattgatgcctcagctcatcagaacattaatgtctgaaactgttagtattaaccaattccttgtgaacataaattcttgattacttaaaagaataaaaataactcacaaaaataaattcactaaaaattgaatgttaccttagaagtgtattggtgtgtttcttcacagctacgttagctggtacaaatgtcaaaattagcacttcactggtttggcaatgaaattccatggaattctatctcacccaatctacagagtacaggggaaattaggaaagttgtgaaacaaaatttgcttcatggactactttgttataaacagttataagaattcacattagacactcattggaccatctgtataacaagaacaattatgctcacatctttgatccaaattttatggaaataatgttttctaaaacatttgtcccgaagttcctccagcacatacctttcaaaatcatttattacaacttttaattaatacagtggtcacacatggaggacatatgaaagtagacaatgaaatccatgtgaaaatccaagaatttgaaatatcacttctaaaaatgtttgctgcaacatgtagttgaaaccagcactgaaacatgtattaaatagcttgcttggttgatgggaaaacaaaaaataaacaactgtttcagtcctagtgactgggttggcaatcaaatgaaaatatactacaagatttcatatgagatatttatatcttatatgatataaataaatatcttatatttcatatgtttcatatatttcatataagatatttattctttaatttccatgcaattatttcacttaaaagaaaaggagaagtaaaaactcatgatgtctttgaatgctgacatctctttgccatcaagcaacaaaccatcaaccagaatattctgggcgctcacacaaatgtctgaatggcttgtgggttcacacaataatttcctgtaaatcctataactcctgtgctggctcccagtgtctggtcactgtagtgtacagatgctaccagccaagcatttgaaaagtctccgtcttacccccaaccatatattggtaggttaactgtccagtaatttcctgtactgtatgtgagctggttagttgtctaattccacaggccgtttcatagtaccagtgctgaccaaacaaaacaccctccatgtgtttgtctggcatggcccctgtgctggacctcagctcacagaagtggcacagaagtgatttggtcactcattttgttcagattccgatgagatccattttaaagtcatcatcgatccaggcacatttataaaagggaccttgagcctgagatatgtggcagacactgagcacacagctgtcacctttggaggcactgacccacactagtcaatcacatggagaccagcatcacagtcaatgaacagcccaggctgactagcacagccagggtcacatggtcactgcagtgtcatgatcccctaagaggaaatgctggtattctcaggacaaaatgcttaccaatatcacattttgaggttttgatgtcagactttttcatgatacactccattctgtcactttttgaggttaaaaagaaataactttcgtatgaaaatctgtgctggttccacaatgaactacaaaaatagagaaaaagtgagcaaagatgtgtaacacagacattcattgttcaaatagcctggggatccccacgctgtaggccttctcacattcttatatttcatataagtttcatatatttcatatatttattctttaatttccatgcgattatttcacttaaaagaaaatgagaagtaaaaactcatgatgtctttgaatgctgacactggagaattccctcccatacttcatgaggctactggctggttgacccaggttatcgcatatgattgagctgcctgacctaagatgttctcttcattcctgtggtccagagtctcctccccttacatagagatacacggcatctcagagtacagaaaaaccttcgccatctcaggaagtaccagtcagcaccagttggaggcccagcaacatcagataaactaagtgatcaaaacagcatcccctcagctctgatagcaagactgcctgcgaaaacatggcctacaaaagtaggacaggacattcaaattaaacctaaacagggcacatgcctgctaaaataaaacatttgaatagattcagattcctctaacttaaaaaggaaaaaaaaatgcaggataaactaaaacatcacccatctatcaagaaccggaaaaatcacaattagaaggaaaatcataagcaggatgagaaaagacagttaaccaagccaacctcaagattaaccaaatgttgtggttatctgaagaagttaaaaacagtcatggtaaaaatgctttagcaagtaattataaagcttcttgaaaaaagtaaaaaagtagaagtctcagaaaggtagtagaagtttttttaaaaaaagaaccaagtgaaaaaaacagaactaaaaaattcaaaaataatagagtagtgattaagtgaatttagcatagaacaatccaatttagctaatctggacaagaaagaaaatactctgaaaaaaaaaaaaaaaaaaaaaaaaagaacacagcttcatggacctgtgtgtgacacggagacatgaggctgaaaataattataacattctttttttttttttttttgagccagagtctctatcgcccaggctggaatacagtgacatgatcttagctcactgcaacctccacctcccaggatcaggggattctcttgcctcagcctcctgagtaactgggactataggcacacaacaccacgcatgggtaatttttgtatttttagtagagatggggttttgccatgttggccaggatgatcttgaactcctgacctcgtgatctgcccaccatggcctcccaaagtgctgggattacaggcataagccactgcgcccggccagcagtcatggattttatattggaaattaaatcccatatcttgctcactgaaacgtgctgaacacaatggataaatcaaaccatcaaaagagtatgtgcaagacatctatacagctgaaaacaaggattttatccccaaaaatacctgcacacaaagaagtatggtaggatagaagtccaagtctagatatgaaacactgcacccggaattatctgtgggaggcagggctgcgccagtggtttacctccgcctctctggaaaacacaaccatcctggaaatcgaagcatgtcttctacgctccattttcaga

SEQ ID NO: 1886316 - DNA, 4001 bp, Homo sapiens
acatgctgacccacactatttaatcatggagaccagcatcactgtcaatggtcagccccctggctgactagcatagccagggtctcatggtcattggagtgtcatgatctcttaacaggatgtcagtattttaaggacaaaatgcttatcatgggaaaattcctactggtccctaaggacaggaagcagaattattcccattactttccatcatattacaacacaaggaaacaataaacttagccatataaaatgtaaaatgcagttttagtctgcatcatcttgtgagaagagattttatatatatatatatttatatatatacacatgcacgcacacgtccattttttaaaaatctgtataagacaaaaggtttcattattaatcagcatagaaaatatactaatttataactcttggaaatgttttaaatattatccaaactacagagaagaaaaaaatcttaaaaataaaggaaactgatgcttcagatagcgcatcagattaataattcctaacattgtctgtattaacctattgttcaccaaaccaaatcactgacagtttgaaaaataataaaaataaatttactaaaaattggatactacctcaggagtgtgttgttctgtttcctcccaagttagttaactggtacaaatgacaaaattagccctccactggttcagtggtaaaattccatggaattgtatctcacccaatctacaaagtgtagaggaaattagggaagttatgaaacgaaatttgccaaatggaatgtttagttacaagtgaatataagaattcacagtagacactcactggactatccaatgaatgacaagaaaaattattcttacatctttgatcactatagaatataaacttttttaaaaaaaatctgagacattagtctcaaagcttccctggcatccccaatcaaaagcatttattacaattaggatacctcttcaaacacaatggaaacctttgaggatatatgaatatagccaatgaaatctatgtaaaaaagaatttgtaatataatctaagtttatttgaggcagcatacagttgaaaccagcactcaaatataaacagtggtttgctttttgatacgaaaaactaaaatcaaaaaaacaagtgacacaatcctagtggctgaattggcaagaaaattaaaatacactagagtagtctacttagagtaccttttttttttttcaatttccatgtaattgtttcacttaattgaaaataaaaagtaaggccgggcacggcggctcatgcctgtaatcccaacactttgagaggctgcagtggctggatcacctgaggttgggagttcgagaccagcttggccaatatggtgaaactccatctctactacaaacacaaaaattagccaggggtggtggcgggcgcctgtaatcccagctactcaggatgctggggcgggagaatctcttgaacccaggaggtggaggttgcagtgagccgagattatgccactgcactccagcctgggcaacagaatgagactccatctcaaaaaaaaaagtaaaatctcattagtatctttggatttggatgttgaccatctcattaccctcaagagactgctcattgaccagataattctgcgagctcaaatgtgtgaatggctcaagagtaggtgaaataacgtcccatgaatctcactatgccctggttccccagggtctaccagctgtttctataaatgctgccaagcaaatacaaagagagttgctatgtcaaaccacagctggatatttacagaactgagaacaattcatttgctctaatatatatgggtaggttagttttccaataccctagtccctgtaaactccctcctcatgtttgcctggcatggtcccagtgctggacctcagctcacagaagtggcacagaaatgatttggtcactcattttgttcagattccgatgagatccattttttttatagtcatcatcgatccaggcacatttataaaagggaccttgagtctgagatatgtggcagacactgagcacatctgtcactctgggacacactgacccacactattcaatcatggagaccaggatcacagtcaatgaccagcccatggcggactagcatagccagagtctcacggttagcagagtgttatgattccctaagaggaaatgctggtattttcaggacaaaaggcttaccaatattagagttcccactggcccttgaggatgggagggcagcattattcccaatactttctttccttcttgtcttgcctcaaagggaagaataaattcatccatatgaaacctagatcttggtctatgctgtcctgtaggaagagagtatgtatacaaatctgagaagtatacacggacaatttttagccttgcataagacaggatgtttcactattaacatatatggaatatacactaacttagaactgctgttggacatttcatatgttattcaaagtagagaaaagaacaaaacctttatcaaaaggagattgatgcctcagctcatcagaacattaatgtctgaaactgttagtattaaccaattccttgtgaacataaattcttgattacttaaaagaataaaaataactcacaaaaataaattcactaaaaattgaatgttaccttagaagtgtattggtgtgtttcttcacagctacgttagctggtacaaatgtcaaaattagcacttcactggtttggcaatgaaattccatggaattctatctcacccaatctacagagtacaggggaaattaggaaagttgtgaaacaaaatttgcttcatggactactttgttataaacagttataagaattcacattagacactcattggaccatctgtataacaagaacaattatgctcacatctttgatccaaattttatggaaataatgttttctaaaacatttgtcccgaagttcctccagcacatacctttcaaaatcatttattacaacttttaattaatacagtggtcacacatggaggacatatgaaagtagacaatgaaatccatgtgaaaatccaagaatttgaaatatcacttctaaaaatgtttgctgcaacatgtagttgaaaccagcactgaaacatgtattaaatagcttgcttggttgatgggaaaacaaaaaataaacaactgtttcagtcctagtgactgggttggcaatcaaatgaaaatatactacaagatttcatatgagatatttatatcttatatgatataaataaatatcttatatttcatatgtttcatatatttcatataagatatttattctttaatttccatgcaattatttcacttaaaagaaaaggagaagtaaaaactcatgatgtctttgaatgctgacatctctttgccatcaagcaacaaaccatcaaccagaatattctgggcgctcacacaaatgtctgaatggcttgtgggttcacacaataatttcctgtaaatcctataactcctgtgctggctcccagtgtctggtcactgtagtgtacagatgctaccagccaagcatttgaaaagtctccgtcttacccccaaccatatattggtaggttaactgtccagtaatttcctgtactgtatgtgagctggttagttgtctaattccacaggccgtttcatagtaccagtgctgaccaaacaaaacaccctccatgtgtttgtctggcatggcccctgtgctggacctcagctcacagaagtggcacagaagtgatttggtcactcattttgttcagattccgatgagatccattttaaagtcatcatcgatccaggcacatttataaaagggaccttgagcctgagatatgtggcagacactgagcacacagctgtcacctttggaggcactgacccacactagtcaatcacatggagaccagcatcacagtcaatgaacagcccaggctgactagcacagccagggtcacatggtca

SEQ ID NO: 1886317 - DNA, 4001 bp, Homo sapiens
cgagcactgtgcactattggcatagaacctatgtacatcctcctatatgcaggaaatcatttctagattactcatgatgctgaatacaatgtaaatgctgcgtaaatagttgttatactgtactgttttagggaataataaccaaagaaaaagtctgtacttggctgggcatggtggctcatgcttgtaatcccagcactttgggaggctgatgcaggcagatcacttaaggtcaggagttcgagaccagcccggccaacatggtgaaaccccatctctactaaaaacacaaaaattagcctggcacagtggtgggcgcctgtaatcctagctattcaggaggctgaggtaggagaatcacttgaacccgggggacagaggttgtagtgagctgagatcgtgccactgcactccagcctgggtgacagagtgaaactctgtctcaaaaaaaaaaaaaagaaagaaagagaaaaagagagaaaaagactgtacatgttcagtacagatgaaaccatacaattttttgtcaagtattttcaatccatggctagttgaatctgaagatgcaggccccatggagaaggatagcaaactatatataaaattgtttgctaaattaatagaaaaaaacaagagaagaacaaaagaaacagttcaatcttagcagctgggttggcaactgattaaaatatacttggaagataccacatgaaattgtttcactttaagaaaatgagaagtaaaacaaaagaagacatttatgcagccaacaaacatgaaaaaaggctcatcatcactggtcattacagaaatgtgtatcaaaaccacaatgagataccatctcatgccagttagaatggcgatcattaaaaaaagtcaggaaacaacaaatgctggagaggatgtggagaaataggaacacttttacactgttggtgggagtgtaaattagttcaaccgttgtggaagacagtgtggcaattcctctaggatctagaactggaaataccatttgattcagcaatcccattactgggtatatatctaaaggattataaatcatgctactataaagacacatgcacacatatgtttattacggcactattcacaatagcaaagacttggaaccaacccaaatgtccatcaatgatagactggataaagaaaatgtggcacatgtacaccatggaatactatgcagccataaaaaagcatgagttcatgtcctttgcagggacatgaacgaaactggaaaccatcattttcagcaaactaacacaagaacagaaaaccaaacaccacatgttctcactcataagtgggaggtgaacaatgagaacacatggacacagggagggaacatcacacaccagggcctgttggggggtcaggggctaggggagggatagcattaggagaaatacctaatgtagatgatgggttgatgggtgcagcaaaccaccatggcacgtgtataccaatgtaacaaacctgcacgttctgcatatgtaccccaaaacttaaagtataataaaaaaaaaaagaaaatgagaagtaaaaactcatcatatccttggattttgaccatctcatcaccctcaaaagatcaatcagtagctcaggcaaatgtgagaacagaccaagtataggcaggaacatttctcttgggtctcactgttctgcttcccaggctctgtttctatggtatatagatgccgccaaccaaactctcagagtttccattttaccctacaattgaatttttatacacaaatgtaaaattcgtttcctctaataaatgcactcaagtggttttcaaataccccagtccctgtggttgcttctaactgaccaactagttgcaactccaggcaacacatgtttgactggagtggtctctgtgctggacctcagctcacagaagtggtacagaagtgttttggtcactcattttgttcagatttaaattagataaatctttaagtcatcatcgatccaggcacattttaaaaaggaaccctgagtctgagatatgtgacagacactgatcacacagctttctgtcaccctgggacatgctgacccacactatttaatcatggagaccagcatcactgtcaatggtcagccccctggctgactagcatagccagggtctcatggtcattggagtgtcatgatctcttaacaggatgtcagtattttaaggacaaaatgcttatcatgggaaaattcctactggtccctaaggacaggaagcagaattattcccattactttccatcatattacaacacaaggaaacaataaacttagccatataaaatgtaaaatgcagttttagtctgcatcatcttgtgagaagagattttatatatatatatatttatatatatacacatgcacgcacacgtccattttttaaaaatctgtataagacaaaaggtttcattattaatcagcatagaaaatatactaatttataactcttggaaatgttttaaatattatccaaactacagagaagaaaaaaatcttaaaaataaaggaaactgatgcttcagatagcgcatcagattaataattcctaacattgtctgtattaacctattgttcaccaaaccaaatcactgacagtttgaaaaataataaaaataaatttactaaaaattggatactacctcaggagtgtgttgttctgtttcctcccaagttagttaactggtacaaatgacaaaattagccctccactggttcagtggtaaaattccatggaattgtatctcacccaatctacaaagtgtagaggaaattagggaagttatgaaacgaaatttgccaaatggaatgtttagttacaagtgaatataagaattcacagtagacactcactggactatccaatgaatgacaagaaaaattattcttacatctttgatcactatagaatataaacttttttaaaaaaaatctgagacattagtctcaaagcttccctggcatccccaatcaaaagcatttattacaattaggatacctcttcaaacacaatggaaacctttgaggatatatgaatatagccaatgaaatctatgtaaaaaagaatttgtaatataatctaagtttatttgaggcagcatacagttgaaaccagcactcaaatataaacagtggtttgctttttgatacgaaaaactaaaatcaaaaaaacaagtgacacaatcctagtggctgaattggcaagaaaattaaaatacactagagtagtctacttagagtaccttttttttttttcaatttccatgtaattgtttcacttaattgaaaataaaaagtaaggccgggcacggcggctcatgcctgtaatcccaacactttgagaggctgcagtggctggatcacctgaggttgggagttcgagaccagcttggccaatatggtgaaactccatctctactacaaacacaaaaattagccaggggtggtggcgggcgcctgtaatcccagctactcaggatgctggggcgggagaatctcttgaacccaggaggtggaggttgcagtgagccgagattatgccactgcactccagcctgggcaacagaatgagactccatctcaaaaaaaaaagtaaaatctcattagtatctttggatttggatgttgaccatctcattaccctcaagagactgctcattgaccagataattctgcgagctcaaatgtgtgaatggctcaagagtaggtgaaataacgtcccatgaatctcactatgccctggttccccagggtctaccagctgtttctataaatgctgccaagcaaatacaaagagagttgctatgtcaaaccacagctggatatttacagaactgagaacaattcatttgctctaatatatatgggtaggttagttttccaataccctagtccctgtaaactccctcctcatgtttgcctggcatggtcccagtgctggacctcagctcacagaagtg

SEQ ID NO: 1886318 - DNA, 4001 bp, Homo sapiens
acgccctccacgggtttgcctggtatggtccctgtgctggacctcagctcacagaagtgtcttggtcactcattttgttcagatttccaaggtttccatttttttaagtcatcatcgatccaggcacacttataaaagggaccttaagcctgagatatgtggcagacactgaacactgatctttctgtcacctggggacttgccaacccacagtattcaattacaaagaccagcatcacagccagtgaccagtctcatgactgacaagcacagccagggtctcattgtcattggagtgtcatgaccccctaagaagaatgttggtgctttcaagacaaaatgcttaccaatatttgaattccccctggcccttgagaatgggagggcagaattatttccattactttccttcatgtcacacctcaagtagaaggaataaactcttttatatgaaatctagtttttggtccacattaacctttgaaaataggaaaaaattatagaaaaataaaaagtgcaaatgtaatttgccaaccatgcaaatagtgtacatatacaacaggcttactatgcacaagtatataaaatatactaaattattttgctagtagggtatcctaatgttatttgaaaacagaggaagtataaaaatactgtacaaagaacacagaaacttcagatgactaaccagattattagggcctcacaccatttggattaacagactgcttgaaaaaccaattataatcttacttgctaaaataaaataatagaacgaacccaggaaaaatgcacttactaaaaattgcaatattacctctgaagtgtattgttctcattgccagacaacgaatctggtacacgtgacaaaatcagcaggttactggagcagcagtaggaattccatgcaattccagtattacctccaatacacaaagcacactgaggaagtaggaagtcgacaaatgaaaccctcataattaaaagagtttcatttgtcaactttcttactttcataattactaatgacgagttataagaaataaaccatagatattcacttgcccatgtggtatgagaataaaaattatgctcactccctggaaatgggtagtactgaaagtcagttttctaagaccaaaaggcctcccttagtatcacacaataaaactaggatctccctttaaacatctatgaaacccactaataaaaataatgaatatcaggcaatgaaatccacataaaactctatgaattgcaaatttaatcattttacaattagaaatgtttactatagcatctactagaatcccttaatcaaatgtctaaaaagcttctctttgagtgacaggcaaaacttaaattccaacttctgtgacaagatcaataaggaaattaaaatgttaagactttccacaaatagaaagtacccttcaatttccatacattcttttctttaatagataaaagctactcttcaatttccatatatttcttttacttaatagataaataatatgtaaaacctcataataccttttacactgtccatctaatgaacctgagagactgacctcacacacaagattatagcacctaaaaacatgtataaaagactctagggtaggcaaaaccatttcctactgttccctctactcttgtgtaattctgtttactatgagagtatggacactgccagccaaacactgaaagaaatgccatataatccccaaagatatatgtacacaaacatatataaatatatacaaacacatacagacctctgtacaattcatgtgctgtaagctatgtgagtgggtttgttttccaataccacaggccattttggtaccagttgctgaccaaactgaactctctgcacgtgtttgcctggcatggtccctgtgcttgacctcagttcacagaactgcacagaagtggtttgctcactcgttttgctcagattccaacgagattcatttttaagtcgtcatccatccaggcacatttataaaagggactttgaacctgagatatgtggcagacactgagcacatagctatctgtcaccaatgacccacactattcaatcatggagaccagcagcacaatgaccagcccatggctgcctggcatagccagagtctcactgtcattggagtgtcctgattccctaagaaaaattgttgttattttcaggacaaaatgctttttaacatgtgagaattcccatggggacttgtgggtgggaggcggaattattcactatacttttcctttatgtctccacacagggaaaaaaataaattcatccgtatgaagcccagtttcttggtccacctcattctgtgggaagagattatatacatgggaatgagaagtatacatgttcatttttcaaacttaaataagacaggaggatttactatgtaactatatgtaaagtataagaattttattacacttataggatgtttctgatgttaaagttgagaaaaatgtaaaatgttaaaataaaagaaactgaaggctcagatatctcatgagagtattgaatgcctaatactatttgtattaagtgactccttgcacacctaatgaaattctcaattacttaaaaaaataataaaaacaacacacaaaaatgaatttactaaaaattcgatgttacctcaggagagtattgttttgttgcctcccagatgcgttagctggtacaagtgacaaaatcagtgcatcattggttcagcagttaaagtccatggaattctgtgaaaaccaatctacaaagtacatgggcaattaggaaagttgtgaaataacatttgccaaatgaaatattttgttacaagcagttataagaattcactttagacattcattagactatatgtatgacaagaataattatgctcacatctttgatcagactgatacagatagaactttttctattctattgttttttctattctagacagaatattttctatccatgtcagtgttttctcaacacactgacttcaaaattatttattctatacctaggatatttctttaaacacagcgagcactgtgcactattggcatagaacctatgtacatcctcctatatgcaggaaatcatttctagattactcatgatgctgaatacaatgtaaatgctgcgtaaatagttgttatactgtactgttttagggaataataaccaaagaaaaagtctgtacttggctgggcatggtggctcatgcttgtaatcccagcactttgggaggctgatgcaggcagatcacttaaggtcaggagttcgagaccagcccggccaacatggtgaaaccccatctctactaaaaacacaaaaattagcctggcacagtggtgggcgcctgtaatcctagctattcaggaggctgaggtaggagaatcacttgaacccgggggacagaggttgtagtgagctgagatcgtgccactgcactccagcctgggtgacagagtgaaactctgtctcaaaaaaaaaaaaaagaaagaaagagaaaaagagagaaaaagactgtacatgttcagtacagatgaaaccatacaattttttgtcaagtattttcaatccatggctagttgaatctgaagatgcaggccccatggagaaggatagcaaactatatataaaattgtttgctaaattaatagaaaaaaacaagagaagaacaaaagaaacagttcaatcttagcagctgggttggcaactgattaaaatatacttggaagataccacatgaaattgtttcactttaagaaaatgagaagtaaaacaaaagaagacatttatgcagccaacaaacatgaaaaaaggctcatcatcactggtcattacagaaatgtgtatcaaaaccacaatgagataccatctcatgccagttagaatggcgatcattaaaaaaagtcaggaaacaacaaatgctggagaggatgtggagaaataggaacacttttacactgtt

SEQ ID NO: 1886319 - DNA, 4001 bp, Homo sapiens
accagccaagcaccaaaggaatagccattttattaaaaaatacgatatttatagatgactgtccaattcatttcctctaacatacgcaggcagattagctttcaaataccccagtccctgtgggcactgaccatccacatccctccacgtttgcctatcatgtgtgctggacctcagctcacagaagtggtttggtcactcatttttttcagatttcaatgagattttttttttttaaagtcatcgtcaatccaggtacatttataaaaggtaccttaagcctgggatatgtgacagacactgagcacacagctttccatcagcttggggtacactgacccacactattcattcaattatggagactggcatcacagtcaatgactggccaatggctgactagcatggccagggtctcatggtcattggagtgtcacgatctcctaagaggaatgccagtattttcaggacaaaatgcttaccatgggagaattcctacggattcttgaagatgaggtgatagaagtattctcaatacttttctcatgtcacatctcaagaggacagaataaaatattttatatgaaacccagttcttggttcatgccgatctgtgaaaacagtacaaatatgggaagatggtaagtatatatgtccatttgtcaaacatgcacaagaagggagcgtttgttatgtatattaatatcaaatatactaacataactctactaggatgtttttgatattactgaaaaggagaacgcaaaaaaaattggaaataaaggataatgaaagccttggatgattcaccagataattaatgtctcatactgttattaacagatcattcacaaaactgattatctacttgactacagaaaaaattacaaaataagccataaaaagtaaatttattcaaacttggatgttacctttggagtgcgtccttttgttctgcccccagggaatgaaacaggtaagagtgacaagatcagcatttctttgggatggcagtgagaattccatgcaattccaaaatcacttccgttctgcaaggcacaggggacattacaggagttttgaaacaaaaccttcccaactgaatgattcctgacaacagtttgtaattaattagccatagtcacttgactatccacataactaaaaaatctgcttgttgcttggaacagggtaagtacagaaaatcaatgtttccaagattttggtctcgaaggccaaaggccccgagtattactaaaattagaatctctcttaaaatatacaaagactcaatgaaggaatattcctattagccaacaatatccatctaaaatccctagaattagaaatttcattatttcacattaaaatgtttaatgaagcatctaatttaatctatcatctaatgcttagaaaattgctccctgagtgacaggaaaaagaaaaacaaatgctgttctaatccttgagactgagttaggaagcaaattccagcatgtaataagataatcccatgaatacaacccactcttcaattttcacatatttcttttagtgaaagaataaatagcaagcaaagactgataatttctttctaattgactacataatatacctatacatgctgatactcactaagaatgttgtggcgtctacgaaaatagtgtgaatgactcgagtgctggcacagccatttctacagtgttcactcctctgacgctggtaccccaaagcctgattactaggtgtttgaaggctgtcagccatgcacttaaatcattgtcatgtaattcccgaagatatataggcctctgtacaattcatctgctctaacatatgcaagtgggttcgttttggtaccagttcctgaccaaactgaacgccctccacgggtttgcctggtatggtccctgtgctggacctcagctcacagaagtgtcttggtcactcattttgttcagatttccaaggtttccatttttttaagtcatcatcgatccaggcacacttataaaagggaccttaagcctgagatatgtggcagacactgaacactgatctttctgtcacctggggacttgccaacccacagtattcaattacaaagaccagcatcacagccagtgaccagtctcatgactgacaagcacagccagggtctcattgtcattggagtgtcatgaccccctaagaagaatgttggtgctttcaagacaaaatgcttaccaatatttgaattccccctggcccttgagaatgggagggcagaattatttccattactttccttcatgtcacacctcaagtagaaggaataaactcttttatatgaaatctagtttttggtccacattaacctttgaaaataggaaaaaattatagaaaaataaaaagtgcaaatgtaatttgccaaccatgcaaatagtgtacatatacaacaggcttactatgcacaagtatataaaatatactaaattattttgctagtagggtatcctaatgttatttgaaaacagaggaagtataaaaatactgtacaaagaacacagaaacttcagatgactaaccagattattagggcctcacaccatttggattaacagactgcttgaaaaaccaattataatcttacttgctaaaataaaataatagaacgaacccaggaaaaatgcacttactaaaaattgcaatattacctctgaagtgtattgttctcattgccagacaacgaatctggtacacgtgacaaaatcagcaggttactggagcagcagtaggaattccatgcaattccagtattacctccaatacacaaagcacactgaggaagtaggaagtcgacaaatgaaaccctcataattaaaagagtttcatttgtcaactttcttactttcataattactaatgacgagttataagaaataaaccatagatattcacttgcccatgtggtatgagaataaaaattatgctcactccctggaaatgggtagtactgaaagtcagttttctaagaccaaaaggcctcccttagtatcacacaataaaactaggatctccctttaaacatctatgaaacccactaataaaaataatgaatatcaggcaatgaaatccacataaaactctatgaattgcaaatttaatcattttacaattagaaatgtttactatagcatctactagaatcccttaatcaaatgtctaaaaagcttctctttgagtgacaggcaaaacttaaattccaacttctgtgacaagatcaataaggaaattaaaatgttaagactttccacaaatagaaagtacccttcaatttccatacattcttttctttaatagataaaagctactcttcaatttccatatatttcttttacttaatagataaataatatgtaaaacctcataataccttttacactgtccatctaatgaacctgagagactgacctcacacacaagattatagcacctaaaaacatgtataaaagactctagggtaggcaaaaccatttcctactgttccctctactcttgtgtaattctgtttactatgagagtatggacactgccagccaaacactgaaagaaatgccatataatccccaaagatatatgtacacaaacatatataaatatatacaaacacatacagacctctgtacaattcatgtgctgtaagctatgtgagtgggtttgttttccaataccacaggccattttggtaccagttgctgaccaaactgaactctctgcacgtgtttgcctggcatggtccctgtgcttgacctcagttcacagaactgcacagaagtggtttgctcactcgttttgctcagattccaacgagattcatttttaagtcgtcatccatccaggcacatttataaaagggactttgaacctgagatatgtggcagacactgagcacatagctatctgtcaccaatgacccacactattcaatcatggagaccagcagcacaatgaccagccca

SEQ ID NO: 1886320 - DNA, 4001 bp, Homo sapiens
ccaacatggcaacatgcagtcatagtctgcggcctccagacctgagcccctaccaacccaacaattcaagaccaaggccttcaatcagcaggatgtaaactctgacctcgaggccatgcagacataggcccaagggccctcacataacagccaccatccctagcctgagcataagctcctcctcacggggcatctgatgtcgtgaccagacactgtctctggcagcactcccaggaaaggcacacctggcacaaaaccaaacacaaccagcactggagggcgcctttgcaacggccagcacgtcactctgaaactcagcatcaaggccacaggcagtctgcccaacctaggcaaatgacctcaagacacgggcttcctctcctccactcagtccatgtacctgcaccatgtcctcaggacacccaaagggaatggctgcttttcccatgggacatccctgcctaacgccccaaacaccaggcagacaggacacagtgccttccatcatccttgcatcgatcacactcaaaggccttccttgcaccgacctccgacgcaacatcccaccacgcagccaacttggatgcaggaccatcctccccaacacctgctcaacgacatctgacaaccaccaccaggtctacatgcacatggctactaagtgagccacgagccgcagaatgaccaatcctttccaactttcctaagccatctgcatgcccttcaacatggcatgactatcctggctacgctgagactaacggggttgaaacagttcatcacacctagggcgtagctaaatccaacacttgagtatcaccaacatgcagaggagtagaggcaactcaaatcaagggactctctatggaaggcacctaggattaaatatgcattgtctggactgcacacagacccccatggacagctccaagtgtgaccgaatcccacaggagagttccgagccagggccagggccagggcacattccctctgaaagtcttcaggatggaagccactttcaaagcaggacggaagatccaaagcagttatttgctcacaagagctgcagcatgtggggctgctcagcaatggagggccaagagaccatttccaggaagatgtgcacaacggtggagcccactattctgccgggaagaccagaagtgaccgagggccacgggctacagcccaacactcatgctccttggatctgcccttgaaggccccactggctaacctgtcatccacaatagaaatccatggaaagcccatcactgccaaatgacagcccaagaccactgatgacacgcgtgtccatgtgagccctctaccaccttttctctggggtactgtcctgcccaggctgagccaccacaccatggataactcatggctcaggagccaaagaaattgctgccaggggcccctgtaaccaacactggggggagggccaaagaggctttggctgtctgccacaacacccattgctctccactgtcccccatcactttggcactcccctctcctcagataactgaaaatcaagaccaaggtctgtctgaggtctgggccttgtgctctccttggcataaaaaaaagacctggtccgccacatagagaggcccatcaggaggtcagggtctcccttcctggcagctcaccaagccaaggccagccgcacactcccctaggtctgcatttccacccacttctacagttgccacgacatcacagagcagccaatccccccatgactctcctacttgtatacctcacacagagggaatatttctattgtgcctgtgatgtgagactttcatccatggacgccctgagtggtagaacctctgggaaccagtggaagttgtccctcgctcctacagtccccgggggaggcaatgtgctggacctcagttccgatgagaacgacggtatgagttctcactcattttgttcagcttttccaaggaatgtttttatgggggactcatcatcgatccaagcacatttgaaggggcaggatatttgacaccacaggctgggcagtgggcaagccgatgaccttaaaaaccctccgcacgctggggaagccagagctgcaccactgaacaatgggcacagaccgttcactttaggagtggaactcgccatgccatcagtggcctgctgagaaacagctccttgcaggtcttggaaatcccacccccactcagcatgtgcggcggaggaatgcttaccatcctgagccatccaccagcagggggcgcaccgtggatgctaggcaacaccaactccaggatgttgggggcctttgtggctcagaagaactgaccatcttccttgccagcatatggcgggtgtcccatgataactgcccctgagaagtgtaaagaaatcaaatgcatgcttgagaaatgggcccaggttcactggtcacttcaacgccactctcttccacagagcaacacacatgcccgcttctccttggcctccattatggacctccatctttataaatgtatctgactgtgtcactttctagacacctaggaagcacgtgtggccggaacgaccacacgcacgtggtgctacgtatatttgcctgtggctgtgagcgcctgtttgtgtgtgtgatagtgtatgtgtgtttccctcatgcacatgtgtttcccaacaccgcaacaggaggccatagtctgcagcctccagacctgaagcccctgcaacccgaaggctcaagaccaaggtcttcaatcagtaggatgtaaaatcaggccaggaggacataggcctgaggtccctcacctaacagccaccacccctggagtgagcacatgctcctcctcatggggcatctgatgttgtgacctgacactgtctctggctgcactcccaggtgaggctcacttggcggaaaaccaaccacaaccagcacgtgagggcgccttcacaattaccaacccataggtctgaaaatggcatcaagccagaggcaatcttcccaacctagccaaaggatctcaagacacgggcttcctccactcagtccacatgcccgcactgcaccttcaggacaaccgaagggaatggctgttttccaacaggacgtcccttccccaaggaccaggttgacaggacacactgccttccatggtccttgcactggttacacccacagggcttctctgcacagaactctgaggcaacatcccatcatgcagccaacttgactgcattaccacccatcccaactcctgcaagtcaacactgcctcagcaccatcaccaggtctacaagtaaacagctactaatgagctgcgatctgcagaaccaccaatcccttccaacattcctaatgcagtcgtgggcccctcaacatgatatggctgtcctggctgcactgtgacatcaaactgtttaagggagctgaaatgcttcatcacccttagggtgtagcagaatgcaacactggaacatcaccaacatgggaggtgcaggggcatcccaagtcaacgaactctccatggcaggcccctagaatgttgcctggaatgcacccggatctccatggatagccacgtgtgaccaatgcccacagcagagttcctggccagggccaggacacataccctctggacgccttcaggatggaagctgctttcaaagcaggaaagaggatccagagccatatttgctcacacgagctgcagcaggtgtggccgctcggcaatggcgggccaagagacgacttccaggaagatgtgcccaacagtggagcccactactctgtcaggaagacgagaagtgaccaagggccaggagcacaagtctgacccttgtattccctggaacctgccctctgacacctctgctggccaacttgtcatccactagagaaataaatggaaagcccatcaacgctgaacaacagcccaagactgctgatgacacacatgtccacataagccccctaccacctcttctgtggagtaccttccagt

SEQ ID NO: 1886321 - DNA, 4001 bp, Homo sapiens
aaagaagactgctgtgaagaattaggaggaatttgaaaataccctaatatcaggagacgctgaggtatataagcaaggagaccttcgcaggtcacatttccaagtagaagtcaccacgatgtggggaatgacacactcttataaaccccaactgcatcaagatgtctgagcggttcagaggcaaatgacatcaggctctcccaagcaaaccatcctgaggatatcacgaaatggaccttgggcaccctgcaatgtcttaaagagcctcacagtcatcactccacgacccacatggaatgatgccaggtaaaggcacacacagacctctccccttcccacagccactacccttcttgggccatgaaatttggaattctacttatagatgtacaagttcactgtagagagcttctccaggctcctttccagagagcaaatcagcatcaccactggcttcaagatggccagcccttgatgctacccaaacaccataagaagtcccatgtccccggccacagatgaaagacagttgaagaagtgctcaggaatggcaccgtgctgtctcctcatgtggaataaattgtcttcttctggggggtgacgaacccaagaggtatgaatcaaggacagacccagccatgcagaggtgggcaactggataccgccttcctgtggcacctgcaggtttaccttctcctgcacactggcaggatgctaccccaccttctcacaggtaagtcgttcaacaaacgtatctctcagccaggggagtacaaaatactcagctactcagtttcactgaaagacaactacatcctaagccttggtgcacaccatgataacaaacagatgttggccccctaaatctaggccctgatggagaagcgtgctggacctcagttagatgaggatgatggtactgagttttcactcattttgttcacctttccaaaaaaaaaaaaaaaacgtatatatgtaagtcatcatcaacctacacatagtctttgtccctgcaagtgaggaaaatcagaatgctttcagaagaaatcacttacattcaggagaaatccaaaagcctccaaaggagcccacaccatttgtatccaggggcctcatggcatctcaaagatcacacaagacgaagaccatccttcttggacaagggccttccttccatgccaatgacaccaggaaggtgcagaggaaatgagtgtgcttcagaaagacagacaggtacataggtcaggaaggctatgtcatatagactcctgtggtacatatgaaatctgcttatctatggcttcacatatctgtgttcacagaaacacatatacagagttgcacatgtggattccgggtaccctgggagggcgtcatgccactaaagagtatgggcgtagagcatcccaatcaacaccatggcttcaatacttgcaatttgtgtacaaaagacttggtgccctggatgctgaaagccaaaaacttgtaccactactcagttcaagataagataagagatgacatgccagtcagcccaacattggaacaaaagcaaaaacattcaggaaatatgtacttcctcaacatataaaaaaaacaaggaaactttctccatgaatgttggtgaaaggctgtgattggtgaccagaacctggctaaaaatcaatcatgcaacaaaaatccaaaacctagcattaagggtgaaaccaacttgacaccaagaagagtaacactaaaaaaattcatgggctacccaagtatgattctcaaatacatttatgataaagaattttactatggtcaaaacgaccacaaaaattgaatgccagtgcctgggtagtgaagtaccatgtaatatgacagttacccgtgaaccacaataagccaaagtggaggcaatgtgctggacctcagttccgatgagaacgacggtatgagttctcactcattttgttcagcttttccaaggaatgtttttatgggggactcatcatcgatccaagcacattcaaagacgcaggatgtttgacatcataggctgggcagtgggtgagccgatgaccttaaacatgttcggcaccctggggaacccagagctgtgccactgagcaaaaggtacagaccatccactctaggagaggaactcagcatgccattagtggcctactgaaaaactgttcattgtgggtcttgggaatcccaaagacaccctcactcagcacgaagggcagaggaatgcttaccgtcctgagccacccaccagcacggggtgcactgtggataccaggccacactgaaaccaggactctacgtggcctttgttgcttgggagaatcgaccatcttccttccagcaggcctgcgcctcccatggcaactgcccctgagaagtgtaaagaaaccaaatgcatgcttgagaaatgggcccaggtccactggtcacttcaaacccattcttacctgtggggcaacttgcatgcctgcttctccttggcctccatgattgatctccatctccatgaatgtatcttacctctgtcactctgtggacacataggaagtgtgtgtgcctggaacaacctcatgtgcccattgctgcgagtatttgcctgtggctgtgcacacgtgtgtgtgtgtgtgtgtgtgtgtgtgtgtgtgagattcccactgcaatgggcggttatagtctgcagcctccagacctgatccccccaacaaatcaaaggttcaagaccttcaatcagtaggatgtgcactctgatctcaaggccacgtggaaataggcctgatgtccctcgtgtaacagccaccacacccctggcgcgaatacaggctactcctcacagggcctctgatgtcgggaccagacactgtctcttgctgcactcccaggtaaggcacatctggcggaaaaccaaccaaaacctgtgctggaaggcacctgcccaatgctcagaatgttgcactgatacatgacgtcaaagccagaggtggtcttcccaacctagccaaacgacctcaagaaacagcttcctccactccactcagtccacgtacgcacacgtgccctcaggatgcctgaagagaatggctgcttctccaacaggacgtccacgcctgatgccccaaaagccgagtggacaagacacaccacctaacattgtccttgcactggtcacctcacagggcttccctgcactgacctcagaggcaatgtcccatcgtgcagtcagcttgaccgcattcccacccacaacaatgcctgcaagtcaacaccacctcaacaccagcaccaggtgtagatacatgtggctactaagtgagctgctagctgtagaaccaccaatcctttccaactttcctaagccaaccacaagcccgtcaatgtggcatggctgtcctggctgcactgtgacttcaaactggctaagggaactgaaacgcttcatcaccccaggatggagcagaatccagcacttgaatatcgccatcatacagtggcacggaggcatcccaagtcaaaagattctctgtggcaatgccattgggattgcacatatgttgcctggaatctggaatacacacagaccttcatgaatagccccaagtgtgactagagcccatgggagaggcccagggcagagccagagccaaggcacattccctctggatgccttcgggatggaagctgctttccaagtgggaaagtggatccagagcactatttgctcaaacgagctgcagcaggtggggccatccggcaacggcgggccaagagaccatttccaggaagatgtgcacaacagtggagcccactactctgccgtgaagaccagaagtgaccaagggctgtgggtgccagcctgaccctcatgttcactgtgacctgccctcaatgacccctgctggctgagctgtcatctgccagagaaatccatgtgaagcccatcactgccaaatgacagccccagaccactgatgacacacatgtccacgtgagcc

SEQ ID NO: 1886322 - DNA, 4001 bp, Homo sapiens
tactgctctcctaagatgtttccagtgttattcaacaatagtcaatgtgtttgtctctagcttccatcagtccaaatactgtccaacatttactgccagacaaatcaaatgtgcaaccagactatcagtttgctcaaagttccaagaagatgttggcccggtgaacatcccattcacaataatgcatagcatttccgtaaattcaaccacctcaggattactttacctttaaaggtgacccaacggactggggaggaagaagtcacaaaaagccatgataagggaataaacaaatggtctaaaaatcactcgtagcactcaacctgcttgagagtgggagcgtggcaatttgcagaagctgcagagctgcactgcacctgattccactaaaagtggtcacagcaatgcaggcaggacacacacaggtatggtactgtcccgggacatgtgactagaagaactgggcagtgcgcagagagggaaaggcggcctctgaaccctctcaccatgagctgcttcccacctactctcagctctcaagagtgacgctcaccaggtggtactgctgaggacccagtggcatgtgggcaccgcataccccttagtcgcacccaactttcctctgccacactgctgaggatcagcctctctggcactctccacgcttcaggcccatagaaagatcatcagcaagactgagaaagcacaaaaattctggaaaagaacaaacagaagcctcagatgactcaccagattaaggtcttatagtatctgaattaactgactccatatagcacccattaaattcctaaatacttaaaacagtaataacccaggaaaaaagatatcaaaaattagatgttacctcagcgtgtttcattgtattctttttcagttgaggaagccggtaaaagtgacatatcagatcttcatttcccaggcttttcaacaagatcaattattacagttatcagtgacaaatgcaaacttctaaaaaaggggcaatgtttgcctcagatcttcattggcgtaaaggttaaaaatctatgcaactctagtatcacatggaacctgcaaaccacaggggcaattagagaagttgagaaagaaatcttctacatcgaatgtttcctgataagaagttatgaggaattatgatacatactcactgacaaggtgtatgtccagaaaaaagtatacttattccacagaacaggagaatgtttaaagtcctttttccaagacctgttcaggttaaccgtaaagtccacctagacatcaattaacaaggatctcccttaacatgcataggaaaatccactgatgaaatatgaagattagccaataaaatccacataacattccaaggactggaaatgtaatcatctcacaacatctacttgaatcactcaaatgtctagaatattgctttatacagacagaaaaaaggtctgaattcttggtactgggttagcaagcaaatttaaacaaactaaaatattctcatggttagaaatcactcttaattttccagatattacctctgcctaaaaaaataatcgataagatccacaccatctttggaactgatgatctaaatgaccttagtaaactgctctcactcaaaagactgtcatgtcccagataacttatggatggctcaaaggtaggcacaatcatgtctcatggggtctcactacatatgtgctggttttccagggtctatttactaccagtggatggatgctaccagccaagcaccaaaggaatagccattttattaaaaaatacgatatttatagatgactgtccaattcatttcctctaacatacgcaggcagattagctttcaaataccccagtccctgtgggcactgaccatccacatccctccacgtttgcctatcatgtgtgctggacctcagctcacagaagtggtttggtcactcatttttttcagatttcaatgagattttttttttttaaagtcatcgtcaatccaggtacatttataaaaggtaccttaagcctgggatatgtgacagacactgagcacacagctttccatcagcttggggtacactgacccacactattcattcaattatggagactggcatcacagtcaatgactggccaatggctgactagcatggccagggtctcatggtcattggagtgtcacgatctcctaagaggaatgccagtattttcaggacaaaatgcttaccatgggagaattcctacggattcttgaagatgaggtgatagaagtattctcaatacttttctcatgtcacatctcaagaggacagaataaaatattttatatgaaacccagttcttggttcatgccgatctgtgaaaacagtacaaatatgggaagatggtaagtatatatgtccatttgtcaaacatgcacaagaagggagcgtttgttatgtatattaatatcaaatatactaacataactctactaggatgtttttgatattactgaaaaggagaacgcaaaaaaaattggaaataaaggataatgaaagccttggatgattcaccagataattaatgtctcatactgttattaacagatcattcacaaaactgattatctacttgactacagaaaaaattacaaaataagccataaaaagtaaatttattcaaacttggatgttacctttggagtgcgtccttttgttctgcccccagggaatgaaacaggtaagagtgacaagatcagcatttctttgggatggcagtgagaattccatgcaattccaaaatcacttccgttctgcaaggcacaggggacattacaggagttttgaaacaaaaccttcccaactgaatgattcctgacaacagtttgtaattaattagccatagtcacttgactatccacataactaaaaaatctgcttgttgcttggaacagggtaagtacagaaaatcaatgtttccaagattttggtctcgaaggccaaaggccccgagtattactaaaattagaatctctcttaaaatatacaaagactcaatgaaggaatattcctattagccaacaatatccatctaaaatccctagaattagaaatttcattatttcacattaaaatgtttaatgaagcatctaatttaatctatcatctaatgcttagaaaattgctccctgagtgacaggaaaaagaaaaacaaatgctgttctaatccttgagactgagttaggaagcaaattccagcatgtaataagataatcccatgaatacaacccactcttcaattttcacatatttcttttagtgaaagaataaatagcaagcaaagactgataatttctttctaattgactacataatatacctatacatgctgatactcactaagaatgttgtggcgtctacgaaaatagtgtgaatgactcgagtgctggcacagccatttctacagtgttcactcctctgacgctggtaccccaaagcctgattactaggtgtttgaaggctgtcagccatgcacttaaatcattgtcatgtaattcccgaagatatataggcctctgtacaattcatctgctctaacatatgcaagtgggttcgttttggtaccagttcctgaccaaactgaacgccctccacgggtttgcctggtatggtccctgtgctggacctcagctcacagaagtgtcttggtcactcattttgttcagatttccaaggtttccatttttttaagtcatcatcgatccaggcacacttataaaagggaccttaagcctgagatatgtggcagacactgaacactgatctttctgtcacctggggacttgccaacccacagtattcaattacaaagaccagcatcacagccagtgaccagtctcatgactgacaagcacagccagggtctcattgtcattggagtgtcatgaccccctaagaagaatgttggtgctttcaagacaaaatgcttaccaatatttgaattccccctggcccttg

SEQ ID NO: 1886323 - DNA, 4001 bp, Homo sapiens
ttctagtttgcagcctccagacctgatccccccagcaatccgatggctcaagaccctggccttcgatcactggatgtgaactttgacctccgggccatgtggaaacaggtcacaggtctcttacctaacagccaccacctctggcaggagcacaggctcctcctcttcctcatggggcttctgatgtcatgacaagacactgtctctggccaccctcttaggtgaggtgcacctggcggaaaaccaaccacaaccagctccagagggcgcctttgcaaagtccagcatgtcagtctgaaacttggcatcaaggccagaggtaggactagcaacctagcaaaaggacctcaagatacatgcctcctcccctccactcagtccatgtgcccgcaccgttccctcaggacacccaaagagaatggctgcttttccaacaggacgtccctacctgaattcccaaggaccaggttgacaggacacactgcctgtcatcgttcttcaattggacacacccacagggcatccctgcaccgacctcagaagcaataacccctcatgcagccaatctgactgcactactacccaccccaacactggcaagtcaacactgcatcagcaccaccaggtctacatgcatgcagctactaagtgaactgagaactgtagaaccaccaatcctttccaactttcctaagccaaccaagtgcccttgaaagtggcacggctgtcctggctgcactgtgaatttaaactggctaagggagctaaaatgcttcatcatgcatagggagtagcggaatccaacactggaacattgccaacatgcagaggcgtggaggcatcccaagtcaagagactttccgtggcaacacccctgggattgcacacgcattgcccggaatggacacggacctccacagacagccccatgcatgattggaacccacgggagggtcctgggcctgggccagggcacattccctctggatgcctttgggacggatgctgctttcaaagcaagaaaaaggatcaagagcagtatttgctcacacaagctgcagcaggtggggccgcctggcaatggcgggccaagagactatttacaggaagatgtacacaacggtggagcccattactctgccaggaagatcggagtgacccagggccacaggcagcagcccaaccctcacacgcctgggaactgcccttgaagacccctgctgcccgacctgtcatccatcagaggaatacacggaaagcccagcaccaccaaatgagagcccaagaccactgatggcacacctgtccatgtgagccccctaccaccttttctctggaataccagagaatatgtcctacccaggtctccaccaccacaccatgggcatctcacggttcaggaggcaaagaaatccatgctggggtgaccctgggaccaacgctgggggaagggccgaagaggctttggccatctgctacaacacccattgctctgcactcttccccatcacccttggcactcccctgtcctcagctaactgaaaatcaagaccaaggtctgcctgaggctgggacctcatactctctgtagtaggggaaccaggacccggtcctgtgtgcgaggaagcttgacacaaggtccgggtctcccttcctgggagctcatcagtgccacgcactcctctaggcctgagatttttccgtccacttccacagctgccacgccatcacacagcatccaatccctccgtgactctcctaacagtgtatctcacgcaaagggaatgttcctaatgtgcgtgtgatggcagacatttacctgcggatgccctgggtggtggaacctatagggactagtggaagctctccctcactccaacagtccctgctggaggcaacgcgctggacctcagttccgctgagaacgacggtatgagttttcactcattttgttcagcttttccaaggaatgtttttttggggggactcatcatcgatccaaacacatttgaagaggcaggacatttgacaccacaggctgggcagtaggtgagctgacgaccttaaagaccttcggcaccctggggaagatagaaccatggcactgagcaaaaggcagagaccatttgctcaaggaatgcaactcaccatgccattagtggcctcatgagaaacagctcattatgggtcttggaaatccaaaagacaccgtcactcagcacatggggcagaggaatgcttaccatcctgagcaatccaccagcatgaggtgaaccctggaagccaggccacacagactccaggactctgcagggcctttgtggttcagaagaactgaccatcttccttccagcaggcagcgggcctcccacggcaactgcccctgagaagtataaagaaatcaaatgtacgcttgagaaacaggcccaggtccactggtcactacttcagtgccattctttcatgcgtggcaacttgcacgccttgcttctgttggcctccatgagtgacctctgtttccatgaatgtaccttaccagtggcactctgcaaacagcttggagctgtgtgtggcgccagaccgaccgcgcacacacacattgctgagtggctgtgtgtgtgtgtgtgtgtgtgtgtgtgtatctccctcatgcacatgtgtttcccaacacgagtttcccaacatggcaacatgcagtcatagtctgcggcctccagacctgagcccctaccaacccaacaattcaagaccaaggccttcaatcagcaggatgtaaactctgacctcgaggccatgcagacataggcccaagggccctcacataacagccaccatccctagcctgagcataagctcctcctcacggggcatctgatgtcgtgaccagacactgtctctggcagcactcccaggaaaggcacacctggcacaaaaccaaacacaaccagcactggagggcgcctttgcaacggccagcacgtcactctgaaactcagcatcaaggccacaggcagtctgcccaacctaggcaaatgacctcaagacacgggcttcctctcctccactcagtccatgtacctgcaccatgtcctcaggacacccaaagggaatggctgcttttcccatgggacatccctgcctaacgccccaaacaccaggcagacaggacacagtgccttccatcatccttgcatcgatcacactcaaaggccttccttgcaccgacctccgacgcaacatcccaccacgcagccaacttggatgcaggaccatcctccccaacacctgctcaacgacatctgacaaccaccaccaggtctacatgcacatggctactaagtgagccacgagccgcagaatgaccaatcctttccaactttcctaagccatctgcatgcccttcaacatggcatgactatcctggctacgctgagactaacggggttgaaacagttcatcacacctagggcgtagctaaatccaacacttgagtatcaccaacatgcagaggagtagaggcaactcaaatcaagggactctctatggaaggcacctaggattaaatatgcattgtctggactgcacacagacccccatggacagctccaagtgtgaccgaatcccacaggagagttccgagccagggccagggccagggcacattccctctgaaagtcttcaggatggaagccactttcaaagcaggacggaagatccaaagcagttatttgctcacaagagctgcagcatgtggggctgctcagcaatggagggccaagagaccatttccaggaagatgtgcacaacggtggagcccactattctgccgggaagaccagaagtgaccgagggccacgggctacagcccaacactcatgctccttggatctgcccttgaaggccccactggctaacctgtcatccacaatagaaatccatggaaagcccatcactgccaaatgacagcccaagaccactgatgacacgcgtgtccatgtgag

SEQ ID NO: 1886324 - DNA, 4001 bp, Homo sapiens
aatgcacatgtgtttcccaacaccccagcgggcagtcatagtctgcagcctccagaccggaaccaaccccactaaaccaaagactcaagaccccagccttcaatcaataggatgtgaactttgacctcaaggccatgaggaaagaggtccaaggtcccttgcctaacagccagcacccctggcacgagcacatgctcctcctcacagagcatctgatgtcatgaccagacactgtctctggcccctttaccaggtgaggtgcacctgatggaaaaccaaccacaaccagcactggagggcgcctttgcaatggccagcacatcactctgaaacagcatcagggccacaggtagtcttcccaacctagccaaaggacctcaagacacacgcttccttccctccactcaatccatgtgcctgcaccatgccctctggacactcaaagagaatggctgcctttccaaaaggacatctccacctgaccccccaaagaccaggcagacaggacattgtcattatccttgcattagacacacccacagagtttccctgcaccaacctctgagacaatatcccatcactcagccagcttgaccatgctaccacccaccccaatgccagcaagtcaacactgcatcaacaccacccggtctacatgcatgcagctactaagtgagctgcaagatgtacgaccaccaatcctttccaatttttctgtgccaactgtatgcccttgaaagtggcatggctgtcctgcctgctctgtgacttcaaaccagctaagggagctgaaatgctttatcacgcctagggacttttggagtccaacactggaacatcgccagcacacagtcacatggagacatgccaagtcaagactctctgtggcaatgcccctgggattgcaaacacactgctcagaatgcacatagatctccacgggtagcctcatgcatgactggagcccaaaggagagtcccaggccagggacagggcacattcgctctggacacttttgggatggaaagcgggaatgatacagagcagtatttgctcacgagagcagcagcaggtggggccacccgacaacgaaggccaagagaccatttccaggaagatgtgcacaacagtagagccccctactctgctgggaacaacagaagtgacccagggccatggacaccatcctcacactcactcacccagagacatgccctcaaagacccaccctggctgacctgtcatccaccagagaaatccatggaaagcctatcactgccaaattaaagcccaatgcacactcatgtccacgagagccctctagcaccttttctctggaataccaccctgcctacaccttcaccaccaaaccacaggcatcttacatttcgggaggcaaagaaatccgtgctggggggacactgtgaccaacattggcaggagggctgaagagccattggccatctgccgtggcacccattgctccacactctccctcatcacccttggcacttccctgtcctcagctaaccagaaatcaagaacaaggtctgcctgaggcctggaccttgtgctctccttggtagcaaaagtgagaccttgtcctctgcatggagatgccacccatgaggtccaggcctcccttcctgaaagctcaccaagctgagaccagccacacactcccctaggcccacgacatttctcccctcttccatggccgccacgccatcacagagcagccagtgcccccacaaatctcccacccatgtacctcacacagagggaatgttcctaacgagtatttcatgggagactttggcctgtggatgtcctcggtggtggaacctatgggaaccagtggaagttgtccctcgctcctacagtccccacgggaggcaacgtgctggacctcagttctgatgagaacgacggtatgagttctcactcattttgttcagcttttccaaggaatgtttttatgggggactcatcatcgatccaagcacatttgaagaggtgggacatttgacacccacaggccagacagtgggcaagccgatgacgttaaagaactttggcaccctagggaagccagagccgcgccactgaacaaccggcacagaccatccactttgggaatggaactcgccatgccattaatggcctgccaagaaactgttgctcacaggtctcagaaattctaaaggcaccatcactcagcacacggggcagaaaaatgcttaccgtcctgggccacccgccagcacggggtgcaccgtggatgccaggccacaccaaatccaggaacccgcagggcctgtttctcagaagcatcgaccatcttccttgacagcaggcagcggacctcccacggcaactgtccctgagaagtgtaaagaaatcaaatgcatgcttgagaaacaggcccaggttcactggacacttcaacaccattctttcccacagggcaactcacacacctgcttctccttggcctccatgactgacctccagctccatgaatataccttacctgcgtcactctgtggacacctaaaagcatatgtggccagaaccacaccatgtgcacatcgctgcatctattagcctatggctgtctgtgcctgtgtgtgtgtgtgtgtgtgtgtgaaagagagagtgtgagtttgagtgtgagtgtatgagagtgtgtgtgtatgggtgggtgtgggtgtgtgcatgtgtgagaatgttagtttaaatgggcatgtttgtctccctaatgcacatgtgggtcccaacaccacaatgggcagttctagtttgcagcctccagacctgatccccccagcaatccgatggctcaagaccctggccttcgatcactggatgtgaactttgacctccgggccatgtggaaacaggtcacaggtctcttacctaacagccaccacctctggcaggagcacaggctcctcctcttcctcatggggcttctgatgtcatgacaagacactgtctctggccaccctcttaggtgaggtgcacctggcggaaaaccaaccacaaccagctccagagggcgcctttgcaaagtccagcatgtcagtctgaaacttggcatcaaggccagaggtaggactagcaacctagcaaaaggacctcaagatacatgcctcctcccctccactcagtccatgtgcccgcaccgttccctcaggacacccaaagagaatggctgcttttccaacaggacgtccctacctgaattcccaaggaccaggttgacaggacacactgcctgtcatcgttcttcaattggacacacccacagggcatccctgcaccgacctcagaagcaataacccctcatgcagccaatctgactgcactactacccaccccaacactggcaagtcaacactgcatcagcaccaccaggtctacatgcatgcagctactaagtgaactgagaactgtagaaccaccaatcctttccaactttcctaagccaaccaagtgcccttgaaagtggcacggctgtcctggctgcactgtgaatttaaactggctaagggagctaaaatgcttcatcatgcatagggagtagcggaatccaacactggaacattgccaacatgcagaggcgtggaggcatcccaagtcaagagactttccgtggcaacacccctgggattgcacacgcattgcccggaatggacacggacctccacagacagccccatgcatgattggaacccacgggagggtcctgggcctgggccagggcacattccctctggatgcctttgggacggatgctgctttcaaagcaagaaaaaggatcaagagcagtatttgctcacacaagctgcagcaggtggggccgcctggcaatggcgggccaagagactatttacaggaagatgtacacaacggtggagcccattactctgccaggaagatcggagtgacccagggccacaggcagcagcccaaccctcacacgcctgggaactgcc

SEQ ID NO: 1886325 - DNA, 4001 bp, Homo sapiens
caacaccacaaggggtggtcatagtctgcagcctctagacctgaacctcctcacaacccaaaagctcaagacccaggccttcaatcagtaggatgtgaactttgaccttgaggccatgcggacatgggcccgaggtcccttgcctaacagccaccaagcctggcatgagcacacactcctcctcacagggcatctgatgttgtgaccagacactctctctggctgccctctcaggtgaggcacatgtggtggaaaaccaactacaaccagcactggagggcaccatcgcaaagtccagcacctcagtttgaaactcagtgtcaaggccagaggcagtcttcccaacctagccaaacaatctcaagacacgggcttcctcccctccactcagtccacatgcccacaccgtgccctcaggacatcctagctaatggctgctattccaagaggacatctccacttgaccccctaaggacaaggttgacaggacacaccgcctgtcatcattcttgcactggacacatctacagggcttccctgcaccgacctctgaggcaacatcctatcacacagccaacttgacctcactactacataccacagtgcctataagtcaacactgtctcaacaccacggggtccacaagcacgtttctgctaagtgaactgcaagccgtagaactaccaaccttttcagctttcctaagccaactgtgtgcccttcagcgtgacatgcctgtcctggccgtgctgagacttcaaaccagttaagggagctgaaatgcttcaccacgcctagggcatagcggaatccaacactggaacactgtcaacacgcagagtcatcccaagtcgagagactctctgtggcaatgccgctgggactgcatacgcattgcctggaatgcacacagacctccgtggatagccccatgcatgactggaacccactggagaatcccaggccagggccagggcacattccctctggatgccttcagaatggaaattgctttccaagcgggaaagaggatccagagcagttatttgctcacatgagttgcagcaggtaaggccacccaacaatgcatgccaagagaccatttccagaaaggtgtgcacaacggtggagcccactactctgctgagaagaccggaagtgacccagggccacagacaccatcccgacactcacttgcccagagacatgccctcaaagacccgccctggctgacctgtcatccaccagagaaatccatgggaagcccatcaccaccaagtgacagcccaatgcagctgatgacacacatgtccacatgagcccttcaccaccttttctctggggtaccatcctggccaagccttggtcactgcaccatggtcatctcatggctagggatgcaaagaaatccatgccagggggcacctgtgactgatgctggaaggagggccaaagaggctttagccatctgcggtgacacccattgctctgtgctctcctccatcaccttggaactcccattatcagctagtggaaaatgaagaccaaggtctatctgaggcctgagcctcatgctctccttggcaggggaactgtgacctggtcctctacataaagacacctgctgcgaggcccgggtctcccttcctgggagctcaccaagccgagaccagccatacacaaccctaggtcaaaacacttccacctgcttccgtggctgccacaacatcacagagtggccaatccctccacaactgtcccatccgtctatgtcatacagaggaaatgttcctcacatgcatgtgataggagattttcatctgtaaatgccctgggtggtggaacccatgggaaccagtggaagttgtccctcgctcctacagtccccagaggaggcaacgtgctggacctcagttctgatgagaacgacggtatgagttctcactcattttgttcagcttttccaaggaatgtttttatgggggactcatcatcgatccaagcacgttcgaagaggcagaacatttgacaccacaggctgggcagtgggagagctgatgaccttaaacaccttcagcatcctggggggaacccagagccacaccactgagcaatgaacacagacaatcagctctgggagtggaactcgccatgccattagtggcctgctgagaaacagctctttgcaggtctcaaaattcaaaagacacctctgcacacagggcagaggaatgcttaccaccctgagccactcaccagcattgggtgcaccatagatgccaggccacaccaaatcaggactcaaggcagcctctgttggtcagaagaattgaccatcttccttgccagcaagcggcagacctctcatgacaactgctgctgagaagtgtaaagaaatcaaatgcatgcttgagaaacgggcccaagtccactggtcaccacttcaatcccattctttcccacagggaaacttgcacaccggcttctccttgggctccatgacagacctccatcttcatgaatatacctgacccatgtcactctgtggacacctaggaagcacatgtgaccacaacaatagcacacacccattgctgcatctatctgcctgtggctgtgcacgcctgtgcatgtgtaggtgtgtatgtcagagtgagtgtgtctatgtgtatgtgtctcccccacacagatgtttcccaacagcacaacgggttgtcatagttggcagcctccagacctggaaaccatccccacacctgcaaccaaaaggctcgagacccaaggccttcaatcagtaggatgcgaattttgacctaggggtcagacagacattggcctgatgtccctcgactaacagccagcacccctggcggtgcaagcacacagtcctccttacggggcatataatgtcgtgaccagacactgtctctcgccgctctcccaggtaaggcacacctgacaccaaaccaaccaaaacttgcactggaaggcacctttgcaatggccaccacgttggtcttaaacacggcacacggcatcaaggccagagacagtcttctgaacccagccaaaggacctcaagacacacacttccttcctccaatcagttcacatgcccgcaccatgccttcaggacacacaaagggaatggctagttttccaacaggacattcctgcctgaacccctaaagacaaggtggacaggacacaccacctttcattttccttgcattggacacacctacagggcttcgctgcaccgacatctgaggcaacatcccatcatgcagccaacttaactgcactaccaaccaccccaacgtcagcaagtcaacaccatctcaacaccatcaccaggtttacatgcaaacagctatgaagtgagctgcgagacatagaaccaccaaccctttccgactgtcctaagtcaactatgtgccatgccaatgtggcacggctgtcctggctgcactatgatgtcaaaccggctaagtgagctgaaacgcttcattgccctgaggatgtagcagaatccaatactggaacatcgccaacacacaaaggcgaggaggcatcccaaatcaagagactctccacggcagtgcccctggtattgcacatgtgttgcctggaatgcacaaggacctccatgaatacgccaagtgtgactggaccccatcggagagtcccaggccagggccagggccagggcacattccctctggacgcctttgggatggaagctgctttcaaagcgggaaatgggatccagagcagtatttgctcacacgagctgcagcaggtggggccgcctggcaatggcgggccaagagaccatttccaggaagatggacacttctactactctgccaggaagaatggagtgacccaggaccacaggcatcagcccgaccctcatgctccctaggacctgcccttgaagacccccaatggccaacctgtcatccaccagagaaatccctggaaagcccatcaccacc

SEQ ID NO: 1886326 - DNA, 4001 bp, Homo sapiens; identical to SEQ ID NO: 1886309

SEQ ID NO: 1886327 - DNA, 4001 bp, Homo sapiens; identical to SEQ ID NO: 1886324

SEQ ID NO: 1886328 - DNA, 4001 bp, Homo sapiens; identical to SEQ ID NO: 1886325

SEQ ID NO: 1886329 - DNA, 4001 bp, Homo sapiens
gcggttatagtctgcagcctccagacctgatccccccaacaaatcaaaggttcaagaccttcaatcagtaggatgtgcactctgatctcaaggccacgtggaaataggcctgatgtccctcgtgtaacagccaccacacccctggcgcgaatacaggctactcctcacagggcctctgatgtcgggaccagacactgtctcttgctgcactcccaggtaaggcacatctggcggaaaaccaaccaaaacctgtgctggaaggcacctgcccaatgctcagaatgttgcactgatacatgacgtcaaagccagaggtggtcttcccaacctagccaaacgacctcaagaaacagcttcctccactccactcagtccacgtacgcacacgtgccctcaggatgcctgaagagaatggctgcttctccaacaggacgtccacgcctgatgccccaaaagccgagtggacaagacacaccacctaacattgtccttgcactggtcacctcacagggcttccctgcactgacctcagaggcaatgtcccatcgtgcagtcagcttgaccgcattcccacccacaacaatgcctgcaagtcaacaccacctcaacaccagcaccaggtgtagatacatgtggctactaagtgagctgctagctgtagaaccaccaatcctttccaactttcctaagccaaccacaagcccgtcaatgtggcatggctgtcctggctgcactgtgacttcaaactggctaagggaactgaaacgcttcatcaccccaggatggagcagaatccagcacttgaatatcgccatcatacagtggcacggaggcatcccaagtcaaaagattctctgtggcaatgccattgggattgcacatatgttgcctggaatctggaatacacacagaccttcatgaatagccccaagtgtgactagagcccatgggagaggcccagggcagagccagagccaaggcacattccctctggatgccttcgggatggaagctgctttccaagtgggaaagtggatccagagcactatttgctcaaacgagctgcagcaggtggggccatccggcaacggcgggccaagagaccatttccaggaagatgtgcacaacagtggagcccactactctgccgtgaagaccagaagtgaccaagggctgtgggtgccagcctgaccctcatgttcactgtgacctgccctcaatgacccctgctggctgagctgtcatctgccagagaaatccatgtgaagcccatcactgccaaatgacagccccagaccactgatgacacacatgtccacgtgagccctctaccaccttttctctggaatactttcctgcccaggcctctgccattgcactacgagcagctcacagctcaggaggccaagaaatccctgccagggaggccctgtgaccaaccctggaaggagagccaaagagcctttggatatctgctgggacacccattgctcttccccatcaacttggcactcccttgtcctcaggtaaccagaaatcaagacaaagatctgcctgaggcccacacctcatgctctccttggcaaaaaaatcggacccagtcctgtgtgcagtgacatctgccgcgagatctgggtctcccttcctgggagctcaccaagctgaggccagccacacactccttgaggcctgcaaaatttctgtactcttccatggctgccacaccataacaaagcagacaatttgcccatgactctcttacccgtctacatcgcacagaggaaatgttcctaacctgtgtgtgatgggagactttggcctgtggatgccctgggaggtggaacctatgggaactagtggaagttgtccctcaatcctacagtccccggcagaggcaaatgtgctggacctcagttccgatgagaacgacggtatgagttctcactcattttgttcagcttttccaaggaatgtttttttggaggactcatcatcgatccaagcacatttgaagaggcaggacatttgacaccacaggctgggcagtgggtgagccaatgactttaaagaccacagccatgcccttaatggcctgctgaagaactgctccttgtgggtctcagaaatcctaaagacaccctcagtcatcatgcggggcagaggaatgcttaccgtcctgagccatccaccagcacggggtgcaccacggatgcaaggccacaccgaatccaggactccatggggccttcattgctcagaagcatcaaccatcttcctttcagcagacggcaggcctcccacggcaactgccccttagaagtgtaaagaaatcacatgcatgcttaagaaacagaccaaggtccactggtcacctcttcaacgccattcttgcttacagggcaactcacacacctacttttccttggcctccatgattgacttccattaccatgaatatacctgacccgtgtcactctgtggagacctaggaagcgtgtgtgaccgaaacgacagcatgtgcccattgctgaatctatttgcctgtggctatgcacgcctgtgtgtgtgtgtgtgtgtgtgtgtgagagagagagtgtgtctgtgtgtgtgtgtatgtgtgtctccctcatgcacatatgtttcccaacaccacaaggggtggtcatagtctgcagcctctagacctgaacctcctcacaacccaaaagctcaagacccaggccttcaatcagtaggatgtgaactttgaccttgaggccatgcggacatgggcccgaggtcccttgcctaacagccaccaagcctggcatgagcacacactcctcctcacagggcatctgatgttgtgaccagacactctctctggctgccctctcaggtgaggcacatgtggtggaaaaccaactacaaccagcactggagggcaccatcgcaaagtccagcacctcagtttgaaactcagtgtcaaggccagaggcagtcttcccaacctagccaaacaatctcaagacacgggcttcctcccctccactcagtccacatgcccacaccgtgccctcaggacatcctagctaatggctgctattccaagaggacatctccacttgaccccctaaggacaaggttgacaggacacaccgcctgtcatcattcttgcactggacacatctacagggcttccctgcaccgacctctgaggcaacatcctatcacacagccaacttgacctcactactacataccacagtgcctataagtcaacactgtctcaacaccacggggtccacaagcacgtttctgctaagtgaactgcaagccgtagaactaccaaccttttcagctttcctaagccaactgtgtgcccttcagcgtgacatgcctgtcctggccgtgctgagacttcaaaccagttaagggagctgaaatgcttcaccacgcctagggcatagcggaatccaacactggaacactgtcaacacgcagagtcatcccaagtcgagagactctctgtggcaatgccgctgggactgcatacgcattgcctggaatgcacacagacctccgtggatagccccatgcatgactggaacccactggagaatcccaggccagggccagggcacattccctctggatgccttcagaatggaaattgctttccaagcgggaaagaggatccagagcagttatttgctcacatgagttgcagcaggtaaggccacccaacaatgcatgccaagagaccatttccagaaaggtgtgcacaacggtggagcccactactctgctgagaagaccggaagtgacccagggccacagacaccatcccgacactcacttgcccagagacatgccctcaaagacccgccctggctgacctgtcatccaccagagaaatccatgggaagcccatcaccaccaagtgacagcccaatgcagctgatgacacacatgtccacatgagcccttcaccaccttttctctggggtaccatcctggcc

SEQ ID NO: 1886330 - DNA, 4001 bp, Homo sapiens; identical to SEQ ID NO: 1886320

SEQ ID NO: 1886331 - DNA, 4001 bp, Homo sapiens; identical to SEQ ID NO: 1886321

SEQ ID NO: 1886332 - DNA, 4001 bp, Homo sapiens
atataaacatctgtgcttagtatatgaaagatacttacttgtagttactcttgagggaagcggctttacgccaagtgccgtacaattcatctaacttccggaaagcactttcagtccaaatgcagaaacgtcccacatgcccaccaggagcaagcttcaaaatgttcagcttgcttacattaagcagagtaattccttttaaagggaaagaaaaattagggagcctgtattccaacaaaagaaacacaaatcatctttatggcttaagagctataaaaggtacctgagaacttattaattatgaagtttcaaccatcaatggtgcaactctttcagccataaatcagaacttccacaaaatcatttgtttcagaaacacggaccttaagtggaatctcatcataacaaaagctgagtagacttgcagagtatacctagtcaatatatgtaagcagtttaattaccagggatgtttctgaaggccttgatgataccattatcctcattatagatgatgcacgggcccctgcgctggatacggcgacggtttctcattttgcctttgccagctctcattcgctgagaggcatagacctacaaagtgagcagttttagtattctgattaagatagaatctctgcaatagatcttcagagttttaattcctttttacagatgattaaactgggcacaataacttgccaaggttacacagagccataaacagcagttaggattcaaacccaagtaatcgggctctgaggttcttgttctctcacacattaaggattagctatactgcccttatcttctgaaattcaaagtgacaaactgtgaacaaggagtaccaaactgtaaatgtgctcattgaacggacctttttgatatcattccaggctttaagtttcttaaggagcaaaacagcttccttggtcttcttgtagccttcaactttatcttcaactaccaaaggaagttcaggaacttcctcaatacgatgacctaacaaaaaccaatgacacttacttggttatcctgaaacttttggagaaaaaaaaaaaatcaaacattttatacaaccaataaaagcaaaatggtattccgtttgccaagtcagaatttccacaaatatcatgtgtttcagaaacacggaccaattaagtggaatctcatcattttgacagttaaataaaaatgcgatgggtacgcaacaggcaagtttaagttggaagttttctaaggatatactaaactactacttgaatagttccccagttacgctagtattccctgattgatttgtcagatttaagtagtcagacctagtatttagtaaaggattaaaatttaatcagacacttcagaatgaaaagaatgtgcaattttaacaaaggttcacgtgaaagaaaaagtggggcattttgtatcactgatacgaaatatttttgattaaaaaatttttaaaccggtatgtaacatgtatttctggagtacatttgataactgaatgcactcatttgtcaagatcaaatcagtgtaactggaatatccatgaactaaaatattttatgctaaaaacattcaaattattctcttctagccatcttgaaatgggttactgtgaataaaaatcaccctaatgatcaaatagtaggtgtcttatttcttctatcaaactctcttatataaagtattacaaacctttagacatgaccagtgctggtagggctgaggcagccagggcagaacagatggcgtatcgtttttgggttgtgttcactctacgatgccaacggcgccaggttttggttggtgcaaacattcggcctccacgacacatctatttttccagtcaagaatcacatttctcaaattttagtaattacaacaaggttatttcttgctcagtaagaattttcgtcaaccttctgtaccagcttactgacagcaggcaactgtcgctgagaacagagtaagacgcaaattacgacatcattgcaagcaaaataaccccatataaatgaagccccttctcttcaagacaaaaaaaagtaatatttttacaccgtattatcatcaataaaccagacccaggccgctaaattccatcagagatgaccagtcttaggtagtgaaacaaaggatacgtttccaaaagcaccctggccagagcggtgagtcccaccacctcgaactctgggaattcgagccacagctctgccagtaccccaagactcagcactagtctgatgacctaaaattgagaagagataaaagttgtagctgcttcatcatacataccaacccatgactattatgcatggtagcaaacagcatcagaacatccgagaaaatcatgtggttcagaaacacggaccaatgaagtggaatttcatcactactgtaaagcagtccctaaaatatctgcagaagatataaatccatacctgctaattcactgacagcatagggctgtctgttgtttttgcgcaagttggtgtgaacaaagttcacaatatctggtcgaataggagccttgaatacagcaggcaaagtgacatttttgccagatgactcccccttttcggagtacaccgatatcagtgggcgagcacacgcctaaagaaaaagacaaggattatttttattgacaagtaatgtttgaagcaaactcttctcatacgccaacaataccattaaatactcaattgcagaagagactggtatggtgaggcaaacaacccttaaaccaaaatagcagtaaatgactagaacccttagaatctcaacctctactgcacaattttattttcaaaaagaattgtttatcataaaactttcaaagcaagccttataaagcacaatagctaaatcaaaaccatattgtaaggtttggagatgctgtttaatgccaattaatcagcaaatcctgtctacccgggctctactcatcccaacttccatccctgtcccactcaccctcaccctctactaaacacgtgtttccaaagctcaccagtggaaagactggtgatattactttttgtttaaacctccaagtcttcccaactgtgagtaaactgaaaatcctgaggctgacctacaccatcttctctacttctgatctcaactcccatacactcttccagatatttttcggtctcaggaccacccagcacttgcctcagactttccaagtgttcactctaaagctcctctttgccagctttctcacatccttcaggccactttaagctttctctgatcactgtttaaagccaaaccactcctattccctatgttttcatctcttactaccatagaatattactacgtatttagtccaacgcaactaccatcccagtcaggacagtgtctgttttgttcgcttaactcccccggcacacaacactacatagtatatacgaacactatttgtggaaaagcagtacacatataacactggtcttattacgagttggctaaggattcaaagattttgataacaccgaacaatttttaggcgaagagaaccagaaagcttttaatagaaatgattcccaagctaggcagagacaagcatccagaaaaaggctaaataagcaaatattctaacagaaggtcccactgctcctgagaacgacccagtgctttccactactgcttcccggcgcgtcctgtgctgggaaccccacgttgcctctaagatggctgccgtatcgccgcacatcccagttccacaccagaaaaagacgcctttggtcctcatctccctctcctcgctctatctcctacagattctatgctccgaaccccaaatccttccttactggccccgagatacggggtaaggccagccaagagaacttccactcaccatggcggagagaggagacagccacgctcctctcagcccggctgctgccacaggaaaaggaagtgcttaccactcccgctgtatatgtcaccttccccttgaccgccccaccttgccccgccta

SEQ ID NO: 1886333 - DNA, 4001 bp, Homo sapiens
acaaaagctgagtagacttgcagagtatacctagtcaatatatgtaagcagtttaattaccagggatgtttctgaaggccttgatgataccattatcctcattatagatgatgcacgggcccctgcgctggatacggcgacggtttctcattttgcctttgccagctctcattcgctgagaggcatagacctacaaagtgagcagttttagtattctgattaagatagaatctctgcaatagatcttcagagttttaattcctttttacagatgattaaactgggcacaataacttgccaaggttacacagagccataaacagcagttaggattcaaacccaagtaatcgggctctgaggttcttgttctctcacacattaaggattagctatactgcccttatcttctgaaattcaaagtgacaaactgtgaacaaggagtaccaaactgtaaatgtgctcattgaacggacctttttgatatcattccaggctttaagtttcttaaggagcaaaacagcttccttggtcttcttgtagccttcaactttatcttcaactaccaaaggaagttcaggaacttcctcaatacgatgacctaacaaaaaccaatgacacttacttggttatcctgaaacttttggagaaaaaaaaaaaatcaaacattttatacaaccaataaaagcaaaatggtattccgtttgccaagtcagaatttccacaaatatcatgtgtttcagaaacacggaccaattaagtggaatctcatcattttgacagttaaataaaaatgcgatgggtacgcaacaggcaagtttaagttggaagttttctaaggatatactaaactactacttgaatagttccccagttacgctagtattccctgattgatttgtcagatttaagtagtcagacctagtatttagtaaaggattaaaatttaatcagacacttcagaatgaaaagaatgtgcaattttaacaaaggttcacgtgaaagaaaaagtggggcattttgtatcactgatacgaaatatttttgattaaaaaatttttaaaccggtatgtaacatgtatttctggagtacatttgataactgaatgcactcatttgtcaagatcaaatcagtgtaactggaatatccatgaactaaaatattttatgctaaaaacattcaaattattctcttctagccatcttgaaatgggttactgtgaataaaaatcaccctaatgatcaaatagtaggtgtcttatttcttctatcaaactctcttatataaagtattacaaacctttagacatgaccagtgctggtagggctgaggcagccagggcagaacagatggcgtatcgtttttgggttgtgttcactctacgatgccaacggcgccaggttttggttggtgcaaacattcggcctccacgacacatctatttttccagtcaagaatcacatttctcaaattttagtaattacaacaaggttatttcttgctcagtaagaattttcgtcaaccttctgtaccagcttactgacagcaggcaactgtcgctgagaacagagtaagacgcaaattacgacatcattgcaagcaaaataaccccatataaatgaagccccttctcttcaagacaaaaaaaagtaatatttttacaccgtattatcatcaataaaccagacccaggccgctaaattccatcagagatgaccagtcttaggtagtgaaacaaaggatacgtttccaaaagcaccctggccagagcggtgagtcccaccacctcgaactctgggaattcgagccacagctctgccagtaccccaagactcagcactagtctgatgacctaaaattgagaagagataaaagttgtagctgcttcatcatacataccaacccatgactattatgcatggtagcaaacagcatcagaacatccgagaaaatcatgtggttcagaaacacggaccaatgaagtggaatttcatcactactgtaaagcagtccctaaaatatctgcagaagatataaatccatacctgctaattcactgacagcatagggctgtctgttgtttttgcgcaagttggtgtgaacaaagttcacaatatctggtcgaataggagccttgaatacagcaggcaaagtgacatttttgccagatgactcccccttttcggagtacaccgatatcagtgggcgagcacacgcctaaagaaaaagacaaggattatttttattgacaagtaatgtttgaagcaaactcttctcatacgccaacaataccattaaatactcaattgcagaagagactggtatggtgaggcaaacaacccttaaaccaaaatagcagtaaatgactagaacccttagaatctcaacctctactgcacaattttattttcaaaaagaattgtttatcataaaactttcaaagcaagccttataaagcacaatagctaaatcaaaaccatattgtaaggtttggagatgctgtttaatgccaattaatcagcaaatcctgtctacccgggctctactcatcccaacttccatccctgtcccactcaccctcaccctctactaaacacgtgtttccaaagctcaccagtggaaagactggtgatattactttttgtttaaacctccaagtcttcccaactgtgagtaaactgaaaatcctgaggctgacctacaccatcttctctacttctgatctcaactcccatacactcttccagatatttttcggtctcaggaccacccagcacttgcctcagactttccaagtgttcactctaaagctcctctttgccagctttctcacatccttcaggccactttaagctttctctgatcactgtttaaagccaaaccactcctattccctatgttttcatctcttactaccatagaatattactacgtatttagtccaacgcaactaccatcccagtcaggacagtgtctgttttgttcgcttaactcccccggcacacaacactacatagtatatacgaacactatttgtggaaaagcagtacacatataacactggtcttattacgagttggctaaggattcaaagattttgataacaccgaacaatttttaggcgaagagaaccagaaagcttttaatagaaatgattcccaagctaggcagagacaagcatccagaaaaaggctaaataagcaaatattctaacagaaggtcccactgctcctgagaacgacccagtgctttccactactgcttcccggcgcgtcctgtgctgggaaccccacgttgcctctaagatggctgccgtatcgccgcacatcccagttccacaccagaaaaagacgcctttggtcctcatctccctctcctcgctctatctcctacagattctatgctccgaaccccaaatccttccttactggccccgagatacggggtaaggccagccaagagaacttccactcaccatggcggagagaggagacagccacgctcctctcagcccggctgctgccacaggaaaaggaagtgcttaccactcccgctgtatatgtcaccttccccttgaccgccccaccttgccccgcctaagaaccaacacggatacaaaaaatatctctctaccacactacaaaagtaaaaacgagagtgttatttctttatttgtgggaaattacggtatctattttcttccaaacgtaataataattcttagaaaatagggactcctttttgcggaataatccatagggggcgaggccaactctcgcgagtcgaggtatcttctccccaaccactgctcttattttaattattgcagacggaagttgaagactattgacatagtaaatagctctgggtggcttgaaacgaaagtttaactttgcggacaaacaggacttattgtagggggtggtcaaaatagtcccggcggggcggggccatgacccctgacgtcgccggtccggcgcgcagttcagtttggcggttccgg

SEQ ID NO: 1886334 - DNA, 4001 bp, Homo sapiens
ggtctttgcatatgggtttagcttcaacatgattctcaagtttttcagtgggttcttctttaggactctgcgatggatcttcttgctataaaaaagcagatactgtatcaacattttacttaacattatacacatacaaatttttgaaacaaccaatagtatagggttggggcgagaattacactctaagtatcactttaccgtggtgctcgaagggctctttggatctctgggcttttcaagattctgctaagatctgtattaatcatcttgtgcatgggaagactgaaagggaaaagattgacatgtacatgtaaaagtaatcaaccaaagaacaggaagctcaactgaagctttatttttagccactatgctctccaaaatatctactacactatcacttctcataaacatggaccaggccgggtgtggtggctcacccctataatcccagcacttggggaggccgaggcgggtggatcacctaaggtcaggagttccagaccagcctggccaacatggtaaaaccccaactctacaattagccgggtgtggtggcacaagcctgtagtcccaggtacttgggaggctgagacaggagaactgcttgaacccgggaggcggaggctgcagtaagccacgatcacaccactacactccagcgtgggtgagacagaacaactctgtctcaaaaacaaaacaaaaaaccaaaaatatagaccaggtgagtctcattttggcatactgttgctgcacataaggggaaatgggaataaatttagaaaacatgtaagccaattctgaatgttaatatccacaatataaacatctgtgcttagtatatgaaagatacttacttgtagttactcttgagggaagcggctttacgccaagtgccgtacaattcatctaacttccggaaagcactttcagtccaaatgcagaaacgtcccacatgcccaccaggagcaagcttcaaaatgttcagcttgcttacattaagcagagtaattccttttaaagggaaagaaaaattagggagcctgtattccaacaaaagaaacacaaatcatctttatggcttaagagctataaaaggtacctgagaacttattaattatgaagtttcaaccatcaatggtgcaactctttcagccataaatcagaacttccacaaaatcatttgtttcagaaacacggaccttaagtggaatctcatcataacaaaagctgagtagacttgcagagtatacctagtcaatatatgtaagcagtttaattaccagggatgtttctgaaggccttgatgataccattatcctcattatagatgatgcacgggcccctgcgctggatacggcgacggtttctcattttgcctttgccagctctcattcgctgagaggcatagacctacaaagtgagcagttttagtattctgattaagatagaatctctgcaatagatcttcagagttttaattcctttttacagatgattaaactgggcacaataacttgccaaggttacacagagccataaacagcagttaggattcaaacccaagtaatcgggctctgaggttcttgttctctcacacattaaggattagctatactgcccttatcttctgaaattcaaagtgacaaactgtgaacaaggagtaccaaactgtaaatgtgctcattgaacggacctttttgatatcattccaggctttaagtttcttaaggagcaaaacagcttccttggtcttcttgtagccttcaactttatcttcaactaccaaaggaagttcaggaacttcctcaatacgatgacctaacaaaaaccaatgacacttacttggttatcctgaaacttttggagaaaaaaaaaaaatcaaacattttatacaaccaataaaagcaaaatggtattccgtttgccaagtcagaatttccacaaatatcatgtgtttcagaaacacggaccaattaagtggaatctcatcattttgacagttaaataaaaatgcgatgggtacgcaacaggcaagtttaagttggaagttttctaaggatatactaaactactacttgaatagttccccagttacgctagtattccctgattgatttgtcagatttaagtagtcagacctagtatttagtaaaggattaaaatttaatcagacacttcagaatgaaaagaatgtgcaattttaacaaaggttcacgtgaaagaaaaagtggggcattttgtatcactgatacgaaatatttttgattaaaaaatttttaaaccggtatgtaacatgtatttctggagtacatttgataactgaatgcactcatttgtcaagatcaaatcagtgtaactggaatatccatgaactaaaatattttatgctaaaaacattcaaattattctcttctagccatcttgaaatgggttactgtgaataaaaatcaccctaatgatcaaatagtaggtgtcttatttcttctatcaaactctcttatataaagtattacaaacctttagacatgaccagtgctggtagggctgaggcagccagggcagaacagatggcgtatcgtttttgggttgtgttcactctacgatgccaacggcgccaggttttggttggtgcaaacattcggcctccacgacacatctatttttccagtcaagaatcacatttctcaaattttagtaattacaacaaggttatttcttgctcagtaagaattttcgtcaaccttctgtaccagcttactgacagcaggcaactgtcgctgagaacagagtaagacgcaaattacgacatcattgcaagcaaaataaccccatataaatgaagccccttctcttcaagacaaaaaaaagtaatatttttacaccgtattatcatcaataaaccagacccaggccgctaaattccatcagagatgaccagtcttaggtagtgaaacaaaggatacgtttccaaaagcaccctggccagagcggtgagtcccaccacctcgaactctgggaattcgagccacagctctgccagtaccccaagactcagcactagtctgatgacctaaaattgagaagagataaaagttgtagctgcttcatcatacataccaacccatgactattatgcatggtagcaaacagcatcagaacatccgagaaaatcatgtggttcagaaacacggaccaatgaagtggaatttcatcactactgtaaagcagtccctaaaatatctgcagaagatataaatccatacctgctaattcactgacagcatagggctgtctgttgtttttgcgcaagttggtgtgaacaaagttcacaatatctggtcgaataggagccttgaatacagcaggcaaagtgacatttttgccagatgactcccccttttcggagtacaccgatatcagtgggcgagcacacgcctaaagaaaaagacaaggattatttttattgacaagtaatgtttgaagcaaactcttctcatacgccaacaataccattaaatactcaattgcagaagagactggtatggtgaggcaaacaacccttaaaccaaaatagcagtaaatgactagaacccttagaatctcaacctctactgcacaattttattttcaaaaagaattgtttatcataaaactttcaaagcaagccttataaagcacaatagctaaatcaaaaccatattgtaaggtttggagatgctgtttaatgccaattaatcagcaaatcctgtctacccgggctctactcatcccaacttccatccctgtcccactcaccctcaccctctactaaacacgtgtttccaaagctcaccagtggaaagactggtgatattactttttgtttaaacctccaagtcttcccaactgtgagtaaactgaaaatcctgaggctgacctacaccatcttctctacttctgatctcaactcccatacactcttccagatatttttcggtctcaggaccacccagcacttg

SEQ ID NO: 1886335 - DNA, 4001 bp, Homo sapiens
gtttctcactgcctgtataatcaggtctttattcaaaagaagctgtccaaaatgatttgacctttatggaataatcaaatttaagagtttatgcagcaggcttcttctcctctgtagtaggtttcttctctgcaggcttcttttcaggggctggtttcttggtagctgctgccttttttcccaccagaggcttcttctgcttcttaacaccaacagcagccttctttcctttcttacctaccacaggcttcttgcctgcaaccgccgccttctcatctgatttggcttgtagtgccgctgctgcagcagctgccttatccacccggagcttgtgctgcaacaaattaggcagaaaacagtaagaatcaaatccctgtaagaacttaatgtatcaggaagagaaaaacaaaaacaaaacaaaccagccgggcacggtggctcacgcctgtaatcccagcactttgggaggccgaggcaggtgaatcacctgaggtcaggagtttgagaccagcctaacaatatagtgacaccccgtctctactgaaaatacaaaaattagccggacatggtggcgtgcgcctgtagtgccagctacttgggaggctgagacagaagaactgcttgaacttggtaggtggaggttgcagtgagctgagatcacgccattgcactccagcctgggtgacagagcgagattccgactcaaaaacaaacaaacaaacaaaaactccactcacattcctggcctggcgaagaatggtgttccggcgcatggtctttgcatatgggtttagcttcaacatgattctcaagtttttcagtgggttcttctttaggactctgcgatggatcttcttgctataaaaaagcagatactgtatcaacattttacttaacattatacacatacaaatttttgaaacaaccaatagtatagggttggggcgagaattacactctaagtatcactttaccgtggtgctcgaagggctctttggatctctgggcttttcaagattctgctaagatctgtattaatcatcttgtgcatgggaagactgaaagggaaaagattgacatgtacatgtaaaagtaatcaaccaaagaacaggaagctcaactgaagctttatttttagccactatgctctccaaaatatctactacactatcacttctcataaacatggaccaggccgggtgtggtggctcacccctataatcccagcacttggggaggccgaggcgggtggatcacctaaggtcaggagttccagaccagcctggccaacatggtaaaaccccaactctacaattagccgggtgtggtggcacaagcctgtagtcccaggtacttgggaggctgagacaggagaactgcttgaacccgggaggcggaggctgcagtaagccacgatcacaccactacactccagcgtgggtgagacagaacaactctgtctcaaaaacaaaacaaaaaaccaaaaatatagaccaggtgagtctcattttggcatactgttgctgcacataaggggaaatgggaataaatttagaaaacatgtaagccaattctgaatgttaatatccacaatataaacatctgtgcttagtatatgaaagatacttacttgtagttactcttgagggaagcggctttacgccaagtgccgtacaattcatctaacttccggaaagcactttcagtccaaatgcagaaacgtcccacatgcccaccaggagcaagcttcaaaatgttcagcttgcttacattaagcagagtaattccttttaaagggaaagaaaaattagggagcctgtattccaacaaaagaaacacaaatcatctttatggcttaagagctataaaaggtacctgagaacttattaattatgaagtttcaaccatcaatggtgcaactctttcagccataaatcagaacttccacaaaatcatttgtttcagaaacacggaccttaagtggaatctcatcataacaaaagctgagtagacttgcagagtatacctagtcaatatatgtaagcagtttaattaccagggatgtttctgaaggccttgatgataccattatcctcattatagatgatgcacgggcccctgcgctggatacggcgacggtttctcattttgcctttgccagctctcattcgctgagaggcatagacctacaaagtgagcagttttagtattctgattaagatagaatctctgcaatagatcttcagagttttaattcctttttacagatgattaaactgggcacaataacttgccaaggttacacagagccataaacagcagttaggattcaaacccaagtaatcgggctctgaggttcttgttctctcacacattaaggattagctatactgcccttatcttctgaaattcaaagtgacaaactgtgaacaaggagtaccaaactgtaaatgtgctcattgaacggacctttttgatatcattccaggctttaagtttcttaaggagcaaaacagcttccttggtcttcttgtagccttcaactttatcttcaactaccaaaggaagttcaggaacttcctcaatacgatgacctaacaaaaaccaatgacacttacttggttatcctgaaacttttggagaaaaaaaaaaaatcaaacattttatacaaccaataaaagcaaaatggtattccgtttgccaagtcagaatttccacaaatatcatgtgtttcagaaacacggaccaattaagtggaatctcatcattttgacagttaaataaaaatgcgatgggtacgcaacaggcaagtttaagttggaagttttctaaggatatactaaactactacttgaatagttccccagttacgctagtattccctgattgatttgtcagatttaagtagtcagacctagtatttagtaaaggattaaaatttaatcagacacttcagaatgaaaagaatgtgcaattttaacaaaggttcacgtgaaagaaaaagtggggcattttgtatcactgatacgaaatatttttgattaaaaaatttttaaaccggtatgtaacatgtatttctggagtacatttgataactgaatgcactcatttgtcaagatcaaatcagtgtaactggaatatccatgaactaaaatattttatgctaaaaacattcaaattattctcttctagccatcttgaaatgggttactgtgaataaaaatcaccctaatgatcaaatagtaggtgtcttatttcttctatcaaactctcttatataaagtattacaaacctttagacatgaccagtgctggtagggctgaggcagccagggcagaacagatggcgtatcgtttttgggttgtgttcactctacgatgccaacggcgccaggttttggttggtgcaaacattcggcctccacgacacatctatttttccagtcaagaatcacatttctcaaattttagtaattacaacaaggttatttcttgctcagtaagaattttcgtcaaccttctgtaccagcttactgacagcaggcaactgtcgctgagaacagagtaagacgcaaattacgacatcattgcaagcaaaataaccccatataaatgaagccccttctcttcaagacaaaaaaaagtaatatttttacaccgtattatcatcaataaaccagacccaggccgctaaattccatcagagatgaccagtcttaggtagtgaaacaaaggatacgtttccaaaagcaccctggccagagcggtgagtcccaccacctcgaactctgggaattcgagccacagctctgccagtaccccaagactcagcactagtctgatgacctaaaattgagaagagataaaagttgtagctgcttcatcatacataccaacccatgactattatgcatggtagcaaacagcatcagaacatccgagaaaatcatgtggttcagaaacacggaccaatgaagtggaatttcatcactactgtaaag

SEQ ID NO: 1886336 - DNA, 4001 bp, Homo sapiens
atttgttttcctcctactactcattaatgcaatttgccatcttctgctaactcattccttccactactctcagcaaattactttgatcatgaattagcaaggctggacctcacgctccctttgcaggaatggaaagtgtcatccaattcaagaaataatgattctcatcattaagccaaccctcctcctaccactccaccaaaacacacacacacacacacgtgcacacacgcacacacgtgcacacacgcacatacacgtgtcatctcttccagagattcttattttcaggggatttattttaagtcatctgtgaagtatcaccccacaaatgaggttgtttggatgggctgggccagcaactaccactgcattctctaagttgcaccaaacatctgaaggtaaaagaccccctgtcaacactacacctcaacatatctggcactaattccctatttttctcacttaactgcttatttctaatctaattcagttagtaggaaaggaaaaactcatttttctcaattcatccaacatatcgctaactgcctggatcaagaacactaagagaaccaaacaaatctgagaggttataaatacactaacatttctaccagaagaacagagactcaaaggcaagaactataaaataacttatctacctcacttttagaagaatgttcatttctctgaaccccaacagcttttcactataaaccagtcatttgtcatgtgatcacagtatcaacacccacatcattaatatgtacatatgtatacacaaacacataacacatacagaatttatcaactaagataacaactagagaataagatcttgctatattcaatgttcatggtatatttaatataggcttttctaaattaccttcttattcaccattcctccttcataataacgacttataggcaaagcaaaagcacctactcatagaatgtcaatcacagataatgaaagacccatcaatcatacaagcaaaaaatagagtacagaataatgtgagattagagatgtgattcaaaaattgcatggtgtttagcaaatcttttaatctccgtggggctcagcatcaaaaactatataatgccaatttcatcaccttaactgaatctaagagtcaaaattaaatctccacctacgtcttgtaaagatacagcaaagggttaacttaattaaaagtagaattaaattaatctctggaaatgtaacttaagcattctgctaaatatataaattacgtctcctctcaaaccaatgtctcagccacaaactagcaatttctcaattatatgccaaatggagaagctgcctcagtgacagaaacatgctcatgaaactttcatatagggttggaaccgggtgatgcaagcaacagggttaaaaaaaaaaagagcataggagctcctaagtacttattctcttgaaatgatcacttgaaatgcatagtagaaataagcaaaggtgtggctgggtacggtggctcacgcatgtaatcccagcactttgtggggctgaggcgggtggatcacttagagaccaacctggcaaacatggcaaagcctgtctccacaaaagcatacaaaaattagccgggcatgttggcacatgcttgtaatcccagctactctggaggctgagacaagaagtgcttgaatgcaagaggcggaggttgcggtgagccaagatcatgccaaagatgagacataccaatgcagtgaacatagaacacactctacaaaacattaactgtactaaaggatctagaaccaacttccttgtattgcactggaaaaacctacaacacgccattatccttaacctgtactgataggaaaaaccatgtgaaatttagagtctaagaatttatgttttgagtatttgtatcctgagtccttagactgacagtaaggctggacttcagagtaatcacgttgagctttacttcatcatgctcagtaaacacagctcatcacaaatccagcccaggtctttcccaatgtctttcccatcaactagtaaaaatacgtaaaaaaataaattcctgcagatagtgtatctctacccataaggacagtccctggcctggaagaataaatgataagagttttatgtgacaatggatataaaacaacagtaacaacaacagtgtcattcaaagcacacagaattaaggggaattatgaagaaaaagacacacacagcaatctacatgaaggaaacaaacgcgggcgcgcatacacacacacacacacacacacacacacacacacacacagagagagagagagagagagagagagacagcaatctgccagtcgggtctcacagagctaaatacaatgactatttccactagcaaactgtccaaagaactgaaacagaaatacactaatgccaccacagatactatcgacaacttgctattctccccaataattaaatgtaaaccaattttaggactagagtacactgaaaacatgcatcaaaaaattctagagttaagtgtaaacaaatggtatagaaagacagaggacagacaaataaaatcaaggctggcacaacgtaagaaacacaaagtccaaagaaaggattctgaaggaggtctaaactactaacttctctgacaagaaaccaaagtagcacagtaatgcaatccagattttctcatgagaacccacactattattcctgatacatatctccgaaacatgaaatcatagatttcaggaactgtatcatttcaactcaatttttgctaccaaagaacaaatgatgtaacataaaatgaaaatatctatacaaacaaaacatccaaaagacaggaaacagcccgaacaattcagatgtacaacctaaccctcaaggtcactgtattctcattagttcaacagaaaatgattcacattaactaaacatcaagttcaaatgtgagcctccttcttgattcttgggcacttagtatggacctcgctttttaagttgaatcggctcagcaaagcaaattaacccagccaagtttttcctactaatcatttctacactgtactagttcttaaaactcatgggcaagcaggcattgtgaaaaaggattccagtgacccacacagatgatactgaaagtggaagagctagaagaactgtttctccatgtctgcaacccccttcttattgtacaaccacctgatccctttatcaacatatacttctacaacattccccacctctttactttatattggcttaataaatacatcctttgaactttatatctcatttttttctttttttttccagacggagtctcactctgtcacccaggctggagtgcagtggcatggtctcggctcactgcaacctttgccgcccaggttcaagtgattctcctgcctcagcctcctgagtagctgggattacagacacacaccaccaagcttgggtaatttttgtatctttgagacagggtattgctatgttggccaggctagtctcaaactcctgatgtcaggtgatccacccaactcagcctcccaaagtgctgggattacaggcttgagccaccatacctggtctcaaatatttctattgaattaaatgttccccatctcaccatgcaagagaggacttctcactcctgtaaactcaaatagcagttgctgatttctattttttttttttaccttgagatgggagtctcacctctgtcactcaagctgaatggagtgccattggcgcgatctcggctcactgcaacctccgcctcccgggttcaagcaattctcctgccttagcctcctgcgtagttgggattacaggtgcctgccaccacgccaggctaatttttgtatttttagtagaggtagggtttcgccatgttggccaggctgggctcgaactcctgacctcaggtgatccacccgcctcaacctcccaaagtgccgggattacaggcattttaacaacaaccaaataaccccaaaac

SEQ ID NO: 1886337 - DNA, 4001 bp, Homo sapiens; identical to SEQ ID NO: 1242426

SEQ ID NO: 1886338 - DNA, 4001 bp, Homo sapiens; identical to SEQ ID NO: 1242428

SEQ ID NO: 1886339 - DNA, 4001 bp, Homo sapiens
tgctggggatttagaaacgaaaaagtaacttccctgtgttctatctagtgggggaaggcagatagaaagaaataattttgtgggaatgtaaaatggtacagtcactgtggaaaacagtacgactattcctccaaaatagatttaccctatgatccagcaattccgtttctggatgtgtaccccaaagctttgaaagcggggactccaacaggtatttgcatactcatattcatagtatgcaaatttaactaagtagatgttgtcatggcatttgtaagctgccatggcactagcgggagtgtcttttgccatgctaatacattataattagtgtataatgagcagtgaggacgagcagaggttgcttttgtcaccatctggttttggtaggttttggccagcttctttaccgcatcttgttttatcagcagggtctttgtgacctgtatctggcaaaacctcccctgagatgcaattcattggttcctggggtaaccaacctgcctccctggcagccactgactcatcctgtgacgaagaatgcctaacctcctgggaatgcagcccagcaggtctcagcctcattttgcgcagcacctgttcaagatggagtcgctctggttcgaacacctctgacagctgcccgacaatgtgaatgtacttaatgccactgaacttacaaatgattgaaatggtaattttacgttatagtacattttactacagtaaaaaatgttttaaaaaagaaatcattactctcttgctaagatcttgtttcatcttaacacacacgagatgccttgtcttcatttcgtggacaggcaaggccgaattccgtttcacagatagaggactgagatctggaggcagagggcaggaattaaaaacaagacaaacaagagccttatacaggcagtgtctttctgagtctgatccctgttgtcttgagagctgcggtgagggaaagtcgtcttcagagccctcagggtcaaagcagtttgttacccttgagatagacaaagctcctaacctctccagctttttgccgacagctcgattctgatgggcactgaccttttccgaccctgttttcaggagccgactcctggcaggttggttgtaggggccctcttgagtgcttcacacacagcagtcctgttggggtgaaggtcaccgtcactgtgataattgttgtcgtcgttgaaaccacccagcccgaaagcagcatgggctgtgcccagagccgccgtgccagaagcccacgcttagaaatagagggccgaagaccaaagaggactgcgggttcttgggccaaacgtgaccctctcaaatcccccaactcggggatttcgttagctggggactggtgtgcccgggttccaagacccctgcgtagactctgtctataggtggaagaaggcctttgccccgaggcatccagaggtaacggtgagaggaacaagggcacgtgggggatcccaccacagcctcccctgagaccctcttcacgctggttgcaggagtagccaaccccgctccctggcagcccgtgagatgccacatcccctccagcagggggcggccggcatcggtcccgtcttcctaaaccggcgttggtgggaaatgccggcaccagctccctccccgctccagagccctgttttccccatttgtatttcactactttcctgttgagcttggattccagcctcaaattccgcgatttggccggcatcctaatccccgagtgactcttgccaaccactctctgtggggcctgtgtgcttcctcctgggttctggggcgctggcggcgtccgcttcaccgggaacgggagccccagcctcccgaggccttcctgcctggctctgggaatggccactgtccagaaagccccgcggccgtccatgctcgctcgctcagtcaggcccttgtggggatattgcagaacgagtccgagttactatccctttaaatacaggcgtttcggcctagctgccgccggtccaatccgcagcgcttccgtgccccactttcccgcgtcagcctggctccggcctccaccagggggtgctagtgagatcccagccagcctcagagctgagcgtccagggccttcaaatgtccccatccttgaaaaggcaactccagtggcatcttctgcggggagaccagaagcagcatctgacgaggagacagcactggcggtcccgacacaactgaatcggcaggatgagggcccttagtgttaggcaccggcggagctgcatcccaccccgtctcgtcccctgagaacagctgtgagaagccgcctatttttcatcgttctgcaacacacctttcccttccttgggatatttctcctctttcagcattgccgcatcagggttccaaagccccgtttctctcctagttctttctttgctcaagaaaagcagcttgtctgataaactaagctatgtatgattcgctgccagtacagactgaaaaacaaaataaactcccaattcacagtcctccgttgcgtaacagtgagcagacgttctgagaaatgcatcgtcaggcaattgcatcattgtgcaaacaatatagagtgtacttacccaaacctaaacagcacagcctactacacacccaggctgtaggctgtgcttctagactacaaacctgtacagtgtggtactgaacactgtaggcaactgtaacacaatggtaagtatttgtgtatctaaacatagaaaagatacagtaaaaatatggtatgaaagattgaaactggtgcacctgcctagggcacctaccgtaagcttggagcttacgggactgaaagttgctctgggtgagtcagtaagtgagtggtgagtaaatacgaaggcctaggacattactgtacactactgtagactttaaaaccctgtacactaggcccacactcaatttatttttaaaaattttctttccttcaataatatattcactttagcttactgtaacttttctaccttaagaatttttaaattttttgactcttttaataacagcttgaatacacaaacacattgtacagctatacaaaaatattttcattcttcatatccttattctataagcttttttcctacttttgaagttgtttattttttacattttaaactttttgtcaaatattaagacacaaacacacattagcctaggcctatacagggtcaggatcatcaataccactgtcttctgctttcacatcttgtcccactggaaggtcttcaatggtaataacacacattcttagtaaatgcaaatagtcatggctcagactgatatagtaatgatagactattcaatatgtggtattggacagctgtttatatatttgtacgaacctaagttagattctgtggtggttcaaaaatatatcctctaattatgacctgcttcccttcaacaggtgtacctaattcctctgcctagaaagtgtgctggaattactgcctggcttctgatgaatagggcgtattgagagtgatgctttgtgagttctgaggctaggtcatagaaaggattgaacttattcctgaatgttgctcttggatcacttgcttttttgggaaccaccagccatgtcatgaggacactcaagcaaccctgcagagaagcacatgtgtggagaggcacttcttggaaaggaggccaacttgccagaaccaactaatttgtcatgtgagtgagtcattttggaagcagatcctctaccctcagtcaggccttccgatgatttcagcccccagcctttgagtctgccccaaacaccatgagtagagacaagcccttcccactgtgtccaccctggctgaattccagaccgttaaaaaaacaagagaaaataaattattattagtgttttgagtcactaagttttggactaatttgttatgcagcaatagctaacaactacagagtcataacacaaactaaaattaattctaaggcatgttaaagattta

SEQ ID NO: 1886340 - DNA, 4001 bp, Homo sapiens
cctggggtaaccaacctgcctccctggcagccactgactcatcctgtgacgaagaatgcctaacctcctgggaatgcagcccagcaggtctcagcctcattttgcgcagcacctgttcaagatggagtcgctctggttcgaacacctctgacagctgcccgacaatgtgaatgtacttaatgccactgaacttacaaatgattgaaatggtaattttacgttatagtacattttactacagtaaaaaatgttttaaaaaagaaatcattactctcttgctaagatcttgtttcatcttaacacacacgagatgccttgtcttcatttcgtggacaggcaaggccgaattccgtttcacagatagaggactgagatctggaggcagagggcaggaattaaaaacaagacaaacaagagccttatacaggcagtgtctttctgagtctgatccctgttgtcttgagagctgcggtgagggaaagtcgtcttcagagccctcagggtcaaagcagtttgttacccttgagatagacaaagctcctaacctctccagctttttgccgacagctcgattctgatgggcactgaccttttccgaccctgttttcaggagccgactcctggcaggttggttgtaggggccctcttgagtgcttcacacacagcagtcctgttggggtgaaggtcaccgtcactgtgataattgttgtcgtcgttgaaaccacccagcccgaaagcagcatgggctgtgcccagagccgccgtgccagaagcccacgcttagaaatagagggccgaagaccaaagaggactgcgggttcttgggccaaacgtgaccctctcaaatcccccaactcggggatttcgttagctggggactggtgtgcccgggttccaagacccctgcgtagactctgtctataggtggaagaaggcctttgccccgaggcatccagaggtaacggtgagaggaacaagggcacgtgggggatcccaccacagcctcccctgagaccctcttcacgctggttgcaggagtagccaaccccgctccctggcagcccgtgagatgccacatcccctccagcagggggcggccggcatcggtcccgtcttcctaaaccggcgttggtgggaaatgccggcaccagctccctccccgctccagagccctgttttccccatttgtatttcactactttcctgttgagcttggattccagcctcaaattccgcgatttggccggcatcctaatccccgagtgactcttgccaaccactctctgtggggcctgtgtgcttcctcctgggttctggggcgctggcggcgtccgcttcaccgggaacgggagccccagcctcccgaggccttcctgcctggctctgggaatggccactgtccagaaagccccgcggccgtccatgctcgctcgctcagtcaggcccttgtggggatattgcagaacgagtccgagttactatccctttaaatacaggcgtttcggcctagctgccgccggtccaatccgcagcgcttccgtgccccactttcccgcgtcagcctggctccggcctccaccagggggtgctagtgagatcccagccagcctcagagctgagcgtccagggccttcaaatgtccccatccttgaaaaggcaactccagtggcatcttctgcggggagaccagaagcagcatctgacgaggagacagcactggcggtcccgacacaactgaatcggcaggatgagggcccttagtgttaggcaccggcggagctgcatcccaccccgtctcgtcccctgagaacagctgtgagaagccgcctatttttcatcgttctgcaacacacctttcccttccttgggatatttctcctctttcagcattgccgcatcagggttccaaagccccgtttctctcctagttctttctttgctcaagaaaagcagcttgtctgataaactaagctatgtatgattcgctgccagtacagactgaaaaacaaaataaactcccaattcacagtcctccgttgcgtaacagtgagcagacgttctgagaaatgcatcgtcaggcaattgcatcattgtgcaaacaatatagagtgtacttacccaaacctaaacagcacagcctactacacacccaggctgtaggctgtgcttctagactacaaacctgtacagtgtggtactgaacactgtaggcaactgtaacacaatggtaagtatttgtgtatctaaacatagaaaagatacagtaaaaatatggtatgaaagattgaaactggtgcacctgcctagggcacctaccgtaagcttggagcttacgggactgaaagttgctctgggtgagtcagtaagtgagtggtgagtaaatacgaaggcctaggacattactgtacactactgtagactttaaaaccctgtacactaggcccacactcaatttatttttaaaaattttctttccttcaataatatattcactttagcttactgtaacttttctaccttaagaatttttaaattttttgactcttttaataacagcttgaatacacaaacacattgtacagctatacaaaaatattttcattcttcatatccttattctataagcttttttcctacttttgaagttgtttattttttacattttaaactttttgtcaaatattaagacacaaacacacattagcctaggcctatacagggtcaggatcatcaataccactgtcttctgctttcacatcttgtcccactggaaggtcttcaatggtaataacacacattcttagtaaatgcaaatagtcatggctcagactgatatagtaatgatagactattcaatatgtggtattggacagctgtttatatatttgtacgaacctaagttagattctgtggtggttcaaaaatatatcctctaattatgacctgcttcccttcaacaggtgtacctaattcctctgcctagaaagtgtgctggaattactgcctggcttctgatgaatagggcgtattgagagtgatgctttgtgagttctgaggctaggtcatagaaaggattgaacttattcctgaatgttgctcttggatcacttgcttttttgggaaccaccagccatgtcatgaggacactcaagcaaccctgcagagaagcacatgtgtggagaggcacttcttggaaaggaggccaacttgccagaaccaactaatttgtcatgtgagtgagtcattttggaagcagatcctctaccctcagtcaggccttccgatgatttcagcccccagcctttgagtctgccccaaacaccatgagtagagacaagcccttcccactgtgtccaccctggctgaattccagaccgttaaaaaaacaagagaaaataaattattattagtgttttgagtcactaagttttggactaatttgttatgcagcaatagctaacaactacagagtcataacacaaactaaaattaattctaaggcatgttaaagatttatatgaaagcattcatctaatggaggtgtgcaagaagtggctataaaaaatttagggcacccaaaagcaacctgtaggctgagcagggtaagtacatctgcaagagcagccagatggctagttggtccctgtgtgcagcctctctacccacccatggtataggtccaggaatggaactgtttagcttccctaggaaacaatgaatgtggtgcttgcattgtgttgctgacaccatcagagaggaaatggaagtcccagtgtccagaagctaaacagaaacacacacacacaaaagacagaaggaaagaaaaaaagggccaaaatatcccacaacaaagggaaatatagtcatgatacatgcttaacttcagaaaagacttatataataattatatcaaaatcataatgtaaacactgtgcaatgattttcaacttttagaatcaaccaaaaagaaatagcagaatatatcatcccggctgcagaat

SEQ ID NO: 1886341 - DNA, 4001 bp, Homo sapiens; identical to SEQ ID NO: 1242429

SEQ ID NO: 1886342 - DNA, 4001 bp, Homo sapiens
gtcccttgcgtcctcctcataactgaacttcccagggctgtctgcgtcccagggaaggatgagggggatccaggacccatgtccccacccctcagccccaaacagtcctttctctccttgacatcaactatgcagccacgttcctctcagtgggaaacagactgtagttaagatgcagatctttttgaaagaaaaaagaaaaaaggtatggggctgcaagcatcgactcctcagagtcagctgtgcccggtcaggcagggcagctgctggagggcctcctttgacagtagggggaggctccaagaacccttcccagagacacctggatagggctggaaggtgggagagaggctcaaaaacacgtgccctgttgcctgtacgggctcgggactggcccaggacaggggccagttgtcaggcactcctagtaaactagggatgagctttgccccaagggaagtgggcacctggggcaccctcagcccatggcttcttgacttggccacttctgtttctcttcatctgcattctatccccaagagaggcatgtccccagagttaggggcagagggaggaagcacagaccacatccctgaagccttcaggctcaatcctctttgggtgaggtccagccagtcacctcttcctgcgctgttagccttgtcctgacctcactctgactctggtttcctaagggacactgtgttcttcctctcctctccttccttcttttcttgacacaatgaggtttttcatcctgactcttttctttgctcttgctatgctctctctctttcttcagatataatctcagcatttacttttctgtttctgcccatctgtctctcctgagttgggagtcctgtgggtatttaagactgatcaaatagccctctgtttggatgcactccccagcagtgatagcccaatacaggggcagcagggagcaggggggctgtcactccagctgagtcatcttcctcctttctcctccccaggcctggctttctggtggcaaggaagcaccaccttggtgatactccagtgtcactccacctcttcgcggccccctccaggaaccgcctcccccgccagccaagactccattgaccatcatctgggctgtccccatcttcttgggacctgcccctgggcctctgcccttcaaatggggacaccaaggacacagcttccagccacaagcccagcccttgtagcactgacatcccaaaaatctggatcctgggggcttccctgctccccctccccaagtcctgtgctggtctgaggaaacctctgaaccatgtcccttataagtccatatggccatcagaaccccttcaaacctgaggtctccagcatttgggagcattttcaatggctgtcttggagaccgttcctgctgtatcctaacttgccaggtagttttcttttccccgacatcggtgctgctcaagggaaggaccccgattaataggtgtgagtatgttttggttttaaactatacattcccaagtaggcaaagaactttctggtttccaactttctatctgcctggtgagaggcaacaaatattatcattgactcccctggaggattttttgatgttaactttctcccagtagctgtatttacccatgagagcagggactaaagggtatgtctacctgagccatccgcctgcatcctgtatttctctcttcattctcagcatgtcagtctgccctttctcactgcccagcaaggtacttgaatgcaggaactttgtctcattcatttttgtatcccctctgcccagcaaagctcaacaaatatttgataaagcaatgagcttacagatgggtgaattcctgaacaaatatcagacgagagtgacaatagggaaatgcaaagggaagtgagtggtgtggtgtcctggccaggatgccaggatgcctggcatttgggtctgttgaactctgatttacctagaaaggttttaatggaccttccccacaaaatccttttctgcaggctctctacatgtgtgaacatgatccaacagcaacaccacagttagatgctccagagccctgcctgaagagaaatcctacatccatctcctgcttagtaggggagcactgagcaacgttgggagccatttatttccttccttgggatcacacttcttccccagatgtctgattctggttttcatctgcagtgatggccttcatcttctcccagggcactgggccctgagatagcagagctggccagcaggaggactatgtgagggcttctctgggtccaaagggagttcccccacccccgggggttggaggaaggaaaagtggaggtgctcctgctagggttttgggagcagcctcacgggggctcttgtggaggtgggcatgccttggcacccccctctcctggctattctgtgctgtacccacaaggcttcaagcacctccccagaggaggcagcccgatcttctccacctgggagccatttctgagtctccctcacacctgagcttccatggacaggagacctcggctagagtctgaggagtctgggaagatctcaagcctgtccccttcccctaggctacagtactggatgctcagccctccaccattatgggggtgtttcctggccattcagctgatcactgttaagctatcatttctctctggaaaggatgcccagaccccatccgtctacttcaccttcctgggttccattcccttgtttctggggcaaggcttttgggagggctggagagagagaggatgaggggacaggagaaggacactttgggctttctgtcctcctcctgtcctgccttagctggcgcccttcactccctgtctcctgcctctgactggaacgagaaaataccttgcacatcccaggtccacccagccaaccctgactggtccagtaagctgtttcttctgcatttcagccctggttcctgattctacctcccccaggtctctaccattccactctcagcttcctcctccttgccacccaattcttcttggcttcccatcacttcccctctcttttacctctctgcccctgtctcgccaaaggctctctcctgtctgtggttctacttgatctccgtaactttttccttccctccattcaccctggacattttgccctcatgatttctcctttcctcttgtgtatttgtctcttgatgacccattttcctttcagagaaactgaggctcagataggtcaggggtgatggcctacatgggacagcaggacttagtagacaaggccttgcatccttgcggccctgctttctgtctcatccctcttcccttttgtcttggtcagccgcccaaaggctccagctctgcatccagcaggggagccccttggggggttccagagtccacaactgcacacccgtcaccttcacccactgccttgttgtagcaaacctgcagccaccctgtatattgtatatgtatatttatctatttgtatatagatatacaatttcaagaacctactaaaggaggaagcctcactgctatgcagcctgacaggttatcaagtgggcctctttgaatccctttttgcttctaggagagttgggaaccatgaggtgcccccctgcagaccccagagctgctgccttccccaggtgtgcaggaggtttgtaggagacggggccccttggctgcccaagctgccacccctcccccacccgcccagtggcagttgcgtccgttggggcttctggggcagcccacagggttccgagcatgtgctggcagttgctctttggagcacccacttcacttctcccatgtagttcctgagtgcaggactctcctgaagaaggggcgtctaaaaggccagcccatgcatcttgttcagaccaggctgctccatctccgctaagcccagggatccacttgtgtgtctttctgggataattgtctttagtggcagcctgggcctcggggaaggaagggcatgagga

SEQ ID NO: 1886343 - DNA, 4001 bp, Homo sapiens
catcctgtatttctctcttcattctcagcatgtcagtctgccctttctcactgcccagcaaggtacttgaatgcaggaactttgtctcattcatttttgtatcccctctgcccagcaaagctcaacaaatatttgataaagcaatgagcttacagatgggtgaattcctgaacaaatatcagacgagagtgacaatagggaaatgcaaagggaagtgagtggtgtggtgtcctggccaggatgccaggatgcctggcatttgggtctgttgaactctgatttacctagaaaggttttaatggaccttccccacaaaatccttttctgcaggctctctacatgtgtgaacatgatccaacagcaacaccacagttagatgctccagagccctgcctgaagagaaatcctacatccatctcctgcttagtaggggagcactgagcaacgttgggagccatttatttccttccttgggatcacacttcttccccagatgtctgattctggttttcatctgcagtgatggccttcatcttctcccagggcactgggccctgagatagcagagctggccagcaggaggactatgtgagggcttctctgggtccaaagggagttcccccacccccgggggttggaggaaggaaaagtggaggtgctcctgctagggttttgggagcagcctcacgggggctcttgtggaggtgggcatgccttggcacccccctctcctggctattctgtgctgtacccacaaggcttcaagcacctccccagaggaggcagcccgatcttctccacctgggagccatttctgagtctccctcacacctgagcttccatggacaggagacctcggctagagtctgaggagtctgggaagatctcaagcctgtccccttcccctaggctacagtactggatgctcagccctccaccattatgggggtgtttcctggccattcagctgatcactgttaagctatcatttctctctggaaaggatgcccagaccccatccgtctacttcaccttcctgggttccattcccttgtttctggggcaaggcttttgggagggctggagagagagaggatgaggggacaggagaaggacactttgggctttctgtcctcctcctgtcctgccttagctggcgcccttcactccctgtctcctgcctctgactggaacgagaaaataccttgcacatcccaggtccacccagccaaccctgactggtccagtaagctgtttcttctgcatttcagccctggttcctgattctacctcccccaggtctctaccattccactctcagcttcctcctccttgccacccaattcttcttggcttcccatcacttcccctctcttttacctctctgcccctgtctcgccaaaggctctctcctgtctgtggttctacttgatctccgtaactttttccttccctccattcaccctggacattttgccctcatgatttctcctttcctcttgtgtatttgtctcttgatgacccattttcctttcagagaaactgaggctcagataggtcaggggtgatggcctacatgggacagcaggacttagtagacaaggccttgcatccttgcggccctgctttctgtctcatccctcttcccttttgtcttggtcagccgcccaaaggctccagctctgcatccagcaggggagccccttggggggttccagagtccacaactgcacacccgtcaccttcacccactgccttgttgtagcaaacctgcagccaccctgtatattgtatatgtatatttatctatttgtatatagatatacaatttcaagaacctactaaaggaggaagcctcactgctatgcagcctgacaggttatcaagtgggcctctttgaatccctttttgcttctaggagagttgggaaccatgaggtgcccccctgcagaccccagagctgctgccttccccaggtgtgcaggaggtttgtaggagacggggccccttggctgcccaagctgccacccctcccccacccgcccagtggcagttgcgtccgttggggcttctggggcagcccacagggttccgagcatgtgctggcagttgctctttggagcacccacttcacttctcccatgtagttcctgagtgcaggactctcctgaagaaggggcgtctaaaaggccagcccatgcatcttgttcagaccaggctgctccatctccgctaagcccagggatccacttgtgtgtctttctgggataattgtctttagtggcagcctgggcctcggggaaggaagggcatgaggaatggccccggctgggatgtcaggggcccaggacaactcctgtctctaccaggaaattgccccctcttttcagaggctgccttgtcctaggtatctgatgtcctgcccttggcagttttcaactccagatgtaggtctgactcctattaggctaccatttctttgtgggaagacaggtatgaaattgcagcattcctaattctcttaatgtgaattgtcagagccccttcagaccggtggctggggccaggcatgagaggcaggtggtaagggcaagaggagcagcccctgtgcacttggggaggctggaagggttggcgaaaggagctgaaaacaccctagattccccaaatggcatgaagagatcccagccctgaggcacctcccactcaagccggagatgagcttttcccaaaatccaactctatgaggctctcactcaatgtgggctcctgatgctgaggggacatcctgacacccctgtgttctcttctgcagaacctcgtcgcgacatttctcagaagccatgacatgtccctgcggctggaggcctttcaagggtggcccaggaggcctcaagggcccggtgtggcctgcaaaggaaggtaagtaggtggcagggctgagtctgtgcctcaaaagccaacactccagtttcttgacttcctcccttctccatttcctgaacctggatgggtgctgccggggatggtgggagggatgagacggaggaccccattcatttgttaggagatccagagttcagcctctccagtgccttggctgcccccttcctcactcccaagtgctgctcgtgcatatttactcattgctcccttttcctgagatggtgcgtattctcctttaagaagtgtaaaccagacgagtctcttcggtgatagctcaaggcatagtcagctgcccactactgagcctcctcccttccttcagcctctgccctctccaagctcactctggcctttcttatcctaggtaggctcctgtcctttgtctctatttttgcctttgatcacaacttctctcctgttgtccctttggaatggcagcatcattctgcagcttctcggtcagcatgggttatgggtttgtgccaacagcgatgcatgctgtccccagagtggctggatgggccttggacaatcactcacgtacccaaatgtgttctccagataacctttcctctgtgtatacgaagagagaacgtttagggagcactgttctccttctcacccattctctctgttttcctctccatcatctgggatgtctttctctgtgtgccattctgcctctaattatcctctttttctttgtttacagagaacagctgttctcacggaaggatccaaagggttcaaaggcgaagggtgccatctgcttccccactgattcagaagataaacaggagaagtgtcctgtttcacccatattgctggtcctgatttttcaatagtgtccctaccctgaagctcttccattggtcatcatggagttagctaacagcccagggaactggtctcttttcccttttcccttaccacctggaactcacctggaaagggcaatcagctggctctatatcagacgccaccacctggtctttgaagtttctgtcctaccagtgccacagctccctctcccacttctgaactacctccaagag

SEQ ID NO: 1886344 - DNA, 4001 bp, Homo sapiens; identical to SEQ ID NO: 1242442

SEQ ID NO: 1886345 - DNA, 4001 bp, Homo sapiens
cctctagcatgcgtgtccaaccttttggcttccctgggccacattgaaagaatcgtcctgggccatatgtaaaacacactaacactaatgatagctgatgagataaaatttttttaaaaagggcccatgcataattttcatgatatctgccaatacagatgagcaaaaacatcctcacattcaaatgactggacacccatgcaagagccctgggccttggtattactagctcagaagtcaaagtcctggttgagagcaccagattgacccacgttaggtcatatgcttgagcccaggtgctgagggcagttgagagagtgaccctctgacccttctatttatttatttattgcctctcaccaaaacccacacaacaggggattgcaaacaggttcaaatgctggagaaccaaaagccaatacaggttggctacacaaggtcatcagcctagggcaggaagtgggcaacgggcgctggccatttggaagaaaatgtgaaatcagagagtgaacatatttaagccattaagtttgaatctcctaactgggctcctcatttcctgccctgtctctctacagtgcattctccacaacacagacagggggatctttaaaaaatataaatcagattttcagtgttctgttgaaaacttccttaacgagtcttctctttgtatctagaacaaaatccaggcttactatggtcacgggccctacataatctggtccccagctacctctccatactcctttactccttgctccacaagccctcctcacccccacccgcacctgccagtcttacagacacagggcaacttgtttcccctttgaaggttttgctctagccgttccctgtgtctgaaacactgtgtccctagatctttggatggctggtcctttcagctttcaactcaaagttctccttttcgacgagaactcccctgaccccaacccaggcagtccccttcccactctcattatacagccctgcttaggctgtctcacggaattcattatctgaagctgtactacttacttgtttgcttcattgtttatttcctccctgcccctttaacccaacttccaggaaaccaggaacttagcttttcttatcctgctgcatccccaacctctacaaccgtgcctggcacagactgagaggcactcagcgaaaacctcttgtgtggtggaatgcttgactttatagagggcccagggttcaagttggctagtggcagagagggcttacaacctagttctcctgactaatcagaggtagaactaaagactgggctccagcccctcattttttttttttttttttttttttttgagacggagtctcgctctgtcttccaggctggagtgcagtggcgcgatctcagctcactgcaagctctgcctcctgggttcacgccattctcctgcctcagcctcccgagtagctaggattacaggtgcccgccaccacgcccggctaacttttttgtatttttagtagagacagcgtttcaccgtgttagccaggatggtctcaatctcctgacctcgtgatccacccgcctcggcctcccaaagtgccgggattacaggcgtgagccaccacgcccggcccagcccttctggctagagctgcaggtcagcgtttagggagagtttaaaggatctctacaggaacttataatgacaataatgaaaagaacaatagctgatacctactgaacacgctctatgtgccaggcactgttctacgtatttaatctgagtttcatttacgcttcacgaccacactgcgcggtagatactatcattacccttactttatggataaggaaactgagtcactgagttgttaggttacctgcccagcatacagctgaatataaatcgtacgctgctatcaaaactttcttttgctctcactccgtcacactggctggggtgagacgatttctcgcatgtgacgacccaggacagccccagcgcctccgggtcacaggcccccggacgtcccagggcgcgggcgctaggcgggcggggaggggggagggcgcaggccgggattggtggaagagaagagattggtggaagacaatggaagtctagtagcggaagtcccgcccagcctaggccgaacttccggctctcactgctaggggcttaagcggagggagtcgagccagcgtcgccgcgatggtgttgttggagagcgagcaggtatggctaggcctggccggccgagggaagggggcggctcaggcgttactcgagacctgtgcctcctgcaggaggaccagggccttgacgcggcaggacgaggatttggggctggctaacggggctgggcctgttgttttccagttcctgacggagctgaccagacttttccagaagtgccggacgtcgggcagcgtctatatcaccttgaagaagtgtaagcagcgggaggggagccgggcgatgctccctgggttcccggtgtctgggagccaccggagtctgtctgccgcggaccgccgccttcctctacctttccccaccctgtactgagcacattcggggcttcgggcccggaaaatagtagggattgtagctggctcagtccccagcactgagccgcctaggttgcttctggtaacaatgggccccaagcagcccagggctctttgtcagggatcccagacgccgccactttgagtggaatttaacgtgcttcgatattacatgtttccgtcgtggaaataatagtttctccagggtttcgccagaccgtgatagcagatgaggtgtttaacaaaactagagcagcggggctgggttaggtcatcacttaccccactcctctgttttaactgtttgtctgccgctcagccacgtacgcggccgtgttcaccaggatgcattttttccttcagatgacggtcgaaccaaacccattccaaagaagggtactgtggagggctttgagcccgcagacaacaagtgtctgttaagagctaccgatgggaagaagaagatcagcactgtggtgagcttaatttctaaggctgtcttttgaaatgtaaagacttgaacttaacagaggatggggcgtttctgaaccaggcttttatttgtttttcccttttgccctgtgtggctatttttgagaccaggaccttcctatactttagtagtggaaacctcaagaataaaataagaaggtagaggtcagacagtcgttagttctgctaaagctcttgtggaaatgaaagtagcatattggtccttattcgtagtactgtaaggagcagctggcataaatatttgattccttagccccttactgtgctgggccttcaataagcagtttcttggtaccaggtgatgctattatttccttatctttgtggttcacatggcgaatgtgcagctagatgttaggtttgacacttgagaaaatatacatttagtcaagagccctagtctttcagtggaggttgaataaggcaaaggaagaggctccttgaattgagtgaatactactttattctgctgtggcagaaatcacattagtgtaggatactgactgcatgaaaatgtagactatacttagttggaagtcttgagttatcttgagaggacttctacagtaaaacaagcttatgtggttttacagattaagttagatatcatgaaataacaaaaacctaaggacaagttatcttgagaggacttctacagtaaaacaagcttatgtggttttacagattaagttagatatcatgaaataacaaaaacctaaggagtgttcttcagaggtagaatttattttgtggtagctcgcattgtgcttaaatatgcttgaattaatggaaggcaggtttaaaaataagatggggagggagtagtttaaatatatcttctattaatgtataaaaaattaatactgagaagtcctctgacttttctcagaacccagggagaaaacccaatgccacctttctaagggatttcaag

SEQ ID NO: 1886346 - DNA, 4001 bp, Homo sapiens
gcctgtaatcccagctctttggaaggccgaggcgggaggatcacgaggtcagatcgaggccatcctggctaacacggtgaaacccgtctcttctaaaaatacgaaaacaaaaaattagcagggagtggtggccagtgcctgtagtcccaactactcgggaggctgaggcaggagaacggtgtgaacccaggaggcggagcttgcagtaagccaagatctcaacagtgctaaatgcatacatggattatcttactaaattttcataactctatagaggtaagtgctatcattattttctccatcatagaggaagaaagtgaagctcagaataacttgctcaaggtcatacaggcctgggcaaacccagggcctgaatccagcaaagctcttaactacctcagaacactgcacagttcgagccctgcaatactacagtctatgaatgatttcgatttcactaagttagaaatttgaatttcaacagagacattttagctaaaaggtaaaattttaaagaggatgaattaagagaatttcccacagacatctttataataaaatgaggagaaaagcctcccatttcctatttatgaaagtgatattaaggtgtgtgtcacaatttcatcaagaagtggcttatgacaatacagctttggtttaggtattaaaataggactcttttctgcccataggaggacatggaaatgaaggatagatgtgataaatgtcaattcagagctctgcaaaatgccagactcaattcttgttttaaaatatcagagccagggctcttgtttcacccttgattcttcacacaaaacaccaccatcctctgacctcttcacacagagcaagctttaccccactacctaaaggggagtgctgatccacatggtctccccatccacgctagaaattgatcccaaacaccaaccgctgcatagacgtcggcgactttggtctgcaccccccgaacttggtgatacctcatcaagccaaacccctccccaacatccaaaatgcccagaccagcatccgaaagctggtctcctatacaaagcagaatccctgcctacaaagcagtttcccacctccgactcctccccacggcgaacagcccttctggatccaaccaacccaccaaccccaatagggcccagcacccagagggtccacaatccagagaaggagctacaagccctgtacttgcaagcctcgaacccccaactccaactgacctcccctctgccagagcaagaccacgagtacccgccgagagcggacctggctggctacacaaagccaggcgcccgaccagagggatcctccgggacgtcctccgccaccggggcgtccccgcccagccccgcccggcgcccggcgctcaccagctctcctccccctcctcctagcctgacagacgctccaggtcgtctagcaagccgccctcccccgccgccagcaagaaggtggcgtctcgcagctcctcgttattcgtccgcctcgggtccatccggccccgccgcccgactttgcgctgagacccaaggggaagccccgaggggaccccgcgccgtaggagggagtggaggagccggcgaaccgcgatggagccggggcccagcacagcgcgagcggctcctcggctgttcgtgctgcttccccagcttcttcaccggcacctgcagcttccgcacctcctggtccgcgttcacgttagagttaacgtcctccatcccggccccgctgcctccgccgcccgcggccctctcgctctcgcagcaacaagggaagagccggaggaaagaggcgtccacgccgctcactccagccgaggcccccgcatatagcagggccaggccccgtcgccagggttcccccagcgcgggtcccgaagcaccgctggccacagatgaaccgcctcctcagcgcaggtccgggattcggggaggcagcgccaatatccggtctctgcagccatcttccctccgtccctccgcccaccgagggtcggccctgtaggtgacctcagagcgtcggggatgggcgtggccccgtcgggcgctaagaagacctagcgcagagaggaccgccgagctcccgacggggcggggccaggtgtgtgaggggcggggattggacccggaggggcgtgtctggactgccggcggaagtggaacgcggcctgacctgcgacggaaagccactgcaagcccggaggcgaacagaaggcattccgcgagccgggctgagttggtgaacacggtcctcgttcaccccgcctattggtctgggcgtgtggggtattctccacccacttatacggcgtgtgggaccgacgggcccgtcctgcccggctccggtccggatctcgagtaggcgctcaatgggattcggggagacgtagtttactttgttcagcaaatatttaaccgatgcctattttaatgggagattgtttccgctggcgggagcctcagagaccgcctgtgtcctttaagaaacccgaatttcagacagttaagagaggtctaaggtcaaaataataatcataatttcttcttactggccagatactatgctaagccctttttaattttattattattatattttgtcaccgaggctggagtgcaatggcccgatcttggctctgcaacctccgcctcccggtttaaagcgattctcctgcctcagcctcccgagtaactgggattacaggcgggcgccaccacgcctcgctgatttttgtattttagtagagacggggtttcgccattttggccaggctggtctcgaccctgacctcagggtgatccgctcacctcagccactcaaaagtgctgggattactggcgtcagccaccgcgcgcccggtcgtgctaatcactttgaaaggcattatctcatcggttaaaacatagttttccggacttaaaagtttacagcacactggcgcagaagatggaaaaccgctgcttgcctttctccgtttattgactcacattctgctctttggatcattttcttcggaaaaagttttccaaagtgtgtcttgtgtattaaaagttgtgtattaaaagtatttgaacacgctgacagatactgaagaatgcagaaaattgtatgagtgtgaaaatctgcctttacgatgtgtactagtggcagcaaatccaaacaaaatttaagtgctttgttttgatcacattcattgggcttcagatgtcaattgtgcgctgctttggcttgtgtttgcagccacaaacacaagtggagttattaacgccactcactaaacacaagtggaagttattaagagtggaggttccctcctccactcttaataacagtgatccagttcgtgttttttttttttttttttttagacggagtctcgctctttcgcccaggctggagtgcagtggcatgatctcggctcactgcaagctccgcctcccgaggtcacgccattctcctgcctcagcctcctgcctagctgggacaacaggcgcccgccaccgcgcccggctaattttttgtatttagtagagacggggtttcaccgtgttagccaggatggtctagatctcctgacttcgtgatccgcccgcttcggcctcccaaagtgctgggattacaggggtgagccaccgcgcctggccagtgatccagttctattacacctgggtgtggactcatgccacgactgatttgcttctaccctttagcttttctagtgccttagtttccttgcctagaatatcctgcctgccatagctgattcgttttcttaaaacccgtactcgctcattcattcaggaaacctcttcctgaaaattccacaaaaatctaattattctttgtattctagcattacccgagccatagttttcaataggtgtttgcactttttaaaaaattgcattattttctaaaaattattttgtttgtttttgtctgtttacttgatttaaagacaccatttttgtttaccatgtcta

SEQ ID NO: 1886347 - DNA, 4001 bp, Homo sapiens
aaagagcagaatgtgagtcaataaacggagaaaggcaagcagcggttttccatcttctgcgccagtgtgctgtaaacttttaagtccggaaaactatgttttaaccgatgagataatgcctttcaaagtgattagcacgaccgggcgcgcggtggctgacgccagtaatcccagcacttttgagtggctgaggtgagcggatcaccctgaggtcagggtcgagaccagcctggccaaaatggcgaaaccccgtctctactaaaatacaaaaatcagcgaggcgtggtggcgcccgcctgtaatcccagttactcgggaggctgaggcaggagaatcgctttaaaccgggaggcggaggttgcagagccaagatcgggccattgcactccagcctcggtgacaaaatataataataataaaattaaaaagggcttagcatagtatctggccagtaagaagaaattatgattattattttgaccttagacctctcttaactgtctgaaattcgggtttcttaaaggacacaggcggtctctgaggctcccgccagcggaaacaatctcccattaaaataggcatcggttaaatatttgctgaacaaagtaaactacgtctccccgaatcccattgagcgcctactcgagatccggaccggagccgggcaggacgggcccgtcggtcccacacgccgtataagtgggtggagaataccccacacgcccagaccaataggcggggtgaacgaggaccgtgttcaccaactcagcccggctcgcggaatgccttctgttcgcctccgggcttgcagtggctttccgtcgcaggtcaggccgcgttccacttccgccggcagtccagacacgcccctccgggtccaatccccgcccctcacacacctggccccgccccgtcgggagctcggcggtcctctctgcgctaggtcttcttagcgcccgacggggccacgcccatccccgacgctctgaggtcacctacagggccgaccctcggtgggcggagggacggagggaagatggctgcagagaccggatattggcgctgcctccccgaatcccggacctgcgctgaggaggcggttcatctgtggccagcggtgcttcgggacccgcgctgggggaaccctggcgacggggcctggccctgctatatgcgggggcctcggctggagtgagcggcgtggacgcctctttcctccggctcttcccttgttgctgcgagagcgagagggccgcgggcggcggaggcagcggggccgggatggaggacgttaactctaacgtgaacgcggaccaggaggtgcggaagctgcaggtgccggtgaagaagctggggaagcagcacgaacagccgaggagccgctcgcgctgtgctgggccccggctccatcgcggttcgccggctcctccactccctcctacggcgcggggtcccctcggggcttccccttgggtctcagcgcaaagtcgggcggcggggccggatggacccgaggcggacgaataacgaggagctgcgagacgccaccttcttgctggcggcgggggagggcggcttgctagacgacctggagcgtctgtcaggctaggaggagggggaggagagctggtgagcgccgggcgccgggcggggctgggcggggacgccccggtggcggaggacgtcccggaggatccctctggtcgggcgcctggctttgtgtagccagccaggtccgctctcggcgggtactcgtggtcttgctctggcagaggggaggtcagttggagttgggggttcgaggcttgcaagtacagggcttgtagctccttctctggattgtggaccctctgggtgctgggccctattggggttggtgggttggttggatccagaagggctgttcgccgtggggaggagtcggaggtgggaaactgctttgtaggcagggattctgctttgtataggagaccagctttcggatgctggtctgggcattttggatgttggggaggggtttggcttgatgaggtatcaccaagttcggggggtgcagaccaaagtcgccgacgtctatgcagcggttggtgtttgggatcaatttctagcgtggatggggagaccatgtggatcagcactcccctttaggtagtggggtaaagcttgctctgtgtgaagaggtcagaggatggtggtgttttgtgtgaagaatcaagggtgaaacaagagccctggctctgatattttaaaacaagaattgagtctggcattttgcagagctctgaattgacatttatcacatctatccttcatttccatgtcctcctatgggcagaaaagagtcctattttaatacctaaaccaaagctgtattgtcataagccacttcttgatgaaattgtgacacacaccttaatatcactttcataaataggaaatgggaggcttttctcctcattttattataaagatgtctgtgggaaattctcttaattcatcctctttaaaattttaccttttagctaaaatgtctctgttgaaattcaaatttctaacttagtgaaatcgaaatcattcatagactgtagtattgcagggctcgaactgtgcagtgttctgaggtagttaagagctttgctggattcaggccctgggtttgcccaggcctgtatgaccttgagcaagttattctgagcttcactttcttcctctatgatggagaaaataatgatagcacttacctctatagagttatgaaaatttagtaagataatccatgtatgcatttagcactgttgagatcttggcttactgcaagctccgcctcctgggttcacaccgttctcctgcctcagcctcccgagtagttgggactacaggcactggccaccactccctgctaattttttgttttcgtatttttagaagagacgggtttcaccgtgttagccaggatggcctcgatctgacctcgtgatcctcccgcctcggccttccaaagagctgggattacaggcatgagccaccatgcccagcctattactcttaagcctagttatttaaatcaaacatttagtgagctcttacatgatgttataggagactctgaagattctcaactgttgattcctgttcataaggcagttatagtcttgttgagaactaagttttatgcagataaataaactagaaagtgtatggtgaattgccgaaagagagaacaaaagtactgtcagtgcgcagtaactgggaagaaaacagtagtccaaagtagaggggccaaactttgaggaggaggctttggagtctggaagtgaggaaagagtgggaagggcattttatgctctgacagctacaagagcagagtcagagatatttgtaactcccagttaggagatttgaataacagaagtactcttgagtatatggtgacaaacctttattttttatttactatttttttttttttttgagacggagtctcgctctgttgccctggctggagtgcagtggcatgatctcagctcactgcaacctccgcctcccaggttcaagcaattcttctgccccagcctcccaagtagctgggactgcaggtgcccacccccatgcccagctaatttttgtgtttttagtagagatggagtttcaccatactggccaggctggtctcgaactccagacctcgtgatctgcccgccttggcctcccaaagtgctgcgtgagccaccgcacccagccgacaaacctttattaccaggtgatatcaaatattattagagctgactgtggtagtgacagtttttcatataaatgaaattgcatcctcccaaaggaatcctgagtatgtatgcactttaaaagaacccagaatcatctaaatattgtcacatggctcttgcaagtgatgataatagtgatgcttataataatgaggattagctgcactcatcagcctgtagaaagtaaaaagtttccttttcgaaatttcctttcttgtt

SEQ ID NO: 1886348 - DNA, 4001 bp, Homo sapiens
tcagcagaggaaggcgggtcgaatgtgcagcaggacagaaaaacccagagccctgattgtgcccattgtccaatgactgctcctttgcaagggctgatccctgacattgaatggcgggagggtgatgactgcattgaaatatctgctaataggcaaggccctcccttcctccacaccctttctcctccgttaaagactttctggaaaacagagcaaaaacaatgcggcaaccccaagggttgatgagaattgcattctccctgcagcttctattactcttgtgcctttgtccccgtggacttggtgaagggtatagctgtcaggtgcctctcttccctggtgcagggtaatctggactgattgacttgtccattgtcctaaggttggagctaaaaacaaaacaggaaaagctgcttgatgaggatgaagaggaacttggtggccaaatgctgttgctttccaggcattggacacaaggctcattctctctgagaaacttacatccaaaggcagtgactttgaaaggaccgtggctgtggaattagagacagatgcgtagctgaccatgagtagatattaaattgtattaaactatgcaaaccgcatttctcatgcaaggcttgtttctaccttacatcagcccttgagctgcatttgcatttctatagagaacgaaataaaagcagcatgtcacttactcatttctattcataactgtgagctgttattctagctctcatctaccctacacagcactgccagattaatcttcctgaacctccatcaacagcgagtttggttcccagcatttcactgaatcaactcatgtttataaggcccaggtgctgagagggatataaacagacttaagacgggactaattttaaggtaaccagacatcctgctttgtctgggacaatcattgcttatgcttgttatcctgatacaattattaatagtgcctcttttcactctcaaaagtgatcctgattagacaatgaattacaaggttgccctactcatgtctgtcaagtgttcataagataaaaggggtggaaaggatgaaggtaaatacggtaatttcaaaacaaggtagagattggaggtagaggagttaggtgtttgcagaaggaagggagccattgaggctgagagtgataggggaggctcatttaattctaggacttggccttggcttcgaaggatgatgatgactcaaaaaaggggagagaggctggcgaaggtgtgggagccgtgagagttaagggtgtattccatgactctcaaagggtcacctagatggagcttcctctgggaagaggagagcaggagctgtgagatgggagggacagatctggaaggcttgaaaggcaggtgaggaacttgtgctttaccctgggggctgaaggaagccatagagatactggtgtgaaatagccaaggtgaacaggaggattcaactggtcctggcgtaggactggtcatctcatcaccagtgaagacagaggatctgacctgcagaagctgcctccaaaccatcacaccatgctgcctgcccctctcccatggcctgcatgatttcctaggtaaattaaaaattttcacccatgacagggtgaggcaaatggatgttctggtgtcttggtttccagaagcctccagccaagagttgacatgagcttgctgttttaacatcagttaaaataattattgtagcatgatttctgacaggaacaaaacaaaaggatacacttacaggagcaggctgtgcagtcaggacatgcgcgatccttcagagggcctttcgggagtgagtgactcgccacagggtgtttatctgtcatccatatggggaatcatcttcttcataattttgctcaactggaatcagagctaaggctccatgtgcacagcggagagattcattttgtcttgtgcctgcctcttcctcctttcttccttccttttttctttctttcaactagaatcattgagtactcaacatatggacacaccctaagccagctgctcttactccgtggttgccacagcaacccagtctcgtgagatcagagcatcttcattttgcagatgaagaaaataagcttctgagagggtaggagaactgctggaggtgaccagctatatgcattgttgagcaccttgccagggtaattacatcaagcaggtctctatgaatagtttgattatttctagtaatgctgttgaggaaatgaaaccaacagagagcaatactaggtcagtggtattcaagcctgactgtgcattagcaccatttcagcaccaggtgcttaaaaaatacgtttctggctgggtgcggtggctcacgcctgtaatcccagcactttgggaggccgaggcaggtggatcacaaggtcaggagatcgagaccatcctggctaacacagtgaaaccccgtctctactaaaaatacaaaaaattagccaggcgcagtggcgggcacctgcagtcccagctactcgggaggctgaggcaggagaatggcgtgaacccgggaggtggagcttacagtgagccgagatcgcgccactgcactccagtctgggcgacagagcaagactccgtctcaaaaaaaaaaaaatacatgtttctgggctctgtgccccaaatgttctgttttagtggctcctggtggagcttaagaatctgtgcattgtttttttaagtccgctagagtaatagttcttcaaccacagtatgtatccattgttaaaacacagattctgggcttccaccccttgagtgtctgatgcaggaggcctctggtgggcctaagcattgcattccatactgctactctgaggaggatactcagaactgctgcgggagaggctgctgatgctcatcccgcccacgcactgctggggtggaaggctcctggactctgcatgctcagatggtttgagtctattttgtggagggcatgctaggattagaagagctagacccgggatggctacatatgagccatccccccttcctcgaaacctggggtagacatcatttactgaccactgtgctctttttaactgagtcctggctcaaggtccctctcatctctctgtagcctgcccataccaatcaaatggtgttggctcacaagccaaaccttttattgtttgctaagctagacattctaaccgacacttccaaaatcagtcattgaaaaattctgtttgtttgtggaacgtgtgccttaattgttcatgagagggaaccccctggggagtggttcttgacattggctgcacattagaatcacctaggaaattcaaaacaaaaagaaaaccagactattgggctcccttccatgtctgaggtgggctccagctgctagcagctttatgagcattacaggtgattctaaggtacggttagggctgacagctatcggactgagggggttgctagaagctgtgcaaactctaaaactagttgctaactcctgtcctgtcgctgaagattccccttgcagagcatccccttttcttctatgcatctctttatttttctgacaaacagaatagaaaggagaagcagccaaaggcctgttgacaccatttttgtctcagaggcttcctgacaggaggctgaaatgggtggtagccactgtcctagaatagctagaaaggaaccatttttctggagcagttcccaaaaaattcgtctctaacagcagaaggtgtcactcccctcgctttcttaccttttgtgaattttggaatgcagaaggtcccatcgagaggaaacgttttcacacagagactccccaactctcagccccatggttttcctctctgctcagtgccagccctcccaaatttagactcgcgtcccccttcatggctgccactcatgctttactaaattgctctttgtggaagtcaccaacacaccctaaacagcaattcttctctttgttctccctgaatcatccgactctgttgatcactctctct

SEQ ID NO: 1886349 - DNA, 4001 bp, Homo sapiens
agtaacccacaaaggagagccaagttcctccaggcttcacgcctaaccagagaggtgtgtgggatagaaaaagacctacaccatcctcctagctctgtgctggatgagatttgtcacttggggcaagactgcgtgcatcacctcagtttctgcatccataaaatggaactgataccatcaccctcattgagatcatggggattgagaagatgtacacatgaaagtgccagcacctcttctggacaatggaagagattcctcgggtgttatttccctccagtttgggttctgagtccagaatcctttctggagcaacctgtttgggtgttcttccccgtccctgaacgtgagtggaggcttagagctgactttttcatgaggcaacctcttcaaccctgaacaggtcttgctcttcaaaagtccttgatatttaaccaaaatatgccgcttcaaacttcccactggtgatgcatgaaatagagtaaatgcccccaaactcttctccaattaagattttttatcccagtggaatcagattcaattaagcatcaaagtcaatctttggtggaaaaataagtcaaatttcagccagagtgatctttgcagaagggccatccttgcctttggctctggccctggagttgtattgaggttttgtgattaatgggtaattgcctgagccttacattttttaagatcttttggtggaactgtcctctttggtgttgctggctctttcttcggaatcacaaaagcccagaatccttgctgagaatctggggtccttgtggcatgcagctgcagctgccactccccacctcctgggatggtgcctgagtctgtacttctagatagtcacaaggtcgtctagcagagtaggagccaagagtcagtatacatgcctgactggggcgtggggacctgagatggcaaggaggaccgagtcttactgatactcactatggtagacagaataatggccccccaaagttgtccacagcctactcccgagaacctgtgaacatgttaagttacatggtgtattagtccatttcacactgctgataaagacatctcctagactgggcaatttacaaaagaaagaagtttaatgacttacagtttcatgtggttggggaggcctcacaatcatggcagaaggcaaggaggagcaagtcacatcttacatggatggcagcaggcaaaaaaaggttgtgcagggaaactcctccttataaaaccatcagatcttgtgagacttattcactgtcatgagaacagcatggcaaagacctgcccccatgattcaattacctcccacaaggtcccttccacaacatgtgagaattcaagatgagatttggatgggaatacagccaaaccatatcacatggcaaaggggaattaatgttacagatggaattaaggtcctaatgaagacccttgtgatggaaagattaccctggattatccaggtgagtccagtgtaaccacaagggtccttctaggtagaaggggcaggacgaagagttgagtcaggaagagatttgaagaggctgaactgcgggctttgcagatgaaggaaggggccacaaactaaggagtgcaagaaatacaactctagcagctggaaaggcaaggaaacaatttttcccctaaagcttccgtaaaggaacacagccctgccaactccttgattttagcccagcaaaatccatttcagacttctgacctccagaactgcaagataatacatttatgttgctttaagccactaagtgaatggtgatttgttacaacagcaaataggaaaagaatacactcaccttcctttatcatcaacacatcctgctactcaaggcagggacttcacctggctggagaccatgcctgttcaggtgttagctgatcgttaaggagcagcttgtctggacgggaaggagcacagacgttggatcgaggcagagctgagtgaggcagtgccatcactttctggcttcacagccttgctcagattgtttcatttctctgacctttatgctctaaagcaggaatcattacaggattaaactacagaatgtactcctggttgattacctggcatgcagtcagctctcaacacatggtctcttttagtaatgatgagttgaactgtgccttttcttccctcccctgggaagtgtttctctttttttagggtgtgagagagattgacattctctcccttgtctagcacaggactgccttgccctggggatccctagtgaaccattgctgggaggctcagatggactccaggcagctggacatggcgaatacatgagagattggcatagcgtatccccaggggaatgagaatgaaactagaatcaagattcccgaagatcaagccgtccaggtggaaacctcaagtagccaaacacagcagtgtggttgggctggaatgtttaacctctctgggagggataacaacattccagctgggacgttcaccaaaagtaacaagtaatcacatgggtgtgttctctatccaaatgaccagagcctccatctggctagcttcccatgtaattagtttaagagtaacaaaataccaggacattaatatatacaaaggagtgttccagaacatctaggcacagactgataaaggagacgtgggtgtatgtgcacgtgtacgttaaagatgagttaatttcaatgtttctattattctaaactgaactgctgctatgggtttcaagaattacatagcttatgaggtcatctggctggaactatgattccagagcatccctcaaaacacgagaggacttttttccccacttttatgttgttagatgccaaggtgatttagccagagtcaaagctgtactttatggcaggacatatattcttccactgtagattttttgtttttgttttgttttgttttttgttttgtttcattcaccgagttggaagatttagctctgcagtgtacagggagctaccagtaaactgtaggtcaggagctggccagggtgacctcagcttagccaccagagcccaactctcaagttgttcaactctgtgtctcctcctctgtgcttgatggagttaactaggagatctctgagttggagtgtcgctctgacctctgagggtacttaaagggaagcagcaggagaaagtggggaggcagagagtggcaccaaggtgctgcagatgacgtctgctggctgtgttcctggtaataagaagcgctgtcctctgaagggactcatgttccagggaagacaatttggggaaatgctgaccgaggtcatattttaatgtttaaagctagcttttaagtatttaaagaaacgatttacaagtcagtctcctgaaattacaattccataaaacttccaagtgggcaaagaataataacttaaggaagagcagtttcctaaacagatgagagtgaagtccaaattgcttttaaagggagataaaaaggtctcaaatttcttgctatggttctgaatgtttagtgataggttcgtttgaagatgaaatcaaccctgatgttagctcaataatttcaggatgtggggagggtggggggaaacctagcctatgggaaaggaaaatcaggaaaaccttttagtagacagacatttttcattgctatcaaaggatgtgtaaggccacaaaaacctcttagcaggaagcatcctggggtgatccatacattctttctggtgaggcagaaggaaaaggaggtccaagtctcatgatctgtctctttagatccagtagcagcaaggatcctaaattggtggataaagaaacaaagccaactgggcttggtggctcacacctgtaatcccagcactttgggaggccaaggtgggcagattgcttgagcccaggagttcaagaccagcttggtccacatgatgaaacctggtctgtacaaaaaatacaaaaattagccaggtgttgtagtgcacaccggtagtcccagctacttg

SEQ ID NO: 1886350 - DNA, 4001 bp, Homo sapiens
gcagggggtctactccatccccactttccaccatctgggctaggttattttgatggctacataatattccactaagtggatgttctataactttggttaatatactggtaaataggttacttccagttgcaagattaattttatgcatctttgtgcaggaagagtcactggatcaaagaacaagtagagtaaaattttaatatatgttgttattctgttcccaggaggttgcatacatttgtactctcatccgctgtgtaacaactatttctccataccctcaccaacacagggtataaacaaacttcatgtttgtccatcaataggttttaagaaaagcctctccttgctttaatttttaattccctaacaatgagtgaggttctgcatctttttatagctttgttagccatgtcaattaatttttccacaaagtatctttccatgtctaatgcattctttttgtttatggggttgtctgaaaattgcttaatgatttgtatgagcccttggttcgataagaaaacttatgtgttaaagtgtgtcccgatttttttctcatattatctaactttttatgaaattttgatgtgcttaattttttaatgggattaatttactagtcttttcttttatgggtcctaagagtatttacatgcgttacttccctctctcttcacaagggcatagggaacatttatttgtttgtttgtttatttttattactttttgagacaggatcttgctctgcagcccaggctggagtgcagtggcgcgatcacggttcactgctgcctctgcctcccgggttgaagcgatcctcccacctcagcccccccaagtagctgggattacagccccgcgccaccatgcccggctaatttttgaatttttagtagagacggagtctcgccatgctgctcaggctggtctcgaactcctaggttcaagtgatctcctgcctcagcctcccaaagtgctgggattacaggcgtgagccaccggaccccgccaggaacatttatgatgtatcccatttcaccttggagtaaactgaagctcaaagaataatgagtgaaactgggtttagatcttgagctccctaattccccatccaggtcttcttcacagcctggctgcccttcacatcttccaaaaaggtctttcaagttgtcaatttgtttacactactcttccaaacatttatatcgaaagtttaaaggaaacaataagtacataaaaaagaaagataagaaatagacctcagtattaaccttttcaaatatttagttggtgatagcgcagaagaggggaaaccgaggctgtccttgccattcacgctgtgaagatgcgaccctggctcactccccgcagctccagggcagctggaagcagagaactcccatatctctaataaagccgggcctctcgcagatgtcagcgcattgcattgactcctggacacctgcactaaaggcccttcaggcacctccaactaaatatgcccagaactgaactcaccctatctcttctccatctcaggtaagctgccaggtggccaaggctgggagtcatgatgctttctccttctgaacatccacaatcgggggcagagaccttcaccttccatctcctaaacactctacgatgggtcctcttctcttcacccccactccccgcacccctgccacacacctctcccaccattgcacgcgcccagtctccacgcgcatttcctctcccaccctgcagcagccgccctagcatattacctctaatgcaaatcgcaccactgtcccgcaggctgaaagcctcggtgcactcaggacaagagtccacgcttcttaaacaaacggtcgacgttgtccgcgacctggcccggcccaacgggtcagaccgtcattggccatctcacagtcccggcgctccagagcccctcccacagcgggacatgaaggaggcggatacggctggaccttacccggcccgcccaaggcgtccgggacccgcccaggcgctgacgctaactggagagcctggccccgcggtctccttgtcctgccaatctccgggaggcgggatccgtctgagggcctggaccaattcgggagcgggggcgcggaaagaggcggggctacgagctcctcccagagctccagcctccaggcacccgggatccagcgccgccgctcataacacccgcgaccccgcagctaagcgcagctcccgacgcaatggacccggcgctggcagcccagatgagcgaggctgtggccgagaagatgctccagtaccggcgggacacagcaggctggaagatttgccgggaaggcgtgagtgaggagctgggcgggaaggggtcgcggagacggcttcgtggagcccgggtccccagaagcccccaagcgcctcctctccccgttgttttctgctccccaatcccctggacccgattgagagggattccaatggggattgttttcttctttaaaaaaaagattgggcctgttatgctcacaatgacttcaggtggtaagtatctgttcctttcactcagtgacttgcccaaggtcacctggctgttgaatgctgtttaggactggatgtttctgtgacagtggtaaaagtaaataaattgcatttaaggggtaagcaggtgtttaaaaacaaaacaaaatgaaagaatgtggtcgcagctaaggaggtttttacatgttgtttaaatccagtaaagtctgatccagcatctgatgcatactaaggttttcttctgtgttcattacagcatgaacccctctctttgtcgttgccagagggtagcatgggagtagttttgcttgacccttctgacttttcattacagcatgaacccctctctttgtcgttgccagagggtaacatgggagtagttttgcttgacccttctgacttttcattacagcatgaacccctctctttgtcgttgccagagggtagcatgggagtagttttgcttgacccttctgacttttcattacagcatgaacccctctctttgtcgttgccagagggtagcatgggagtagttttgcttgacccttctgacttttcattaagtagccctgggttgctcaaggaaacagaatgcctggtggcttttaagataattttaaaaaccacccacggctcttggagtcagccagttaagatctttttcttcatcacattctgctgtggggacagctttgcccaagactagtcccagcttttccacgtatgggttgcacagccttggagagtcgtatctcttgaggcctcttacccctcttctgtagaacaggggattaagccaggtgaccagagcccttctagctctaaaattctgtggttctgtgccttttgacagaatggagtttcagtttcctggaggccatctgtggagtttccagggaacctgtaagtgcatgcctcgttcaaagattaccagaggtgccgcacccttcctggtatctttatgggcctgcctcctaaaatattcaaatcaaccctataacctgtgatcacttgtcctccagaaaagccttactgtttttaatgaaatcatttccagcaaactgtattcttgtgaaagcttactgtccatttctgcaggcctgaagggaggcggggctagtgactttcagccccttctctgcaagtctgtcctaaagagtagtgacagacatggcatggtccaccttctagtccttagatacaatctcaagataacaagtttgattgatgcgttggggtcaaattccttttcgtgctccaggtaccgaggagaaggcattgtatatgggacactagaggaggtgtgggactgtgtgaagccagctgttggaggcctacgagtgaagtgggatgagaatgtgaccggttttgaaattatccaaagcatcactgacgtaagtctttccaagcatgttatctctagatagtgtctgggccaggctatagtaaccccctcccatttcttctgg

SEQ ID NO: 1886351 - DNA, 4001 bp, Homo sapiens
cgataaaatgtcaacctaatgtgaaaatttaatgcaaaaatctatacctgaagtattttgagggcactgtagttcatactttaggatttaaataaaacgtcaagattcaccatcaaataagtgaaactttcttccacctgtatcccaaaggacctgcaggggcggggaggcccttcccccaccaaccacaaagccttaccttgaaatagtttcttctttctctttaatctttctaaggagaacctgattctccatatccagtttctgcaggtccttttcaaggtctgaattcaggcagtcaaggttctgttttacagcttctaatgctggtaattatatcgtctgctacctacagaaaatcatctttatcaccaacctcaggacaggaaaacataggagccctaagaagacgttcccctatagtttcactcattctcttatcttctgttgttaataagcttaaccagccttattttgttttccatgataaattgatttctacactattttgcataaagtaaattcctggagtggagccacattttaattttaaatactataaatggaacccactgaaacaaagctttcatgaagcaaaaaaaatattttttctatgaatactttaacacacttgttttaaaatatcttagatgaagtatgcagaatccaagtgatacctctaaagcatttagagacctgcaagggaaaggcttctccttttgctatcttctaacctagtcaggcagggacatgggctgagtagaggccaaaagggtgatgaatctttttcctgccagactgattagctgtttgagacactagagatctttgaaaatcccatcattattctgatgaagaacagagaactgaagccaaagtttcttatccctaggaagcctcctcagacttgaggagataaattctcacacagtggagttcttccttactggattgctggagactcttcccgtggagcttcctctactgaactcttttattattcccatacttacacatcatccagtggattctgtccaacgtcttccatcatagcgtccctaaaatgtgaacacaaacatccgttatggaaaagcccctaacagccaatgcagtaattgccccaggaatgagcaggtaaaaggtagaccttgcgttcaggccacacagagccaagaagaaacgtaagcctcctacactctcatgcttcccatgatcaattgcagtattttttacaagctaaatttcagtaaaccagatcatattttaatttaaaaatctcataaatgaaacccactggagcacaggaatctttttgttttcaaaattttccacactttggctccactttccttttctcacctacatttgtcccgtcacaagttactaagagtactcatgtatgtctattgacaaatatactgagtgtttgtttttaaccaaaccttcagagaaactttaaaaaatagtagaagagttagagggtaccaaaaagttggctgactgatttctattagcttattaccatcctactttcaaaaaatctctattataagtggagttaaccctaaaacaacagcagaaacagcagcatgggcaacaggatacaactactgaaaggaagaaacacatgtcaggctctcagacacagcatatcctaatcatcgcactacacaagttcaggaccaaatccaacctaagaaaagtagagaacaaaatctgtattctcctttcacattgcatcttctcttcttttcccttcctgtttaagctcttttgttttaatctccttttcaatttcttctcctgtctcctccttttttttttttttttcccactctccctggattttacttttctttctatggtctttacacatagcaatgtggtgtgatgatgatgccctctgagctcacccttctcttcccagttgagatttcttctgatcccaacagagatttccaactgaacgtcagaactatcagaaagggcaatgccttactgatagtaagcacgcatagctggacctattatataatctctggctgggccggccagtgtgtcatagtgggttgggtgggtgagggtaagcaggggggcgggtggggcagcaacaatccatctgtggcatcactgtgggcacagtgggagcagagttcagccctttaggacggtctagatctcttctgtagcagcaataagatctatgaaacagatttctaggtacagtttaaatctcttccaaagcagtaatcagttttatagaacatatttcatttttccaaatctctaggcctaatggtacctgtgatcactttcatttctcttccatgatctctgtgtggcatgtgtacaaattgctgtccccaaatccaaagtgtgcatctatattgaatgcatccaggagctataaggtagggatgtcagagagcaagccaggaaggacctgagagaagacttatctaatagctaagcaagccctcattctcacccaatcagattcttggagttgcaaaacaagcctctttattttcccttaactggcaatgccatcattgggaaaaaaggatctgacgtttcaaaggtggaaggagtgtgtggaggtggaacaggaaggaagaggagcgtagggtccagagattccattttactgcctactcctttggaattccctcttcgctttttgaagtcttaaattgccggaacagtagatggcattttacacgtcagtgtcactctactaaccattcctggattcttctctgtgttgactaagaagatgaggcaggatacagaattgaagagatatcaataaaggtgtgtgcttggacttcaagtctgtccatttctgtcctgtatacgcaatttgctcccctatgatcttttctgtttctttctttcttttttttttagctcaaaatgagagaattcttctatgatttaagtctaaccttttccagataaattgtaccaatctcaagttgctgaaaagtccttataagacacactactgtttctcccaaaacatctctcccgtgcagtaatatctcccataatcttatccatccttttcagttagctgaaatgctgcttctgtttcagtaggtagctggtaagacatgagcagagccggaaagggctttcctgccacacacacacacacacacacacacacacacacacacacacacaccacacacacaccaggaatcagaaatgtgaggcgaccatcaggtgatggtcaggctgttgttacagtgcctctctaaaataataattggttgcagccggtgccagggaaaggccgtctcccaataaatacaaacacctgaagttggtgatcagccgctttctggtaagatctcaggagctgggcaagggggctcaagcatgtacattaagaagcaaaatgggagagtttaactggtatatgacttcctaggaacatttgactggtaagggaagaatgcctcgaatgagcacatgaacaactctaggaaacacactgcgcacctcacctcccaagtgctagcaggccactgcgcatgcggacagcctactccaagggaaaaatcggagacaggacgcaagaccccagaaatatggcaacatgtgaaacctcaagtcaaaggtcaaaccgtgcacttgatctctcaagttgcacgcttggccctcttccgagtgtactttactttgtttcatttctgccctaaagctttttgtttctctttcacactccacaactcccctctaaagctttttgtttttaaattttttaaatttttaagagatggagtcgcgctctgtcgcccaggctggagtgcagtggtgagatctcgactcacttcaagctccgcctcccgggttcacgccattctcctgcctcagcctcccgtaaaggtttttaataaacttcccttccttctctaaaacttgccccggcctctccttctgcctatggcttctcggttgaattctttcttctgaggaggcaagaagtgatg

SEQ ID NO: 1886352 - DNA, 4001 bp, Homo sapiens; identical to SEQ ID NO: 1242485

SEQ ID NO: 1886353 - DNA, 4001 bp, Homo sapiens; identical to SEQ ID NO: 1242503

SEQ ID NO: 1886354 - DNA, 4001 bp, Homo sapiens
aatcaggaagagtgggagggaaggacaggtactcagatgaaaagacatccaacaaattcacaacacaattccttttctctagaagccacttaaaagacagaccaggatgggctgggcgcggtggctcatgcctgtaatcccagcactttgggaggccgaggcgggtggatcacaaggtcaggagatagagaccatcctggctaacacaatgaaaccctgtctctactaaaaatacaaaaaaaaaaaaaaaaatttgccatgcgtggtggcaggtgcctgtagtcccagctactcgggaggctgaggcaggagaatggcctgaacccgggaggcggagcttgccgtgagccgagatcacgccactgtactccagcctgggcgacagagcgagactctgtctcaaaaaaaaaaaaaaaaagacagaccaggatgacataaacaggctgggattccaaaatgagccagcctaaatggttctgaattttgtttctgttgtatcaaagggttaatgacactccagcatttcctgtcctcttttgtaggctaaagggaagatctgagatcccagctcctccagatgttgaagggaggccaatgggtgactccctggagctgggcagttgaggggatctagggaatagttacctgcgtttccgccttctcttcctcctcccagcttctaagtcgcctgtgtcaactggggctatgactttcttcggaatttttgtggccataatgggtgagggaaccccattttttaatgccttatagtcagcttttaagagagcctgctgtgaagagttagaggggttggtaactccctctttaacacacttctcagattccttttcctcaacatagtcttcctctgattccatggtcctacaggtactcggctccattctctcagattctgaggggttgcggggtgggaatgaagtgtatatcagacctcagacctccctcaggccctagaaggcctgaaggaatccaccagaacgaccttcatgctgttataagggaaagttgctgccccttcaggacaaaactgtttcactgaggaatgggatgtgtccaggtaggtggaggtgcatgggggtggaagacaccagtgagatgtggattccctgatgacaagccccaatcatccaggttcacactggatcatacaacgcacaggggtgccttcaggagttggacacagatggtatgggccatgaccatggctcttttgttcctaattgggaaagaggatggctgtgagtgctggggggaccttcgctttaaaatacagctgaatcggcccagcacgttgggaggctgaggcgggcagatcacttgaggtctggagttggagagcagcctggctagcacggtgaaatcccgtctctcctaaaaatacaaaaattagctgggtgtgctggtgcgttgcctgtaatcccagctactcgggaggctgagggaggagaatcacttgaacctgggaggtggaggttgcagtgagccgagatcacaccactgcactccagcctgggcgacagagcaagagtctgtctctaaataaataaataaataaataaataaaataaaatacagctgaagaccaaaagccccctacgctggccctttccctctcccaggactcattttctgcacgtgtacacactagggacaggcacccgatggctaagaccctttgggctgtgacggtggagactgcccacccgtggttacgaggagagctgaggggctgctgggtccgcccctagccgcctggggatggactcagctggccgctcatgtcccctcttcccccggctccaggtctccctgggcgtttctgggcgtccggaaccgcctcctcgtttcacaggactggctgtccccacgatcgcgagggggaagctgctcccccgcaggggttcactcctagctcccggtggccgtggctgcggctgccggggcagcgcttcctctagcaagcccgtggccgccgccgttgccatggacacgagggcagttcccattggagaagcgtcctgggggcggggctttcccgcagccacacccacttgggcgcgggccgaggctaccttgggtgggggagacagcgtttgccctttggagctggccggcctcgacgccagattcttccggtgtatcatgggacttgcagccctcccgcttcgaagccagttctcgccgcactcccatctttccctaaaccccgggccaaggaatttggccaagcatataatgaggacaaatagctgtttgcctctcctcaattctccctttttttttttttttttttttttgagacggggtcttgctgtgtcgcccaggctggagtgcagtggaatgcaccatcatagctcactgcagcctggacctcctgggctcaagcaatcctcctgcctcagcctccccagtagctgtgactacaggagcgtgccaccacgccgggctcaattctttagtaactctaagtttagctagcaaagcctatgcattcaagagtgacagccatggtaaggccacgtgcctttcaaggctttgcctctggtggactgagacagctccattaaggaataaccaaaccgccttatcacagtgctccttcactgtcaccttctcttcctgacatccacccactttgatttctgctcaccacctccacccaactcagctcaacttgtcaccctaaaattatactgtgtggctaaatctagagaacacttaaaatgtttccatccttttaaaaagacatggacttttttttttttttttttttttttttttttttttttttttgagacagggtcttgctttgtagcccaggctggattgcagtggtgtgatcgcagctcactgcaactttacttagcttcccaggctcaagcaatcctcccacttcagcgtcccaagtagctggggctacaggtgcgcaccaccatgcctggctaatttttgtattttttgtagagatggggttttgctgtgttggccaggctgatcttgaactcctgacctcaagtgacctgcccaccttggcttcccaaagtggtgggattacaggcatgaaccactgaactcggcctaaaaaaggcatggacattctctaattcatagactgtttttgttgttgttaattgtctataaagataagctatttctttgcccacatattcatgtttcatagttcaggaacataggttagtgataaacttctatgtaatgcaacccaaagaaactgtttataccaaaatcactttgcactttgaaagataccagccttcctcatctcctcaaaatctttcatagaatcagcaaggctaggtggcaggccctgtagtcccagctactaggaagactgaggtgtgaggatctcttgagcatgggagttaagaggatgccgtgagctatgattatgccactgcacttcagcttgggtgacagagtgagaactcgtatttaaaaaaacaaatatctggccgggtgtgatggctcacgcctgtaatcccagcactttgggaggccaaggtgggcggatcaccaggtcacgagatcaagaccatcctggctaacacggtgaaaccccctctctactaaaaataaaaaaataaaaaaataaaaattagctgggcatggtggcgggcgcctgtagtcccagctacttggaaggctgaggcaggagaatggtgtgaatccggagcttgcagtgaacggagatcgcgccactgcactccagcctgggcgacagagggagtctctgtctcaaaaaaaaaaagcaaacaaaaaaatctttgatggaattataatttctctagaaatctgcatatgccttctttcccggttcagccacagcaaatgtatagagtgctacaaccctctatacagggatacagcaatgtgaaaccagaggtcatgcatctgaggtttcatcaaaacactggaagccatggtagttattgtccttgataggtatgtcaacctcaaca

SEQ ID NO: 1886355 - DNA, 4001 bp, Homo sapiens
taaaacttaaagtataataataaataaataaataaataaagatattttgaaatttggtagcatgctcagattgtgggcatggagaggggctcctgaactcctctccagcctcactcgctcttgggcaagcctcatagcaccccttcctcttgctggctcagcacgctgcctttggaagagggacaccttatagcctgggtgctccagcattcctttgtgtgacccggtcagctgcagggaagcatcctcccctcaacttctcctggcctagacagggtacggaatcagaaaagtgatgaagattcagacctgagatacccaccccttaccaacccttacctaaaagggaatattacaagaacatctctttgtgacttggaggggcaaacctggatatttaaaccccgagggtggtaacagctgggccctcaggctggaggcagcccaatgcatgcacttaagcagcaggagcagctcagcgggacggtagagcctacagggctggacctggaccccccactgccatccacacccatggtaaccatggaaacataatcactctgctcctgccagctgtctgggttcagacaaccaggactggcccacttccattaagccaaggcctaaactgatgccaggctggccacagagtggttgcaggaggaactgggattgggtgatttggtcagtccaggcttcccagcacagcttgggaggactaccacaggagcctccacaccttgctgtctgggctgaggtcagacagggctttgtcagccagcacagtggccatcagagccagccaaattgccctgatgccctctgcctgtgagctaacagctattgtgtggcagtagcccttgctgcagcagcaaaagcctctgtgtctcattgaggggactctctggctggtgctctgcctgccctggctgctcagccagccctccaggggtgaggatgtatcaacattcactgggagtgccacccactgtccccatgccactgccatccccagatccactgtagggctgatccccgctaggcagctccaggctgcctcccacagtgggctccttggctctctcgatgttgatgtataaggggtcctggctggcggatagcacagacagctggcccagaatgttctccagttccattcgcagacaagtaaagcttgggcgctgcttggggtcagcactccagcactggtacatgagatcatacaaaaggtcgtctgaaggcctaaggagaccttggcttggatggagtgggagtgtaagaacgtcctccatacactctggaagctgtttcaggtgattcccgccaatgaggtagttgtaaatctcagtgttttcgatgccagcgtatggtgtctgcccacgtgtcatgatctcccacatggtcaccccgaaggcccacacatcactgtgcacagtatacaggttgtcagccaggctctccagggccagccacttgacgggcaatttggaggcacagccctaacaatagtagccccgctgtagatcttccaggagagtccaaagtcagccacacacacggtcatgtcccctgccagcatgcagttccgagcggccaggtctcggtggatgaagttccgagagctcaggtactccatgctgcaggcaatgtccaccatgaaccggatcagggtaaaggggttctccccaagccaggaggtgagcaggaaggcgtgcaggtccccatgcttcatgaagggcaagatgaccacggggatggggtgacagcctttagccctgctccagaggctcagaggcttaccccaacaagtttggccacatgtggatggtcaaactccttcatgcaagctgctttcctgaggaactcttcaatgtcacttgaggcaatgagatcagctttcagcatcttcatagccactttcacaaaggagccatcctcctgcttcagctgggcctaccgcactgaaccaaactctcctttgccctatatccagccagggtgaactgctgctctgggatgagcacatcctccagtttttcctttagttcgctgttgatgcccaagctttccaatgtggcctcgatgcacttgggcctttcttgattgaaggaccgggctgcccagaagtgaatggctggctctccccgggaaatgacactgtcaaagccttgcccaaaccacgtctctttcggtctcttttgaagcaagatgagggccagggcagcagccgtcaccagggccgttagcacaccaaggaccacaggtacccaggatgtgcggctgtgaggagggcccttctggcctgcatggtcatgagaagagaccaccagtggctgactccagggtccacagccaactgcactggagacacacacacgtacgatcaggcccttttggggatcccagcctgtcaaattggccctggtcccctccattgtcagctcatcctgggttccattgtcttaaacccaggacagtttatagggtcccagggggccttccaaagggccctcggggatcacttcttcccactccaagatgaggcctgaatctgtgtggatggcatggaggttttggggagcgctggctggggctagacccttggtctgaaagggcacccagtcagcataaggagagggccccaaagcattggcacagcacaccctgaggctgtagctggtggcaggcaccaggtcccggagcaggcaggtaaaggggggcacaaggaccacaacagccaggacttcccagcctcctggggcctgtgtcacctgaactgtacaggactgcagcagggctcggccatcagcacctggcatccaggccacactagtgttgccgctggaaagctttgtcacggtgatgttgaaggggactgcaggcagtgcttgaaggagaacagtggctatgcgagaagaggccaggcattttaggctgtgaacttcacaggaaaacatgggtgctctgggtcacccctgttacatttaaaacaaatggagagggagcaggtcccccgatcttcgtagttcctctccaccagacaatggtaacaggttcagggggacccacagccttgcaagacagttggaaaggggcattgggtggcactgccagatcttttggctccactgtgaaaagtggcacacctactaccgtgagccacactggctgggagatctgggtttcgcccccatccaccttgcaccagtactggcccgtgtcagagcgctccactgacttcaggctgaggaagccgatccagtgctgctcgctgactgggatgaaccagttctggaccacagacccatccttcacccactggatgtcaggctcctccatcccctccatgctgcagctgagctttaccagctgcccctgggacactgtcagctttgccgggactcccacgagcttcagacctgcctgcagctgcggactctgggagcagcagagaagtcagagccgccagcagcagccccagctgctgtggcggcagcagcaggagccccagccgccccatgctgtgcctcagcaccatctgtggtgatgccataccatgccaggcccggcccacgagtgaggagggaggagggctgaatgtgactttttatatcgacaaatgtgtcaacatttggaagatcttcataactcagtaaaccattattttctaaatgaacaatgcataatattataaagtggtaaaatattcactcaggccaggtgcagtggttcacacctgtaaccccagcactttgagaggccaagataggtggatcgcttgagcctaggagaccagtcctgaaatgatccagattttggaattagcacacaaggattttaaagtaggtactatacctatgcgcaaggatgtaaagtaaaatatctgtaatggtcaaacagataagaaattagagaaataaaaattttaaaaacaactaaatgcaaatctcaaactaaaaaatataaagcctagaataagaaagtccctggataggtttaaa

SEQ ID NO: 1886356 - DNA, 4001 bp, Homo sapiens
gatgaggatttgaaccacctaagctgcagaaacccactggatggtttcctaggttccaagttggcattatctttcagaacgatcttctagaagagatcacataacactgttacaaaggatctggagaaagggaccctggcttcatcactctggctctccagtcatgctttacattttcacttcttacactctctttcataggaagtcaatttacaggcctccatcaagcccttagagacctttttgtactatccatgacaagttcttgatgttatgtctgcacttctgacaaattcttagcagttaacttacaaggcagttaaggtttttgttcaagcacaatatagctagaatagggtcatacattcaataaaacaaatatttaccaagcatttattgagtagaagataaaaagcacaaagcataattataaactattctcccctgccatcataaaaaaaaaattaaaaagccttacagaatacagcataacatgaccaaagcaaaaatagtgaggactaaagaggggaggaaggggaaatatcagcatgaactgaatatgacccagaagagccttgatggtcagacatgtaaagacaaattgggtagggttagggggtggctgtcaggggcacattctacaggggaaaaatagatgatacagaagcctgaaaggaaagcgggcagagcacctggacaggactcttacctgctgcatccagggtacaatgtgcctttccagaacacagcagcgacccgggatagagggatcgctcaaacagcaccagaggctgcattccaacttttcctccatcaacaagcccgttttcattgttagtttctccttaaacacgattggctgaacatgcgggaacaaggaaaacctgactgaagaacgaggcatttaagcttaagggccttggatctgggcgcggtggctcaggcctgtaatcccagaactctgggaggcagagatgggtcatttgaggtcaggagttcgagaccagcctggccaacatggtgaaaccctgtctctactaaacaacacaaaagttagccaggcgtggtgtcaggagcctgtaatcctagctactcgggaggctgaggcaggagaatcgcttgaacccatggactgtcaagagacggaggctgcagtaagccgagatcaccccactgcactccagcctgggcgacagagtgagactccatctcaacaagtgcctgccaccatgcccggctaatttttgtatttttagtagagacagggttttaccatgttggccgggctagtctagaactcctgacctcaggcgatccagctgcgtcagcctcccaaagtactgggattacaggaacgagcactgcgcccggccaaaaccccgaaaatcttgaaggcctttccccttccccgcccgggctcaaacaacagccggagacgccctgccacgccccgtcgcggtcccggggagcaggctggctgactgagggcgaccatgggccccgaaagggctgcgggcgacgcgggctcccacctcggggcgcggtgactggggcgagaggtgccggcagcccccaagccagccccgcagcaaggagccagagagacgcgccctccccctcctcccacccaagcctcccgcagtcccggcgatcggggccaggccagtcgcgggagaaaggtgcgcgctcacccggcccggggaaccggggcctctcctgggcaggttcccctttgtcccgggactccgggctcttcctctccgccctcgccctgccgtgtgaagccgccgctgggcgcctcaccgtgatgttgcagtggagcctgagctgccgcggcggctcctggttcttgtggaaaatagaggacaacaacttcagcttggccttgaaccctgacacggacattttactctcacctctggcgggaggggcgcggaaggtgagccggtcgggagccgctgtcatggccgcgaccacccgcgggacctctcggcggcgctctcgcggctccgcctctccccgctgcctcaactctagtcggagtagggctggaaaatggcaaggggcaccgaggcctctgcggggagctgtgtggcggcctgggcggctgctccccttgtaacagactccaccgacaggaggcgctcctcctgtcaagccacagcttaaaaggacaacagcaccaccgcccccgctaccgcctgggaaagggctgcccctaccccgctcccgtccctctcgtccctcacccctcacccctcacctctcacccccgcgcgcccggtgcgcacccgtttcggcgggtgcacgagtccagagcatgtgcgcgcttccggctgccccctcctggctttgacccagcactgctggacccatctagtccgttcctcacactcgcggactggaagctccaggctgcacaaccaccaactggtgtgtgtgtatttaggggcggggggaggtacaaaaccaccaactcgtgtgtgtgtgtgtgtgtgtgtgtgtgtgtgtgtgtgtgtgtctcccaagggaacagcactgctgagttcaggctatcagctcatggactgtcagcaaaatacagtcacaagaaggctatgtgctgttttgtcttttgcagtgatgtcatgttgctcatgttttatgtttttcagagttcattagtttctttttgttctcagtaatatccagctcaatagattgtgtaagtagaatacccccaaactgaaagtcacctacataaaatatagtgaaaaatatgtcacccacttaaactatagttgaaaatatgtactcattagttttgtgtagccaacactggataatgggtaaggaagggcacaggatcccagggctagactgcctgggttcaagttccgatttagctgcttgctggctgtgaaatgcttgacagctttaagcctcagtttctttttttttttttaacttaatcccaaatgtgatagtaagtctcagtttcttgatctgaaaaacagaaattattcaatgagagtccatgtgaaaactttaaagttttaaagccactttctggctcaggaaagtcctcagctttagctgttaaagttttaaaagccactttaaagttttaaagccactgcctggctcaggaaagccctcagctttagccattattagctatgattattattgtgctggctacacatgcattaatgaggcaggaaaatgctcaaggataacaaccaagtatccaaattatctcatcagaccgaaacagatgcatatgtttgcatgctcatgttttagctcagagccatttgtctaaaagactcttgaactcaggggtccaggcagtatcaactttactttgcagtgaagccatcacgtttgttaatcaatgaaaacgacataatgctctttttttttttttttttttttagcaccaaccatgtgcctaaagctaactgtgtcaaaaagagcatgcttcgaggggctggagtgagcaattcaacttgtggagaaataagaaataatagtgttgagacaagaaacataaaaccgcagggtaaggtaggaatcactgaaggtcaggcaaaggaactggcatccagtaatgagtcaggctttgacggcctctggccctacagatggctctttggagaggaaaaaattaagccaggcctgaggccacagatcctaagggactgctggcagctctaggctgtctatggaagagaagcagagggtggcacctggttgaaagagggagctggggggcatggcttgagcccgcatttacagatagagtcccctgattcctgcaactggggaagaagagcatgcctggatcaggggacctcaaatcagaactcttcccacccacaccccttcttttcagggcatctttcactgcaaacaacagataaactagttagaaagctcagcagattctcaggatggtgcctagcgggcagggcctagctaccctttgacagtgactgagggtgatgccacaggcccgt

SEQ ID NO: 1886357 - DNA, 4001 bp, Homo sapiens
caatagtacctacagtataacatgccatcaccgcccacagaaggaaagcaactggtgccctcgtcacgttatgttgttagtacttgcttacatgatgtccctccctgacaatcccttccaacctctgtcagcctccttccccacaatcacacacacacacaaaaccacactgccaggaagggaagccattgagtgagtattgtgaatcctacaagtggctctgtagtttaaaagggcaatgcctgtgcctgaagaaaatttgtctttagcttcatcaggtgaagaaaattggttttataacacaaggcccaccaaaccagaaaagcccaggaacgcttctccacaggactcacttagcacgagaaatcactcagagcaaaatgacgcacacagtatttgtcaaatttttctttttcatttagcagaaggtaaggtaaaggactacaactgaagttaataaatgacactctagccattttgatcatttgtcactataaatgatagacatttaagctagttccatctggggaagtgaaacagaatcatgttcatataataagccagacgaaccaaattcagtggaatacgtgcacccaaaactggaccagacttgtacttaatgcagcctgcaaatccccaagagtccacgacagaatacaagaacagtaacactggtttatctcaactcatcttagctccctcacaaacttgccaataatgacctttcaagaactgcaccgttggtcctcatctgggcaatcccgtggcttagaaaaactgaataaagtgcttcttcgaaaaataaaacaatgcggggaggggggagtagtaacaaaaaaaaaggcacactggtttttactgtactgaagcaataaattctccaactaacttcattaatgagtatcagcaaagaatgaacaccaaaataccgctcaatccaactttcatcgtgaattcttgaattcacagtaggatcattaaatgtgacggtatcactctgctataaaaactatttccaaaacaaaacaaacctatctaccccctttcttgatttaaaaaaaaaaaaaaaaaaagaaggaaaatttgagggtttttgattttttcaacttcacataccggtttgcctttgcaaaaaaaaaaaaattgtttagtctcaaagtatagctgcaaggtggaccggctgcacgggtcccagagggccgctcgcctccgacggtcgcagtttcagccgggccgcgcccgcgagaaacagcggagaggccccagcaggcgggcgccgccggacaggtttaccgtccgcgtcggccccggggaaccgctccctcgcgcccgcagcacttgttcgcggcgcggactccacaccgcggccgcccgccccaggggaggagtgagtccgccccagcggcgccaacccggggacccggggcaagggttcggggccatccgccgccgggcgcgccccccatccggaaagcggcgacggcccccaagttgggctgcggagtgggaggcgcgccgagccccaagcagacaatgcgggagaagggtgatgcgcagggaggaggggtccgcaaagctgaggtccccgcgccgcccggctacccatccgtgccgcccgcccctgaagccccgcgcagcccccgaccctcctctggggcccgccccaccgagcggccgcaggggacgggccgcgctccgcaccccgacccctcctcaaatcacaaaacttcccccaactccgccaactaagttgcgctctcaccgtgcggctcccggggctcccccgcgggccgagccgagacagctcctcaccttcgccgcggagaaagacaataggctgcctctcccccggcggcggcagcagcggctgcggctaaagcggcggcaaccgaggcgagcaatgggcacggcggtctcggccgagccgagggccttcaccgctgctgctccggctccgcgacagctctgcacgtagccccagccaccccgcgcaccggctacaagccgcccgggggtggccggggcacgcaagagggcagtaacgtctgcgagtcctcccgtgagtacacgcggagcaagggctgcgagctgggattgcacggcagagctgcccatcccgctccacgagaccaatagtaaggcacctgggcggggcgctcaggttgctaagggaggctgaggttgaccgccggggctgctctgtggcaaagtgatcacagcagggtggctggcagagactgctctgggaaatgcccactcacggtctcctctccgccctgtttctagaaactgccctttctctgtgtgctcgtggttacctgagctgtagcatttaaccacacatcgtgaaatgatttactcctctatttcccccacttcaactcaggaagtggggtttagtcttgtgtgtccacagcctaggacagtctaaggtattaggtattaaatataggtattaaacaagtgttggatggatgcacggcgctatggcggaatcacaattgtgacagtgcattccgtgaacttttggctactcgatcaccacagtcgttccgtgttcaagctgcaaaggacctcagaaatcatcggattgctttgagaaacaaaatgtggtccgtgtaccaacggcggccgaggagaatatattagttggtacacggagaaacttcttttttcaaatagttaagtgttttagtgctcattaggagggaaatgcctatcacgtcaaatcattgtttcattaatgttacttcttaggtcaaataaaaagtggcaaaaaacaagtgtatttcaagaaaagtgttaagtgaaacttgagacactttatatgcagttcaagaatgtaaaatactagttgacagtgcttgaagtaagaacagttggttaggtaggaggagaagattattggctgggaaggaggaggagggaaccctctgtggtgctgattctgtattttgacctgggtgatggataacaaaagtatgtacatcaataaaaaatacatccagtgcactttagattagtgcactttacacattttatacatgtatttttaatgtcaattttttaaaaatctggtatggaatatacccccacaacccccccaccccccaaaaaaaatgcaaagatgcaaatgactgccatttgggaaacactgatccaggcaggctcactagcagtgaccaaacacctgagaaagggtattgtgaatacctgatgtatgtgccaggaacttccatggttgaatagctccaaatctcagaaatgctcctaacctcgtgttgagctctggtgcatagatatattttcttttctttctttccttttttttttttttttttgaggcagagtttcactcttgttgcccaggctggagtgcaatggcacgatatcagctcactgcaacctccgcctcccaggttcaagcgattctcctgcctcagctgcccgagtagctggaattacaggcacatgccaccaattccagctaattttttgtatttttagtagagacagggtttcactatgttggccaggctggtctcgaactcctgacttcaggtgatccacccacctcggcctcccaaagtgctgggattacaggcttacaggtgtgagcctcagcacccaacccagaatggcttaaaaaaaaaaaaaaaaaaaaaaaggccaagcatgcccagttcttcatgtgaaattatttctgtatcacctcatcatgctgctcaccctcttccactgttctctaatctgtccttgttgatatttaaaagctggcacaaggccgggcgcagtggctcacacctgtaatcccagcactttgggaggctgaggagggtagatcactagagcccaggagttcgagaccagcctgggctacaggtgaaaccccatctgtactaaaagatacaaaaattagccaaacgtggtagcccaaatcccagctacttgggagaccgatgtagaaggatcgcttgagcccaggaggagaggttgcatga

SEQ ID NO: 1886358 - DNA, 4001 bp, Homo sapiens
taaaattatacttttagaagcataaaacaaagttaacaattgtcatctattggtgatagaatagccatgcccctcttaaagccaaaaggctagcagatatcaagacctactctaaagttagagaaatcaagacgtgtgacattggcacaatgacagaaaaatacacccatggcacagaataagagtcaaaaattgacccagacatacatagtcaccggatttatgacaaagctgccactgaaattcagtgggaacaaaatttttaaatagtgctggatcaattgtacacccatatggaagagatgaatcttgatgtctaactcctatcatatacaaagattaatgtgaaattaatcatagacctaaatgtgaaagataaaataacacagaagaaaacctaggatagtatcttcataacgagggcaggcaaagatttcttacataggacacaaaaggcactaaccatcacaacaaaatttcaggccgggcgtggtggctaccgcttgtaatcccagcactttgggatcacctgaggtcaggagttcgagcagcctggccaacgtggtgaaaccccgtctctactaaaaatacaaaaattagccgggcgtggtggcaggtacctgtagccccagctcctcaagaggctgaggcatgagaatctcttgaacccgggaggcggagggtgcagtgagccgagatcggccactactgcactccaatctgggcgacagagcaagactccgtctcaaaaaaaaaaaaaagttttaaaatgaaattaaattatctaataccattaagagtaaaaaaaaaatcatgaactgggaaagtattcacaatatataattttgataaattatggagctcaggtgcaagtaacttagtaggcaggagaggaaggagtctaaagaagtctagttaggaaggattactgaaagagggggtatatctaaaaatgggtaggatgggaaagggagactttgggaacagccatgggttcctaatgcgcccacaacatacatgggagttatcctgaagataaactccctgaagacagtgaaagccatttcaaaactccccatataacttatgagaacagaggggtgatctgcctttaatgttaggccttctgagatcctgcgatctgttcgctctcctcagtaacattaccctgctcaattgctgccttaatcccaggtcgcacattggaatgtgggaattcagcgtttacatttacccacacaggatcagccttcagctgctacgatcaacttcagtattttcatataatcacttttttctttccttagttcttgaattattaattccttgagaagagtccaatcagaggtagtctttcttcagtattttcggtaatcctaatttctgtgcaaaaaaatttctgttccattttaaccgtgcagaactttctgttatctaaaacacagtttctctatgagagttcagtgaaaattccccttcccaaactgattctatgaatgactgttagataagcttcaccactgcatgtagagggtgtaccaggaacccaagttagtagctctcctcaaagacccaacttttggagggggtcatcgtctggttcctggtatgcctccacaggtaggtccgcctcaggaagtcagcggcgaggagcacagaagaggctgccttcaccaacggacagcagttttcatcgtgagggccgtcggcaaccgcttggatgtgtctaaaggggccgtttgggaaccggcccttctggagggaagggtcggagtgggaggggatccgggatccgccttacggccgagtgtccagcagcgcgttccaacctggcagaaccgacgtacttcatatgctcctcaggggagcgcgggaatcaccaggctgaagaatgactggaaatgggaccctctccaaccaaagcacccagacattccggcgccggacatttcaaagagcgcggaagccacgccttcccccagaaccggaagctttgcaactagcgcctcttgtagactggctgtttataagggggcggggggccacagcgggaactgcaactcccagaatgcagcgcggaatttccggtttccggcgagagggccagagtgagtgtttacaccggcggcagtgcggccgggttccttccgcgggacgggtgagggcgctggggccctgggcagcgcgggctcgatgtgtgtcagccaagtagctggtcccactggagcggtgaggtcgccaccggatagtgttcctgccccattactagcgatctgtgaccttgggccagtgattttactgagtcttgcttccctcatctttaaaatgtggctaatgcctgccttagggaaccgttgtgaggattaagtgagacatggtatataaaacgacctccttctggcataaacttgaggtggaagataccttgaggatgcttgaaggtctgctaggcagcttcacagccttttctttcctcttctctatcagaggtctctttggaagcaataatgatgactataacaagaacttatcttgctttgcaagattcttccgccgtcagagtttctgatttattttctggggttccatgtatgccaggtatggggacaaggatgaagaaaactttagtcttttgttttcaagggcattcaagaattggggtggaggagggggcaagcagatatttgtagcccttttgttctgaggggatgtgggaacaacagaggaaagagaggggactgaggttattgaatctgtgttggtttcggtaggagtttgctaaaaggccaaaaagggaagagaaattacatgcagagttagatgagcagaggtgtaaaataggggagagctttgttatgagtgtgtacttacatgttgtggaggtcctttgcaggggtagggctctgttggggaatgaggctggcagggagttttgtaagccaggcgatgaagtttagacttaatttatatagatggtttagaggtattggaagaggtctttttctggggggccggggtggggcagggagggacggagtctctgtcgcccaagctggagtgcagtggcgctatctcggctcactgcaacctccacctcccgggttcaagcaattctcctgcctcagcctctcaagtagctgggattacaagcgcctgccaccacgccctgcaaattttttctattatagtagagatgtagtttcaccatgttggccaggctggtttcaaacacctgatcttaagtgatccgtcctccgcggcctcccaaagtgacaggattacaggtgtgagccaccgcgtctggcttttttttttttttttttttttttttttgcgacagagtctctctctgtcacccaggctggagtgcagtgacgtgatcttggctcactgcaacctcagccttccgagtaggtggcactacaggtgcgcactaccacgcccagctaatttttgtatttttagtagtgacgggtttcaccatgttggccaggctggtcttgaactcttgagcttaggcaatccgcccgcctaggcctctcaaagtgctagggttacaggcatgagccaccgcgcccagcccgacattggaagagttctaagcagagaagtgacttggtcagatctgtgttttagaatgatgggttgtggccaggcgcagtcgctcatgcctgtaatcccagcactttgggaggccgaggcaggtggatcacgaggtcaggagatcgagaccatcctggctaacacagtgaaaccccgtctctactaaaagtacaaaaaaaaaaaaaaattagcctggcgtcgtggcgggtgcctgtagtccctgctacctgggaggctgaggcaggaaggcaggagaatggcgtgaacctgggaggtggagcttgcagtgagccgagatcgcgccgctgcactccagcctgggcaacagagcgagactccgtctcaaaaaaaaaaaaaaaaatgatgggtgttgttaggtggcagcatagatatttgat

SEQ ID NO: 1886359 - DNA, 4001 bp, Homo sapiens; identical to SEQ ID NO: 1242518

SEQ ID NO: 1886360 - DNA, 4001 bp, Homo sapiens
gcactttgggaggccaaggtggccagatcatgaggtcaggagatcgagaccatcctggctaacacggtgaaaccccgtctctactaaaaaatacaaaaaattgttggggcgtggtggctggcgcctgtagtcccagctactcaggaggctgaggcaggagaatggcgtgaacctgggaggcggagcttgcagtgagcccagattgcaccactgcactccagcctgggtaacagagcgagactccctctcaaaaaaaaaaaataaaaaataaataaataaataaataaataaataaataaataaaaaataaaaaaactacaaatgataagcaacatagaatagatatgtaaggaaaggctttaaaaaggaaaataagatcaatataaactaagaaaaaattattacagaacaaagagattctagggagaagacaaaagagtatcaaaatcacttcgtaaagatacttgtgaatatattacatgtataaaacaaaacagagggcgggcgcggtggctgacgcctgtaatcccagcactttgggaggctgaggcgggtggatcatgaggtcaggagatcaagaccatgctggctaacatggtgaaaccgcgtctctactaaaaaatccgtctctactaaaaacacaaaagttagccaggcgtggtggcgggcgcctgtaatctcagctactcgggaggctgacgcaggagaatcgctttaaccagtggactgtcaagagaggtaggctgcagtaagccgagatcgcgccactgcactccagcctgggcgacagagtgagtgagactctgtctcaacaaaaagaaaaaaagaaagaaaacttttttttgagagagagagagagagaagtctcgctcttctcccccaggtttgagtgcaatggctcgatctcagctcactgtaacctccgcctcccgggttcaaacgattctcctgcctctgcctcccaaatagctgggattaagtcgcctgccaacacgaccggctaatttttctattttttagtagagatgggtttcaccatgttggccaggctggtctccaactcatgacctcaagtgatcagcccggttggcctcccaaaatgctgggattacaggcgtgagccactacgcccggccaaaaaaccgaaaatcttaaaggcctttccccttccccgcctgggctccaacaacgcgggagccgccctgccccgccctgtcgcggtccctagagcaggtgggctgactgagggcgaccatgggtcccaagagagctcccgcagccgcgggctcccacctcgaggcgcagcgacaggggccgagaggggccagcagcccccaagccagccccgcgctaggagttggagagacgcgccctccgccttctcccacccaagcctctgccttgccgggcgggccagttgcgggagaaaggggcggggaaccgcggcctctctggggcagcttcccctttctcctgggactctgggcacccgctttccgccctcgccctgccccgccaggccgccacccggcgactcaccttaatgttgcggtggggcgtgagccgcggctgtggctcctggttctcctggaagatagaggccagtaacttcggtttgcccttgaacccggacatggacatcttcccctcacctccggcgggaggggcgcggaaaaggagccagtcccgagccgctgtcatggccgcgaccaccaggcggggcccccggccgagctctcgcggctccacctctccccgccgccgtgaccctcgtgggagcgcggctggaaaatggcaaggggcaccgaggacttggcgggagctatgtggcggcctgcggggctgctccctttataaccgactccaccgacaggaggcgcggctcccgtcaagccgcagtttaaaagggcaacagcaccactgcccccgctaccgcctgggaaagggctgcccctaccccgccccggtcctcgtcgcccctcacctcttacccctcacccctcacccctcaacccggcgcgccccgcgcgcacccggcgtgcccgcgctaccggctgccccctcctctcttgacccagcacctttctgcccgaccgatctggtcccttcctcacactcgcgactggacggcacaacaaccaactctgtgtgtgtgtgtgtgtgtgtgtgtgtgtgtgtgtgtgtgtctatgtgtgtgtgtgtgtgtccctgtcccaagggggcgtggctcacgcctgtaatcccaccactttgggaggctaaggcgggtggatcaggaggtcaggagataagactatcctggctaacacggtaaaaccccgtctctacggaaaaaatacaaaaaattagcagggcgtggtggcggacgcctgtagtcccagctacttgggaggctgagggaggagaatggcgtgaaaccgggaggcagagcttgcagtgagctgagagcgcgccactgcactccagcctgggcgacagaccaagactccatataaaaaaagaaaagaaaaaaaacctcaaaggatcactagtggtcagcaactgtgtgcaaataaataggaaaacctaccaaaaatggataaatttccagacacatctaacctaccaagattgaaccatgatgaaacccaaaacctgaacaaaccaataacaaataatgggatcaaagtggtaataaaaagtctcccagcaaagaaaagcctgggacctgatgattcactgctgaattctagcaaacatttaaagaagaactaataccaaccttacccaaacgattccaaaaatagagaaggagggaatacttgcaaactcattctacagggctagcattaccctgataacaaaatcaaacacacagaccaaaaaagaaaactacaggccaatatcactgatgaatattgatgcaaaaatcctcaataaaatattagctaactgaattccacaacacattaaagttggggtgcagtgtcccaggttcactcaacccttcccgttttcctctctgtgtgtgtctactttgccgtgttccctggtggcggcggcggtggcagtgttggtgcatgggcctcccaggacaaggggaaagtgagtatgcccctttcttgccccctgccaggcgtctgcagcctggcacaagctctggccaggtctccaacaggggacctggagatgtttttttccagtttctggattggtaacttgaggcagattctgggcactagagtcagaactaagaggagactgaatcaggggagtctggggtcctgagaggcagatacctgaaaccgtctagagcgtgtggggagctcggtgcatgttcacgccagttgtttttctctgtgcctcaatgttccaggtacccttggaggtgctgagatcctagggattcctggagcctggctgcatggcctggccaccctgatgccactgtgttctccatgacaggacagcaaggctgaggagaatggctccgacagcttcatgcactccatggacccatagctggagcggcaaatggaaaccacccagaaccttgtggactcctacatggccattgtcaacaagaccgtgtgggacctcatggttggtgtcatgcccaagaccatcatgcacgtcatgatcaacaacgtgcatgcaccgcctcataggggcagggggctcctgtagcactggggatgcaggtggccatgttggcctgggggagatgctgaccagccctatgggaccaaggtccagggagggaggcacagtccagaccagagctgtctcatagaaatataacgtgggactggggacagtggcccatgtctgtaatcccagcactttgggaggccaaggcaagaggatagcttgagcccaggagttcgagaccagcttgggcaacatagtgagacctgatctctacactaaaattttaaaaatagctgggcttggtggtggcacgtacctatagtcctagctactcgacaggctgacattggaggatcactttgagcccaaga

SEQ ID NO: 1886361 - DNA, 4001 bp, Homo sapiens
gggcacggtggctcacgcctgtaatcccagcactttgggaggccaaggtggccagatcatgaggtcaggagatcgagaccatcctggctaacacggtgaaaccccgtctctactaaaaaatacaaaaaattgttggggcgtggtggctggcgcctgtagtcccagctactcaggaggctgaggcaggagaatggcgtgaacctgggaggcggagcttgcagtgagcccagattgcaccactgcactccagcctgggtaacagagcgagactccctctcaaaataaataaataaataaataaataaaaaataaaaaaactacaaatgataagcaacatagaatagatatgtaaggaaaggctttaaaaaggaaaataagatcaatataaactaagaaagaattattacagaacaaagagattctagggagaagacaaaagagtatcaaaatcacttcgtaaagatacttgtgaatatattacatgtataaaacaaaacagaggccgggcgcggtggctgacgcctgtaatcccagcactttgggaggctgaggcgggtggatcatgaggtcaggagatcaagaccatgctggctaacatggtgaaaccgcgtctctactaaaaaatccgtctctactaaaaacacaaaagttagacaggcgtggtggcgggcgcctgtaatctcagctactcgggaggctgacgcaggagaatcgctttaaccagtggactgtcaagagaggtaggctgcagtaagccgagatcgcgccactgcactccagcctgggcgacagagtgagtgagactctgtctcaacaaaaagaaaaaaagaaagaaaacttttttttgagagagagagagagaagtctcgctcttctcccccaggtttgagtgcaatggctcgatctcagctcactgtaacctccgcctcccgggttcaaacgattctcctgcctctgcctcccaaatagctgggattaagtcgcctgccaacacgaccggctaatttttctattttttagtagagacgggtttcaccatgttggccaggctggtctccaactcctgacctcaagtgatcagcccggttggcctcccaaaatgctgggattacaggcgtgagccactacgcccggccaaaaaaccgaaaatcttaaaggcctttccccttccccgcctgggctccaacaacgcgggagccgccctgccccgccctgtcgcggtccctagagcaggtgggctgactgagggcgaccatgggtcccaagagggctcccgcagccgcgggctcccacctcgaggcgcagcgacaggggccgagaggggccagcagcccccaagccagccccgcgctaggagttggagagacgcgccctccgccttctcccacccaagcctctgccttgccgggcgggccagttgcgggagaaaggggcggggaaccgcggcctctctggggcagcttcccctttctcctgggactctgggcacccgctttccgccctcgccctgccccgccaggccgccacccggcgactcaccttaatgttgcggtggggcgtgagccgcggctgtggctcctggttctcctggaagatagaagccagtaacttcggtttggccttgaacccggacatggacatcttcccctcacctccggcgggaggggcgcggaaaaggagcctgtcccgagccgctgtcatggccgcgaccaccaggcggggcccccggccgagctctcgcggctccacctctccccgccgccgtgaccctcgtgggagcgcggctggaaaatggcaaggggcaccgaggacttggcgggagctatgtggcggcctgcggggctgctccctttataaccgactccaccgacaggaggcgcggctcccgtcaagccgcagtttaaaagggcaacagcaccactgcccccgctaccgcctgggaaagggctgcccctaccccgccccggtcctcgtcgcccctcacctcttacccctcacccctcacccctcaacccggcgcgccccgcgcgcacccggcgtgcccgcgctaccggctgccccctcctctcttgacccagcacctttctgcccgaccgatctggtcccttcctcacactcgcgactgggcggcacaaccaccaactctgtgtgtgtgtgtgtgtgtgtgtgtgtgtgtgtgtgtgtgtgtgtgtgtgtctatgtgtgtgtgtgtgtgtccctgtcccaagggggcgtggctcacgcctgtaatcccaccactttgggaggctaaggcgggtggatcaggaggtcaggagataagactatcctggctaacacggtaaaaccccgtctctacggaaaaaatacaaaaaattagcagggcgtggtggcggacgcctgtagtcccagctacttgggaggctgagggaggagaatggcgtgaaaccgggaggcagagcttgcagtgagctgagagcgcgccactgcactccagcctgggcgacagaccaagactccatataaaaaaaaaaaaagaaaaaaaacctcaaaggatcactagtggtcagcaactatgtgcaaataaataggaaaacctaccaaaaatggataaatttccagacacatctaacctaccaagattgaaccatgatgaaacccaaaacctgaacaaaccaataacaaataatgggatcaaagtggtaataaaaagtctcccagcaaagaaaagcctgggacctgatgattcactgctgaattctagcaaacatttaaagaagaactaataccaaccttacccaaacgattccaaaaatagagaaggagggaatacttgcaaactcattctacagggctagcattaccctgataacaaaatcaaacacacagaccaaaaaagaaaactacaggccaatatcactgatgaatattgatgcaaaaatcctcaataaaatattagctaactgaattccacaacacattaaagttggggtgcagtgtcccaggttcactcaacccttcccgttttcctctctgtgtgtgtctactttgccgtgttccctggtggcggcggcggtggcagtgttggtgcatgggcctcccaggacaaggggaaagtgagtatgcccctttcttgccccctgccaggcgtctgcagcctggcacaagctctggccaggtctccaacaggggacctggagatgtttttttccagtttctggattggtaacttgaggcagattctgggcactagagtcagaactaagaggagactgaatcaggggagtctggggtcctgagaggcagatacctgaaaccgtctagagcgtgtggggagctcggtgcatgttcacgccagttgtttttctctgtgcctcaatgttccaggtacccttggaggtgctgagatcctagggattcctggagcctggctgcatggcctggccaccctgatgccactgtgttctccatgacaggacagcaaggctgaggagaatggctccgacagcttcatgcactccatggacccatagctggagcggcaaatggaaaccacccagaaccttgtggactcctacatggccattgtcaacaagaccgtgtgggacctcatggttggtgtcatgcccaagaccatcatgcacgtcatgatcaacaacgtgcatgcaccgcctcataggggcagggggctcctgtagcactggggatgcaggtggccatgttggcctgggggagatgctgaccagccctatgggaccaaggtccagggagggaggcacagtccagaccagagctgtctcatagaaatataacgtgggactggggacagtggcccatgtctgtaatcccagcactttgggaggccaaggcaagaggatagcttgagcccaggagttcgagaccagcttgggcaacatagtgagacctgatctctacactaaaattttaaaaatagctgggcttggtggtggcacgtacctatagtcctagctactcgacaggctgacattggaggatcactt

SEQ ID NO: 1886362 - DNA, 4001 bp, Homo sapiens
ggtggctcacgcctgtaatcccagcactttgggaggccaaggtggccagatcatgaggtcaggagatcgagaccatcctggctaacacggtgaaaccccgtctctactaaaaaatacaaaaaattgttggggcgtggtggctggcgcctgtagtcccagctactcaggaggctgaggcaggagaatggcgtgaacctgggaggcggagcttgcagtgagcccagattgcaccactgcactccagcctgggtaacagagcgagactccctctcaaaataaataaataaataaataaataaataaataataaaaaaaactacaaatgataagcaacatagaatagatatgtaaggaaaggctttaaaaaggaaaataagatcaatataaactaagaaaaaattattacagaacaaagagattctaggcagaagacaaaagagtatcaaaatcacttcgtaaagatacttgtgaatatattacatgtataaaacaaaacagaggccgggcgcggtggctgacgcctgtaatcccagcactttgggaggctgaggcgggtggatcatgaggtcaggagatcaagaccatgctggctaacatggtgaaaccgcgtctctactaaaaaatccgtctctactaaaaacacaaaagttagccaggcgtggtggcgggcgcctgtaatctcagctactcgggaggctgacgcaggagaatcgctttaaccagtggactgtcaagagaggtaggctgcagtaagccgagatcgcgccactgcactccagcctgggcgacagagtgagtgagactctgtctcaacaaaaagaaaaaaagaaagaaaacttttttttgagagagagagagagaagtctcgctcttctcccccaggtttgagtgcaatggctcgatctcagctcactgtaacctccgcctcccgggttcaaacgattctcctgcctctgcctcccaaatagctgggattaagtcgcctgccaacacgaccggctaatttttctattttttagtagagacgggtttcaccatgttggccaggctggtctccaactcctgacctcaagtgatcagcccggttggcctcccaaaatgctgggattacaggcgtgagccactacgcccggccaaaaaaccgaaaatcttaaaggcctttccccttccccgcctgggctccaacaacgcgggagccgccctgccccgccctgtcgcggtccctagagcaggtgggctgactgagggcgaccatgggtcccaagagggctcccgcagccgcgggctcccacctcgaggcgcagcgacaggggccgagaggggccagcagcccccaagccagccccgcgctaggagttggagagacgcgccctccgccttctcccacccaagcctctgccttgccgggcgggccagttgcgggagaaaggggcggggaaccgcggcctctctggggcagcttcccctttctcctgggactctgggcacccgctttccgccctcgccctgccccgccaggccgccacccggcgactcaccttaatgttgcggtggggcgtgagccgcggctgtggctcctggttctcctggaagatagaggccagtaacttcggtttggccttgaacccggacatggacatcttcccctcacctccggcgggaggggcgcggaaaaggagcctgtcccgagccgctgtcatggccgcgaccaccaggcggggcccccggccgagctctcgcggctccacctctccccgccgccgtgaccctcgtgggagcgcggctggaaaatggcaaggggcaccgaggacttggcgggagctatgtggcggcctgcggggctgctccctttataaccgactccaccgacaggaggcgcggctcccgtcaagccgcagtttaaaagggcaacagcaccactgcccccgctaccgcctgggaaagggctgcccctaccccgccccggtcctcgtcgcccctcacctcttacccctcacccctcacccctcaacccggcgcgccccgcgcgcacccggcgtgcccgcgctaccggctgccccctcctctcttgacccagcacctttctgcccgaccgatctggtcccttcctcacactcgcgactgggcggcacaaccaccaactctgtgtgtgtgtgtgtgtgtgtgtgtgtgtgtgtgtgtgtgtctatgtgtgtgtgtgtgtgtccctgtcccaagggggcgtggctcacgcctgtaatcccaccactttgggaggctaaggcgggtggatcaggaggtcaggagataagactatcctggctaacacggtaaaaccccgtctctacgaaaaaaatacaaaaaattagcagggcgtggtggcggacgcctgtagtcccagctacttgggaggctgagggaggagaatggcgtgaaaccgggaggcagagcttgcagtgagctgagagcgcgccactgcactccagcctgggcgacagaccaagactccatataaaaaaaaaaaaagaaaaaaaacctcaaaggatcactagtggtcagcaactatgtgcaaataaataggaaaacctaccaaaaatggataaatttccagacacatctaacctaccaagattgaaccatgatgaaacccaaaacctgaacaaaccaataacaaataatgggatcaaagtggtaataaaaagtctcccagcaaagaaaagcctgggacctgatgattcactgctgaattctagcaaacatttaaagaagaactaataccaaccttacccaaacgattccaaaaatagagaaggagggaatacttgcaaactcattctacagggctagcattaccctgataacaaaatcaaacacacagaccaaaaaagaaaactacaggccaatatcactgatgaatattgatgcaaaaatcctcaataaaatattagctaactgaattctacaacacattaaagttggggtgcagtgtcccaggttcactcaacccttcccgttttcctctgtgtgtgtgtctactttgccgtgttccctggtggcggcggcggtggcagtgttggtgcatgggcctcccaggacaaggggaaagtgagtatgcccctttcttgccccctgccaggcgtctgcagcctggcacaagctctggccaggtctccaacaggggacctggagatgtttttttccaatttctggattggtaacttgaggcagattctgggcactagagtcagaactaagaggagactgaatcaggggagtctggggtcctgagaggcagatacctgaaaccgtctagagcgtgtggggagctcggtgcatgttcacgccagttgtttttctctgtgcctcaatgttccaggtacccttggaggtgctgagatcctagggattcctggagcctggctgcatggcctggccaccctgatgccactgtgttctccatgacaggacagcaaggctgaggagaatggctccgacagcttcatgcactccatggacccatagctggagcggcaaatggaaaccacccagaaccttgtggactcctacatggccattgtcaacaagaccgtgtgggacctcatggttggtgtcatgcccaagaccatcatgcacgtcatgatcaacaacgtgcatgcaccgcctcataggggcagggggctcctgtagcactggggatgcaggtggccatgttggcctgggggagatgctgaccagccctatgggaccaaggtccagggagggaggcacagtccagaccagagctgtctcatagaaatataacgtgggactggggacagtggcccatgtctgtaatcccagcactttgggaggccaaggcaagaggatagcttgagcccaggagttcgagaccagcttgggcaacatagtgagacctgatctctacactaaaattttaaaaatagctgggcttggtggtggcacgtacctatagtcctagctactcgacaggctgacattggaggatcactttgagcccaaga

SEQ ID NO: 1886363 - DNA, 4001 bp, Homo sapiens; identical to SEQ ID NO: 1886360

SEQ ID NO: 1886364 - DNA, 4001 bp, Homo sapiens; identical to SEQ ID NO: 1886361

SEQ ID NO: 1886365 - DNA, 4001 bp, Homo sapiens; identical to SEQ ID NO: 1886362

SEQ ID NO: 1886366 - DNA, 4001 bp, Homo sapiens
ttgcagaagacaatttttccacagacaaggttgggggagatgattttgggatgattcaaggacattacatttattgtgcattttatttctattattattacattgtaacatataatgaaataattgtacaactcactataatatagaatcagggctgggcacggtggctcacgcctgtaatcccagcactttgggaggccaaggtggccagatcatgaggtcaggagatcgagaccatcctggctaacacggtgaaaccccgtctctactaaaaaatacaaaaaattgttggggcgtggtggctggcgcctgtagtcccagctactcaggaggctgaggcaggagaatggcgtgaacctgggaggcggagcttgcagtgagcccagattgcaccactgcactccagcctgggtaacagagcgagactccctctcaaaaaaaaaaaataaaaaataaataaataaataaataaataaataaataaataaaaaataaaaaaactacaaatgataagcaacatagaatagatatgtaaggaaaggctttaaaaaggaaaataagatcaatataaactaagaaaaaattattacagaacaaagagattctagggagaagacaaaagagtatcaaaatcacttcgtaaagatacttgtgaatatattacatgtataaaacaaaacagagggcgggcgcggtggctgacgcctgtaatcccagcactttgggaggctgaggcgggtggatcatgaggtcaggagatcaagaccatgctggctaacatggtgaaaccgcgtctctactaaaaaatccgtctctactaaaaacacaaaagttagccaggcgtggtggcgggcgcctgtaatctcagctactcgggaggctgacgcaggagaatcgctttaaccagtggactgtcaagagaggtaggctgcagtaagccgagatcgcgccactgcactccagcctgggcgacagagtgagtgagactctgtctcaacaaaaagaaaaaaagaaagaaaacttttttttgagagagagagagagagaagtctcgctcttctcccccaggtttgagtgcaatggctcgatctcagctcactgtaacctccgcctcccgggttcaaacgattctcctgcctctgcctcccaaatagctgggattaagtcgcctgccaacacgaccggctaatttttctattttttagtagagatgggtttcaccatgttggccaggctggtctccaactcatgacctcaagtgatcagcccggttggcctcccaaaatgctgggattacaggcgtgagccactacgcccggccaaaaaaccgaaaatcttaaaggcctttccccttccccgcctgggctccaacaacgcgggagccgccctgccccgccctgtcgcggtccctagagcaggtgggctgactgagggcgaccatgggtcccaagagagctcccgcagccgcgggctcccacctcgaggcgcagcgacaggggccgagaggggccagcagcccccaagccagccccgcgctaggagttggagagacgcgccctccgccttctcccacccaagcctctgccttgccgggcgggccagttgcgggagaaaggggcggggaaccgcggcctctctggggcagcttcccctttctcctgggactctgggcacccgctttccgccctcgccctgccccgccaggccgccacccggcgactcaccttaatgttgcggtggggcgtgagccgcggctgtggctcctggttctcctggaagatagaggccagtaacttcggtttgcccttgaacccggacatggacatcttcccctcacctccggcgggaggggcgcggaaaaggagccagtcccgagccgctgtcatggccgcgaccaccaggcggggcccccggccgagctctcgcggctccacctctccccgccgccgtgaccctcgtgggagcgcggctggaaaatggcaaggggcaccgaggacttggcgggagctatgtggcggcctgcggggctgctccctttataaccgactccaccgacaggaggcgcggctcccgtcaagccgcagtttaaaagggcaacagcaccactgcccccgctaccgcctgggaaagggctgcccctaccccgccccggtcctcgtcgcccctcacctcttacccctcacccctcacccctcaacccggcgcgccccgcgcgcacccggcgtgcccgcgctaccggctgccccctcctctcttgacccagcacctttctgcccgaccgatctggtcccttcctcacactcgcgactggacggcacaacaaccaactctgtgtgtgtgtgtgtgtgtgtgtgtgtgtgtgtgtgtgtgtctatgtgtgtgtgtgtgtgtccctgtcccaagggggcgtggctcacgcctgtaatcccaccactttgggaggctaaggcgggtggatcaggaggtcaggagataagactatcctggctaacacggtaaaaccccgtctctacggaaaaaatacaaaaaattagcagggcgtggtggcggacgcctgtagtcccagctacttgggaggctgagggaggagaatggcgtgaaaccgggaggcagagcttgcagtgagctgagagcgcgccactgcactccagcctgggcgacagaccaagactccatataaaaaaagaaaagaaaaaaaacctcaaaggatcactagtggtcagcaactgtgtgcaaataaataggaaaacctaccaaaaatggataaatttccagacacatctaacctaccaagattgaaccatgatgaaacccaaaacctgaacaaaccaataacaaataatgggatcaaagtggtaataaaaagtctcccagcaaagaaaagcctgggacctgatgattcactgctgaattctagcaaacatttaaagaagaactaataccaaccttacccaaacgattccaaaaatagagaaggagggaatacttgcaaactcattctacagggctagcattaccctgataacaaaatcaaacacacagaccaaaaaagaaaactacaggccaatatcactgatgaatattgatgcaaaaatcctcaataaaatattagctaactgaattccacaacacattaaagttggggtgcagtgtcccaggttcactcaacccttcccgttttcctctctgtgtgtgtctactttgccgtgttccctggtggcggcggcggtggcagtgttggtgcatgggcctcccaggacaaggggaaagtgagtatgcccctttcttgccccctgccaggcgtctgcagcctggcacaagctctggccaggtctccaacaggggacctggagatgtttttttccagtttctggattggtaacttgaggcagattctgggcactagagtcagaactaagaggagactgaatcaggggagtctggggtcctgagaggcagatacctgaaaccgtctagagcgtgtggggagctcggtgcatgttcacgccagttgtttttctctgtgcctcaatgttccaggtacccttggaggtgctgagatcctagggattcctggagcctggctgcatggcctggccaccctgatgccactgtgttctccatgacaggacagcaaggctgaggagaatggctccgacagcttcatgcactccatggacccatagctggagcggcaaatggaaaccacccagaaccttgtggactcctacatggccattgtcaacaagaccgtgtgggacctcatggttggtgtcatgcccaagaccatcatgcacgtcatgatcaacaacgtgcatgcaccgcctcataggggcagggggctcctgtagcactggggatgcaggtggccatgttggcctgggggagatgctgaccagccctatgggaccaaggtccagggagggaggcacagtccagaccagagctgtctcatagaaatataacgtgggactggggacagtggcccatgtctgtaatcc

SEQ ID NO: 1886367 - DNA, 4001 bp, Homo sapiens; identical to SEQ ID NO: 1242522

SEQ ID NO: 1886368 - DNA, 4001 bp, Homo sapiens
acaaggcccaggaattagactagagtgacatgggtgggggttggggggaggcgaatggcacaacatgtcctgaagttgttccattcttactgtaagagaaccgagcttaatgccccaaacctgcaaggtgtgaagtggacctcccaggccactgtactgatcaagcaaggggccctgctgtcacataaagagcaaagggctttgctgtcagcactctgctgagccgctcagctcgtccaaccatgtgaccccagctcaaatacttcaaactcttgcaacctcatttcttcttctataaaatgtgctaaatttttcttatccaacagggtaagaggattaaatgacacagtggcacctggcacatagtaggtactgatgaacgtctactgaatctggttcttctggcactcagctcaggtcgggaggaatggctgaggatggctgggcagggggacagtccgctctttgttttttccctgtatcagaattattccaaagattcttagaagaaaagatcacccaacacctttgaggcttaaacacctaatccttataaccaccttgaaggtaacaattcctcccacttgacaaatgaggaagtgacgcccagcaaggttcagacatctgtcctgggtctgacagcaaataagtcaccagccagtcacctgagctgccggagccagtttcttcatgtacaaaactgggggtgcagaggttgacggggtgactaatgagggcacacaaacctgaaggaggcccgggctcggtgtgacacctggctgcacccaacatatttaagttccttacttccctcccctggcacaaaggagccgagctggcacagccaggggcagtcacggagctgcgggggaggctggcagggaaagggaaacgcttccccagcccagactctagctccctctggctgcggggagccaaggccccggcccattagtcggtccttctggactggaagcaggctggtcccgtttgtttccagggaaagcgggttaggactgcctgtggaaggccccgttgcaggctcctcacaaccccagtggtagacattattccccccacgcagaggaaatgaaggctccgtgagtgactgacacggcgataaaccaagtctaacttggctcaagatcttttctttgctgggaggggctggtgaggctgcagcagagggtcccccaagctttctggccaagcgacctgggtgggtgtccgtgactgtacctgctcagggcttgcctctagctgcctccgaaccctacccttttccaggctggtggcccaggggatgcaggaacagctctagtctactaagctgaacccggactcaatgctaacgcgtgcccccaccgccttgagggttgggatgggcctgtcactaggccacctccaaggaaacaaatccctcttcccactcacgtcccgccgggacattcaggggcctcagcttgaagctagactggagcaatcgccaagcaccgctcccctgcaaggcagcacatccagagcgaaacaaagagtcaagggttgtggctcctggaaccggcattccctctgtccacagccgccccaggactctgctgggccggggtcggggcttcccactaggggctcccaaggctacgagccaagaacccacgcagatgaaggtacggtggggtgcaggggcagaaagaggagggaaaatgggccggccagaaagccgacttggaaccctgcagtgtcatcgcagccaagtgtcttcacctcgcagggcccgagtcctcctcggtaaatgagtccactcggtcccatggggcggttgggtagctttaacaagccagtgagccccgggtcaccgcactctcctcacaggtgccccaacctggcgtccgtcacgctctcgggctgcggccacgttaccgacgactgcctggcgcgcctgctgcgctgctgcccacgcctgcgcgcactgcgcctggagaactgcgcgcgcgtcaccaaccgcacgttggctgccgtggcggcggacgggcgcgcgctgcagacattgcacgtggacttctgccgcaacgtgagcgcggccggcctgcgccgcctgcgcgccgcgtgcccgcgcctggccctgcgggcagagcacagcgccgccatgctgcccgaccagcccccgcgcccgcgcgcgcccgccgcggccctcggcaagctgctgcagcgctagacgccgccccgccgctgcccccggggaaggagcgcagccccagaccgtcctggcttcgaacccagctcttccaccttcagaccaccaccgcatattctgagcctcattttccccgtctgcacagtggggataagaaagcctacctcacgttacgattttatacataggataaacgcaagattaaatggatatttggaaaacactcggctggttctcactcaacaccaccgcctttcccctcttgcttccgccccaggctttctgctgtgcgctccccacggaggcgggaggcgcctgcaccgtcctcggggactccgatcgccgttggaccgaaatcacctcggtggggaggacctgaccactcggagttcgccgacttgcgctcgggggtgacgggggccagggctgccgcgcgcaggggtctggggagcctccgggcggagcgacccagcgagaccccgccggctcccggagtgtcctggggaccgccacctccaggagccccggtggtgatctcggtgaagcaggaggaggggaagcaggggcgcacgggcagaaggagccaccgagccgctcctccttgcggttttgcccgcacgcgcgtctgcccgcccacctttcctggggcggatgcgttcccgcagtgaccgcactcgcgattgtagaaaattcgctcccaattgttgaatgcttacataaactgcatagttacccatattttctactgttctcataagggaaaaagaaatgatttggaagaaaaaaaaagcctcaaactaaacaaaaacaaaaccagcagccctggctaagcttttgataatggaaccattataagctgacaagctagatttttcacctgttggatttgctggacatgagcacaagcctaggcttccaatttgaatttcagggctgtagtcactgatgtgtcacatttagtgaaggctctcggccccccggcagccgcctggtcctgggtcactggggagaattctgggtgggtggaagaggcgaggagcactgtgatgggcgctgttcacactccggctccacccagcgccagctgcgacaaagccctttacccctcccaggccaggtgtttcttctgtgtgaaagaggagcttgatccctactcacaggttccttaattcattgctcaaatagggaaacggcaaggaaaaagacaaattctgttctcatgaagcttaccttctagtgggggaagagacaacaggtaactggtatataagagggtagaagggccaggtgcggtggctcaatgcctgtaatcccagcactttaggaggccaagatgggcgattcacgaggtcaggagatcgagaccatcctggctaacaaggtgaaacccccgtctgtactaaaaaaaaatacaaaaaattagccgggcgtggtggcgggcacctgtagtcccagctactcaggaggctgaggcaggagaatggcgtgaacccgggaggcggagcttgcagtgagccaagatcgtgccactgcactccagcctgggcgacagagagactcttgtctcaaaaaaaaaaaaaaaaaaaaaaaaatggtagaaagtatttggaaaaaagtgcaggctgtaacaagggctattagggattgctggcaagagattggggggtgaagcctctgagaaagggttgaccaatgtaagcctcactgagaagatgacatctgaggcatgaagtgaggcagggggcatagatactcctggcagaggaacagtcagtgcagaggccgcggactacaggcatggctcatgtgc

SEQ ID NO: 1886369 - DNA, 4001 bp, Homo sapiens
acctcgacattggccaggctggtctcgaacttctgacctcgtgatccacctgcctctgcctcccaaagtgctgggattacaggcgtgagccaccgcgcccagccaaaattccatttgtaagtaggctgtttcgaactcagaatacactggttcatggaaacaatgtttacaactcaggttgtaagcataggcgtaaaagaagaaactgaaagttcctgaaggatggttcactcaagcagtataggcccgactgaaaaaaaaaaagtgaggtcctgcacaatattggttcaactacactatattagaccataacatacgctcactaagggcagggaccatgccacattttgcccatgatgtctcctcaaaacttatcacagtaactggcacatagtaggtgcccaacaatttgataacaactgatgaactacccctaaatcaccagatataccatatattatttagcaaaatacattataaatgttaactctggacaccagaaacacatttcctcttctcctcattcaagcagacatatgggggactccctcacgtctgcccagctcctgtggtagtcccattcatgcagggaggcctttttacaagttgaggatcatgaggagtactgccctcacctcttaggagaatgggaggaaacagtttacacagacttagatcaaatacaaaaaagcactttcagcccgtgaaatctgctgttgacagtgatgacagctggcagtcttgccttctctgaagacacctctggagctggctctttctcccaagtgatgcatttgtgtcgactcccaaatgcacctcattaacagttacaaagtcgtgggagatcaatttagtactcaggttggagtaaaggagggaactgaaagttcctgaaggatagttcactcaagcagtataggcctgattaaaaaaaaaaaaggccaggcacgcctttaatcccagcactttgggaggctgaggcgggcagatcacccgaggtcaggagttcgagaccagtctgaccaacatggtgaaaccccatctctactaaaaatacaaaaattagccagatgtggtggcgtgcgcctgtggttctagtacttgggaggctgaaataggagaattgcttgaacccaggaggcagaggttgcagtgagccgagatcgcgccactgctcttcagcctgggcgacagagcgagactccgtcttgggtgggggggaatccctgcccaccacagtctaccaattttgtgagcacaacactatgtattcctcacttgggtggattctgagcccccaagtctcccacccccacccccttcccacgtgtactgttcaaacaactagggctcttctttctcaggaacagtctgagaaataggccctagccacctatttggccttgaataccaagtgtccatcagctagacgtttgtaattcttccctgaaggtgataattagctcattcataaagaactgattctcagcagtctcgctctcaaagcaggattctacctgaatttctagtgcctcacctgctctttggctttcccgtcagcctccgggagtccctccccagttctcagatataatttcatctctaaaagtccagactgaaaatcacatctgggagatgtatttttaccttaaaaatcagtcaagaaaatgtgggatctggaagtctctcttggaaagagggggcagaggggagctgagcagagggcgaaatcgtgcagtttacgcggagctggggaccccgagcctcagagcgaggggaggccgggagcagcgccccggaactggcgcctcacagacagcgcggggcggccgccacggtggcgggaaggccaagcgctggccctgggttgttcttcacccataaccccttcacctgtaaccccaacaagcagcgaaaggcagtcccgggccctcggcctccccactcaccccgtgcccatcgccggacacagtccgtcggcataaactttccgtcggcataaactttccgtccgcgcgccacagccggaactataaggccgcgcgacagaagggaatccggcgcctgcactccgcgctgggcggggcggtccttggagagcttcagggtcgcccgggcagggttctggctcatcccggagggacgctagggggcgcggcctctcttcgcgatggccaatccgcggccacccctctcctcccacaaatccccaacttctctcgagccttggctgggtttcctgccgtgtctctctgcattgccctgaatctctccccattctcgggctctttccttccccttctgccccactgacccatgggcctcacctggcccggtgactctgtgtccgcttcacacttttgtcccctcactcccctgggccccgtcggtgcacgagcccaacccttcctgctattttcctcgtcactctttagccccctctctcgtatcctctgaaccggttgacagaatcctcttcctgttctttttaaactgcaattcctgaactacaaatcctggccgggcgtggtggttcaggcctgtaatcccagcactttgggaggccaaggtgggcggatcgcttcaggtcaggagtttgagaccagcctgggaaacatggtgaaaccccgctctctactaaaatacaaaaattagccgggcatggtaacgagtgcctgtaatcccagctacttgggaggctaacgcacgagaatcttggggggaaaaaccccaaaactgtaattcctggctgaggtatgctttgtatatccttcttagctgacctgagcccaatttacctcaagacttggcctcttggtctcctcagcccaaatgctcactttatttcccctatcccctctttgagggaagcagagggccctcgttcctctcaccctggacaaggcatgcgtgctcagatttccctgtaaggcaacatgggctcttgcctgccactctggccacctggtgtctccattgtagtctgtgcctcagtgaggtccttaagagggcaagaggtgactttctttctaaccatgtagggagccagggaatcccagctagagataggcttagatggatgccagcaggcccctgggtagttacggttcaaagaacaatgtggaaccacataggttacaaagtgagtacagaaaggcctctagaaggcctcaggcatttgcctttttcttttagctgataggatggggcgagattaggagatgggacgaggaaggaggatgctttgaactgaacagacaaatctgtctgacttctcacagcttgttatgtgggagattgtggggccagttgcttgtagttttttcctgtccctgggaatatccctgccagcactggggccagggccctgcagactgccctatttgcttcaaaacttctttccccaacctggctgatctcaccatgtcaagacctagttatgcttgagcaggcattgggctccaggtaagtaaggctgcagcctgataacttagtcatgatttctaatcttgccctattgggagggatgtggccaagaatgtgtgggtaagcaagtgtctagttacccctaatgtgacaacgacttagccatagggttactgtcctcgtggtaattctggctcagttgcagggtctgattcattaccttacccaaccctaaagcttaagttagttcactgatggatgatcaaatcttgtgacctagttcttctgaataacaggctttgggagacttggaaagcaaaaaatcaatatattaaattgatgataaaaggcacagctaccaggaggactgtgttacttagggcaactagtttgtttgtttgtttttcctccttagtggaatcccattacaaatcagaaggttgttcagtgactataacatcagagaacatcagcacaaaggttagaaggttttaaagggggtgtctttcaagccatcactggctgatgaatttcttttccccactcaaacgaccctcagcatttgcgtgtttcca

SEQ ID NO: 1886370 - DNA, 4001 bp, Homo sapiens; identical to SEQ ID NO: 1242530

SEQ ID NO: 1886371 - DNA, 4001 bp, Homo sapiens
gaatctaacactaaccagcccgtagtgtatggtcaacactttcgttactttagtatacatcaccccaattgtttgtcttcaccacacactttggagttaggtagtagtatctatttttacaaataagaaaacccaggcacaaaggggttgattagcaattatcttttgaaaagcctgtagttgctcatctgaagaagtgacggaccacctcttatttagtggacagacagtaactagttgagaagacaggggattttgttggcggaaaaaaaattttatcaaaagtcgtcttctatcagggagttttatgagaaaccctagctcctcagttccacagtgggtagctgtaattcattctaggtctgcgatatttcctgcctatccattttgttaactcttcaatgcattccacaaatacctaagtattctttaataatggtgggttttttttttttgcatctatgaagttttttcaaattctttttaagtgacaaaacttgtacatgtgtatcgctcaatatttctagtcgacagcactactttcgagaatgtaaaccgtgcactcccaggaaaatgcagacacagcacgcctctttgggaccgcggtttatactttcgaagtgctcggagcccttcctccagaccgttctcccacaccccgctccagggtctctcccggagttacaggcctcgctgtaggccccgggaacccaacgcggtgtcagagaagtggggtcccctacgagggaccaggagctccgggcgggcagcagctgcggaagagccgcgcgaggcttcccagaacccggccggggcgggaagacgcaggagtggggaggtggaaccgggaccccgcagagcccgggtccctgcgccccacaagccttggcttccctgctagggccgggcaaggccgggtgcagggcgcggctccagggaggaagctccggggcgagcccaagacgcctcccgggcggtcggggcccagcggcggcgttcgcagtggagccgggcaccgggcagcggccgcggaacaccagcttggcgcaggcttctcggtcaggaacggtcccgggcctcccgcccgcctccctccagcccctccgggtcccctacttcgccccgccaggcccccacgaccctacttcccgcggccccggacgcctcctcacctgcgagccgccctcccggaagctcccgccgccgcttccgctctgccggagccgctgggtcctagccccgccgcccacagtccgcccgcgcctccgggtcctaacgccgccgctcgccctccgctgcgccctccccgagcgcggctccaggaccccgtcgacccggagcgctgtcctcgtggaccgagtcgcgggcctgggcacggaactcacgctcactcccagctcccgacgtgcacacggctcccatccgttgtcttccgagcgtcaggccgcccctacccgtgctttctgctctgcagaccctcttcctagacctccgtcctttgtcccatcgctgccttcccctcaagctcagggccaagctgtccgccaacctcggctcctccgggcagccctcgcccggggtgcgccccggggcaggacccccagcccacgcccagggcccgcccctgccctccagccctacgccttgacccgctttcctgcgtctctcagcctacctgaccttgtctttacctctgtgggcagctcccttgtgatctgcttagttcccacccccctttaagaattcaatagagaagccagacgcaaaactacagatatcgtatgagtccagttttgtgaagtgcctagaatagtcaaaattcacagagacagaagcagtggtcgccaggaatggggaagcaaggcggagttgggcagctcgtgttcaatgggtagagtttcaggctggggtgatggaagggtgctggaaatgagtggtagtgatggcggcacaacagtgtgaatctacttaatcccactgaactgtatgctgaaaaatggtttagacggtgaattttaggttatgtatgttttaccacaatttttaaaaagctagtgaaaagctggtaaaaagaaagaaaagaggcttttttaaaaagttaaatatataaaaagagcatcatcagtccaaagtccagcagttgtccctcctggaatccgttggcttgcctccggcatttttggcccttgccttttagggttgccagattaaaagacaggatgcccagctagtttgaattttagataaacaacgaataatttcgtagcataaatatgtcccaagcttagtttgggacatacttatgctaaaaaacattattggttgtttatctgagattcagaattaagcattttatattttatttgctgcctctggccaccctactctcttcctaacactctctccctctcccagttttgtccgccttccctgcctcctcttctgggggagttagatcgagttgtaacaagaacatgccactgtctcgctggctgcagcgtgtggtccccttaccagaggtaaagaagagatggatctccactcatgttgtagacagaatgtttatgtcctctccaaatgcttatgttgaaaccctaacccctaatgtgatggtatgtggagatgggcctttggtaggtaattacggttagatgaggtcatggggtggggccctcattatagatctggtaagaaaagagagcattgtctctgtgtctccctctctctctctctctctctctctctctcatttctctctatctcatttctctctctctctctatctcatttttctctctctctctttctctcctctgtcttttcccaccaagtgaggatgcgaagagaaggtggctgtctgcaaaccaggaagagagccctcaccaggaacccgtccagctgccaccttgaacttggacttccaagcctccagaactgtgagggataaatgtatgattttaaagtcgcccagtgtgtggtattttgttttgactaatacaacctgaaaacattttcccctcactccacctgagcaatatctgagtggcttaaggtactcaggacacaacaaaggagaaatgtcccatgcacaaggtgcacccatgcctgggtaaagcagcctggcacagagggaagcacacaggctcagggctctgctattcattctttgtgtgaccctgggcaagccatgaatggagcttcagtcaccccatttgtaatgggatttaattgtgcttgccctgcctccttttgagggctgtagagaaaagatgtcaaagtattttgtaatctggctgggcgtggtggctcatgcctgtaatcctagcactttggtaggctgacgcgagaggactgcttgagcccaagagtttgagatcagcctgggcaatattgtgagattccatctctacaaaaataaaataaaatagccagtcatggtgtcacacacctgtagtcccagctacatgggaggctgaggcgggaggatcacttgagcttgggagatcgaggctgcagtgagctatgattgtaccactgcactccaggctgggcgacagagagagaccctgtctcagaaaaaaaaaaaagtactttgtaatctgtaagatttcaacacacacaaaaaaagtgtatatgctccacgatgcctgtgaatatacacacacaccacatcatataccaagcctggctgtgtcttctcacaaatgcactgctaggcaccacccccagttctagaatcacaccagccagttcaccctccagatggttcaccctcaacttcataaaagttccctacctaatctactgacaggctcatccccgacctaattttaaagatttcctaggagctgcaatgggaatcctggacctcagcctggacaaagaacagctgcaggtcattctcatgtgtggacacggaagctctgcctgcctttgctggccagctgggctgagcgggcctgggaaattaaggctgcagggttggtcccaggcagtcttgc

SEQ ID NO: 1886372 - DNA, 4001 bp, Homo sapiens
ttcatgactggtctcagtaagtacatttagatataagtagtgccttgcttttggtctttacaacacatactccatgaaactcattaatttgaacttatagataatagcaatattctatatttgagcaaatttcaaaatagtgatagaaaaataagtgggtcaagttactcataagggaaaaaaataaaattgtcaaaagattctgatgacaacactttaccccagaaaataaagtaacatacttaaaaatttaagagaaagaaaaaattgaactaagattttctatccagcaaaattgacttttaactagaaaggctgcaagttaatataagcatgcaataacttaagaaatattgtttaaatatgcctttcctgggtgacctactaaaaatgagctttagataactagaataattgaaaagccatcagcatcagaataagaggtaagcactaaatatacatttacctgtagaactaaaatcaaatgatggttatagaaatatggctgtattctctgacaattcatagaacaactatgaaaaatgcaggtgatcagagggatatggagagtgcataaaaagcaggataagctgagtaattacatagtaatacatatacttagtagtatatgtattacctgagagtaaaagagtatcatttcaaattagatgctggaagagagaaagtaaaaatgttagtagcaaattatttcattattgctaatagttgagggctaactggcaatgagaagaaaggtaatacgtaaaggttttagcataaaggtaaacattaggaaaaaaaaaaactaccaaatactccctcaatacctacatacagaaagtgagagagaaagagagattttgaggaaaataaaatgaaatagatgacatagtaaaagaacatatatagtttcatatatttgtgtctatgtacaaacttaccatctttatcaataaatgttaatggacttaattcacctattagaataaaagagattaagattgactaacaaagtaaaatctaacactatgttgtttttaaaaagatacatcaaaaacaaagagttaagcaagattaaagataaaaggatagacaggatataaataaatttttaaaaagcagtggtcacaatattattgagcatggtggaatgcaaaccaaagagcaataaataaagacacagagaagagtatttcgtaatactaaagactgcaattcacaatggaggtatttcaatgactaatatatgtgtaagtaataacacagctactttaataaagcagaggctaaagagaatggaaactaacgatagataatgttagcacatatctctgaatataagacacataatggggacgaaatattgacaagaatatagaaaacctacagaactaagtcaataaagtagatgtaataatcaaactctaatgccaatagtagacagtacaccttgtacttaagtgcacatgaaacatttaccaaaactggccacatcttattttccggagtgacccctccaacattccaggaatggaactagcacagaaaacttctctgatcacaacgcaataaggctagaaattagatcgttccacctggaaatttcaaaacacattactaaataattcagctcaaaagggaaattcaatacaaaactgtagaacttaaaaaaattgtaataatgaagacataacaatacagcaaaccaaaggaagaaagaaaaaaaaaaaaaacaagaggaaagaaagacaatgaattagaaagcagtaaaaagaagaacaggaggagccaagatggctgaatacgaacagctccggtctacagctcccagcgtgagcgacgcagaagacgggtgatttctgcacttccatctgaggtaccgggttcatctcactagggagtgccagacagtgggcgcaggtcagtgggtgcgcgcaccgtgcgcgagcctaagcagggcgaggcattgcctcacttgggaagcccaacggtcagggagttccctttcctagtcaaagaaaggggtgacggacgcacctggaaaatcgggtcactcccacccgaatattgagcttttcggaccggcttaaaaaacggcgcaccacgagattgtatcccgcacctggctcggagggtcctacgcccacggagtctcgctgattgctagcacagcagtctgagatcaaactgcaaggcggcagccaggctgggggagggacgcccgccattgcccaggcttgattaggtaaacaaagcagccgggaagctagaactgggtggagcccaccacagctcaaggtggcctgcctgcctctgtaggctccacctctgggggcagggcacagacaaacaaaaagacagcagtaacctctgcagacttaaatgtccctatctaacagctttgaagagagcagtggttctcccagtacgcagctggagatctgagaacgggcagactgcctcctcaagtgggtccctgacccctgacccccgagcagcctaactgggaggcaccccccagcaggggcacactgatacctcacaaggcaaggtattccaacagacctgcagctgagggtcctgtctgttagaaggaaaactaacaaacagaaaggacatccacagcaaaaactcatctgtacctcaccatcatcaaagagcaaaagtagataaaaccacaaagatggggaaaaaacagaacagaaaaactggatactctaaaacgcagagcgcctctcctcctccaaaggaacgcagttcctcaccagcaacggaacaaagctggatggagaatgactttgacgagctgagagaagaaggcttcagatgatcaaattactctgagctatgggaggacattcaaaccaaaggcaaagaagttgaaaactttgaaaaaaatttagaagaatgtataactagaataaccaatacagagaagtgcttaaaggagctgatggagctgaaaaccaaggctcgagaactacgtgaagaatgcagaagcctcaggagccgatgcgatcaactggaagaaagggtatcagcgatggaagatgaaatgaatgaaatgaagtgagaagggaagtttagagaaaaaagaataaaaagaaatgagcaaagcctccaagaaatatgggactatgtgaaaagaccaaatctacgtctgattggtgtacctgaaagtgatggggagaatggaaccaagttggaaaacactctgcaggatattatccaggagaacttccccaatctagcaaggcaggccaacgttcagaatcaggaaatacagagaacgccacaaagatactcctcgagaagagcaactccaagacacataattgtcagattcaccaaagttgaaatgaaggaaaaaatgttaagggcagccagagagaaaggtcgggttaccctcaaagggaagcccatcagactaacagcggatctctcggcagaaaccctacaagccagaagagagtgggggccaatattcaacattcttaaagaaaagaattttcaacccagaatttcatatccagccaaactaagcttcataagtgaaggagaaataaaatactttacagacaagcaaatgctgagagattttgtcaccaccaggcctgccctaaaagagctcctgaaggaagcgctaaacatggaaaggaacaaccggtaccagtcgctgcaaaatcatgccaaaatgtaaagaccatcgagactaggaagaaactgcatcaactaacgagcaaaatcaccagctaacatcataatgacaggatcaaattcacacataacaatattaactttaaatgtaaatggactaaatgctccaattaaaagacacagactggcaaattggataaagagtcaagacccatcagtgtgctgtattcaggaaacccatctcacgtgcagagacacacataggctcaaaataaaaggatggaggaagatctaccaagcaaatggaaaacaaaaaaaggcaggggttgcaatcctagtctctg

SEQ ID NO: 1886373 - DNA, 4001 bp, Homo sapiens; identical to SEQ ID NO: 1242532

SEQ ID NO: 1886374 - DNA, 4001 bp, Homo sapiens
tttgagagggcgaggtgggcaaatcacttgaagtcaggagttcgagaccagcctggtcaacatgatgaaaacctgtctctactgaaaatgcaaaaattagctgctcatggtggtgtgtgcctgtagtcgatgctactccagagactgaggcaggagaatcacttgaacccgagaggtggaggctgcagtgagctgagatcacaccactgcactccaacctgggtgtcagagtgggactccatctctaaataaataaataaatataaaaataggcaaaagacccaaaaagacatttttcgaaagaaggcatacaaatgacaaataggcatatgaaaaggtgctcaacatcattgatcatcagagaaatgcaaatcaaaactacaatgggatatcatcttacccaaattcaaacggctcatatccaaaagacaggcaataacaaatgctggcaaggatgtggagagaagggaaccctcatacattgttggtggcaatataaataagtacaaccactatggagaacagtttgaagcttcctcaaaaaaataaaaataaaactaccatatgatccagcaattcctctgctggatatatacacaaaagaaaagaaatcaatatatccaagatcttttggtaagggatggaaggacgttttcctcaagactgcataggcatggtggctcatgcctgtaatcccagcgctttaggaggctgaggtgaatagattgcttgctcccaagagtttgagaccagcctggacaataggaggagacccccatctccacaaaaaatacaaaaattagccaggcgtggtggctgtgcacctgtagtaccagttcctctggaggttgagtcaggagggtcacttgagtctgtgagttgaaggctgcagctagctgtaccactgcactccagcctgagaaacagagcatgactctgtcaaaaacaaaaacaaaaacccaaagcagaaaacccacaaaacaaaaaatgcagcctctgaatagggaaaagccattaaaagtatcaagagtgggtgaaaaattcaacattgaaaccagcatcctagcctgttgtgaatagactaagtacctaaactgaatgactgggtggtttagtaaaatgtggggtggggagacactgcttttttttttaaggtttctcagttacatgactttaccctccaaatcctattggctccttagtcttggattctaatactcctggaagcaggttgggagagattttaactcctcctttttttcactgatatctggcttcccaaatattaaggatatttggccaggcccaagtaagatcacaggttttccatctcttaaacttcacatatcctgggtcttcctgcatgcagtgtttcctactagagcactcctctcgccttctgcatcctttgggactggttcatttccattctggattctcacttccctcctgcaggttagatgtgcttgttactcactcctaattaccttgcttcctctgtcattacacttgtcacaactgactaccattgcttgtgcattggcctcccctgcttgactgtaagctctgtaaaggcagggacaccaagcacgtaggagatacagaataaatgttgttgaatgatgtgcctgtgacagtcaacggttaaggcattcccagccatcaactctttaatgaatttccctcaccaatcctttccttctaagtctgcaggttcttatatcaaagttaatatccccacacatcccctcatccccaagccttcatcctacctcttgagcagagccttctccatagttttcatagtcgcaaatgtagaaagaggtctagacctagttgctcttgtctgagctctgctgtagctagcttagtggtcttagagaccctcagcctctctgtgtctcagatcagggctggcttatccattagggacggtgcccaggacccataataatttgggggcccacaaaatgggggcagagagaaaagaacaaaagaacatttaagtcaaagaaagtcttgtaatatattattttaatgtgttggtctttgtaccaatgtagtcactgaccatgttgaattttacccaagtcctgtgatcctggaaaacatgaagggttaaaggaaccctcccactctttagtgttccagaaaacagcttatacaaggaaagatcctcccccatgtgacttagttaagacttgctgatgccaaccttgtttttttaatgacaaagctgaacatagacgctccaccattccgttctttgcatcattaatgattagctgaactgtttcacccactgaccaatgtggacagaatatctgctaccttgacttgacccaattttagttagaattctctctttctcctggcccctgagctttgacctgccctttgcctgagccatgatacaacccctccttaagagcccctcctgaaaatcgggtgatcatagggtagaattttctcttttctactgtaagatcattcaccctaactcattccacttttcgacatcctgttacttccagtattgtttattccttcctagaaaagaaaagaccttttctgcctaacctttgagaggtttgtatatctcaggatcaaagttttcttctaattgcaatagtccccttcctcctactgcaagtcactttctctccattgcaatactcctttagaataaaagtctttgcttacccaagtctatatttttaatttgacattgtaagatataatttttaatattgtttataaatgaagaggcctccccaaagcaaaaatgcacactaaaatcataatgtgaacctgcctcagattcctcactgttaaatggagaagctgaattaggtagaccaagataccttttgccaaaattaatgaattcagaagcagaattatctgctcttggttagtcagtaggaagcaactgacagaatgacatgcccacctcatttattacacatcttattcattgctacttctttgactggactcagggctcttcctgtgcctgacttatgggataaaatagaggtctctcaggcttcatttctgaaagttccggcacacaaataagacctttgattgtgtaccaacctatatgtatttcttgggtcctgacacagtgggtattggttatagcaatagtttatcccttcctccctttatttcttgttttcttattcatgtagcatatgatattataactgaaaaagctccataagttctaaagtaaaaacaacatgatatgcaatttgatatctcacccattcagatgaaatttcataatttccccacttctttaagaagagttcattttgtgcttgcttcgacagcacatacagtaaaaatggaatgatacagagaagactaacatctcccctgcacaaggatgacatccaaatgtatgaagcattccatttttcaaagtgaaataaatcataattttttaaaaaacaagaggattggacttttagtataatttgttttccaagattaaataaatatacattaaaataaatatatagaagaggaagataaaaaatatatatctcaaacaatagcaatctaaaagaactttagtatctttttttcagtgtatttctttcttgcttcactgaaaaagtacttgtttatgtatttgtaatgttatacaggtacagtttatatcctttcccttaaacattacattataagaagtttaccttgttgctacattgtcttcataattatcctttttaatagctgcataatagaccatcaaatagatgctttgtaatacgactgcttcccatgcttcccacttgctgggtgtttgtttctaaattttaactaaattatgctgtgttgaatattttgttaggacagatttccagaagcagaattattaagtcaaaatgtatccctattttttatgcctctccatacaactttccaagttgatttttaatagttggagcaaatgcttccatcagtgtgtgagagccaatttctcc

SEQ ID NO: 1886375 - DNA, 4001 bp, Homo sapiens
agcactttcggagcctgaggtgggcagatcacctgaggtcaggagttcaagaccagcctgaccaacgtgaagaaaccccatctctactaaaaaaatacaaaattagccaggccgggcatggtggcacatgcctgtaatcccagctactcggaaggctgaggcaggagaatcgcttgaatccaggaggtggaggttgcagtgagctgagatcacgccattgcactccagcctgggcaacaagagcgaaactccatctcaaaaaaaaaaaaaaaacagaagaagaaagcaaaatatatgcaagaagtagactctccaaataatagactttcaaaataatgaacagaacaactttatccacaggttagagtggcatgagtttcatctaaatgtgatactatttttatagtacaatcatctggcagggggcatgagattatatgtggaaagatggcccagtgcagggggcagaaatcaagagatctcttaggtgtcttctgattcccgttgttgagacccaaggtaagatatttaacaactctggactccagattcatttgtaacactggaataagaatgccttttctgaatggggtcacacggttgtttgatggctcaatgaaacaagagcgataacagcatttactaaaatttaagttactgaattacaatctagggtcctgctatttaaattttcatcctattttaagaaatttggatgagtccttagaggaaaacaaactgaagcaaataaatatcacatcaaaaacaattcatcaggctgggcgcagtggctcacgcttgtaatcccagcactttgggaggctgagacgcgtggctcacttgaggtcaggagttttgagaccagcctggccaacatggtgaaaccccgtctctactaaaaatacaaaaaaagttagctgggcatggtagtgcacacctgtaatcccagctactcaggaggctgaggcagaagagtcacttgaacctggaggaggttgcagtgagtcaagattgtgccactgcactctagcctggctgacaaagagagaccctatctcaaaaaaaaaaaaaaaaaaaaaaggcatcgatacaaaaaaactcttaactctttaaaatctgcaggaatcttaagctagtaagatgaccaacataaatgtcttcattttctatcaattttaaatataaattcaatatttaaacatgagggtgaactaggcatagtggctgacgcctgtaatgctacgctttgggaggccgaggtgggcagactgcttgagctcaggagttagaaaccagcttgagcaacatggcaaaacctcatctctatcaataaataagtaaagaaacataaaagtaaacccaaacaaagtgcagagattgaacattaagtgtaaataaagaaataatatatgacaaatagtaaatgtgataaaataaaaattaaaaaaaataccaaaatatcaagcttacataaagttgcaacttctcgcatagccctaaatggctgcagtaagtactggaaaaacatggttgccatggtaactaattcctggtaggcttcatcttcctcttggtaaactttcattaatgctaccatggtgttggcttttccatgtccttggataacctagagagcaaatgtgaataaagctcaagtcagacagtgtaatacatacccaacaaacaaaactaaacaaaagaaaccttcatgttctcaactttcaatacatcaatttaaaatattgattaaatatgaaaatgtcatcatcctccatcaaaaatgcccaataaaacaagaattgttaagtaaattatgatatatccatggcagaatattattactgtagtcattcagcactgtgcttctgaagattgtttaataatatggagacttttggccaggcaccgtggctcacgcctgtaattccagcactttgggaggccgaggcgggtggatcacttgaggtcaggacttcgacaccagcctgaccaacatggagaaaccctgtctgtactaaaaatacaaaatttgttgggcgtggtggcgcatgcctgtaatcccagctactggggaggctgaggcaggagaatagcttgaacccgggaggcggaggttgcggtgagccgagacagtgccattgcattccagcctgggcaacaagaacgaaactctgtttcaaaaaaaaaaaaaaggagacttttataattaaatggagaggcagagtacaaaatttaatctcaactatgcactaagtatgcagcgaaaaggacccaaaagaaggtttgaggtgtggatattttttcatttgacttttctgactgtgaaggttttgtgaggctgtattcctttttaaaagctcctaagggccaggcatggtggctcacacctgtaaccccagcactttgggaggccacggcaggcagatcacgaggtcaggagattgagaccatcctggctaacacggtgaaaccctgtgtatactaacaatacaaaaaatttgctgggcgtggtggagggcacctgcagtcccagctactggggaggctgaggcaggaaaatggggtgaacctgaggggcagagcttgcagtgagccgagatggcgccactgcactccagcctgggcgacagtgcaagactctgtctcaaaaaaaaaaaaacaaaaaacctcataaaacattacagagctgtctccaagtactttagcatgttgattctcttaatgccccaggttaatatccccatgaagtccttagcagtcaactcatttacagagcctcagctgtggttccagtctctgctggttattgcttgtgctgcagggcagaaaacaaactgaacagtgtataatctaggtggactgatttggttggaaattattttactcccacaagaagagaaataaaaataaaataatatagatgtttttcaaccaatacattcttaaaattcttctatttccatccttctgcttaaagataaagtgatctactttcagctgtattttttatccaggtaataatattatggttttttttttaagtgaaagccccactgaacaaaattaaaacacacacgcaaaagtaaacttaaggcaagtgatacacttcagccttatttcttagactattcagaaaaattccagagttaaaacattcagcttcattttatatatgctagcaatgctagcaattagtctaattctagaatcaattgcttttctattttaaatataaagtaaaatattaaaattatatatttggacatgttttgaattttagcttcccctctcaacccctcatttttgagttccagataaatatgtgaactacactaacatgaacaactagctcaacagaatgaactacattcacgctatagtaccccagagtgaacttaaatttgggaaaactaacttttctgatagtaactacagtaaaatgcatcatataaatgttcgattttaaggagaaaccacctatctctgtgagaaaccaagagtgtaaaaaacaagtctgatacaaaatgataccatttttgaaactccggtgggctcgtcatatcctaaggtgaaagttataaagttgaagatcaaaagctgactggcctgaaactcccctgtggtttcctcatagtctaaagtgaaatcaacacatgttaagtgggtgtgtagacatttacacataaagctcacagtacaaaaatgaccccactaacaagctccttttataaaaccattttaatttagaaagcttattctatatttagcttaggctgaattcttcttttcacctccccttcctcaaaagaatgcacagaaaaaaatcattcaggttaataagagcagtgagctgagactccagcctggctctgcttagtaaaccgtgggtgtggatttagaaggcatactttctcctaaacccttctatgaacatgtacttccccgtcccctaagttcagtaagtttaccactcaattactctctcaaactacctctttcaa

SEQ ID NO: 1886376 - DNA, 4001 bp, Homo sapiens
ttcagcttcattttatatatcctagcaatcctagcaattggtctaattctagaatcaattacttttctattctaaatataaagtaaatattaaaattatatatttggacatgtgaagtttagcttcccctctcaacccctcatttttgagttccagataaatatgtgaactacactaacgtgaacaactagctcaacagaatgaactacattcatgctatagtaccccagagtgaacttaaatttgggaaaactaacttttctgatagcaactacagtaaaatacaccatataaatgttcgattttaaggagaaaccacctatctctgtgagaaaccaagtgtttaaaaaacaagtctgatacaaaatgataccatttttgaaactcccctgtgggttcctcatatcctcaggtgaaagttataaagttgaagatgaaaagctgactggcctgaaactcccctgtggtttcctcatagtctaaagtgaaatcaacacgttaagtgggtgtgtagacatttacacataaagctcacagtacaaaaatgaccccactaacaagctccttttataaaaccattttaatttagaaagcttattctatatttagcttaggctgaattcttcttttcacctccccttcctcaaaagaatgcacagaaaaatatcattcaggttaataagagcagtgagccgagactccagcctggctctgcttagtaaaccgtgggtgtggatttagaaggcatactttctcctaaacccttctatgaacatgtacttccccgtcccctaagttcagtaagtttaccactcaattactctctcaaactacctctttcaagcttaaaagggcactaatgcggttaaactgatgaataaagctcactttctaccggctttccatttgaccaagtctgtattacttaaaacaaaacaccctaactcctaaaagccatttcttcctttaaaccattttatcccacttgcgacgtccccgcagacacagacttagaattgtttacgtgtagtccgtgttattctttcctacatggatgggttgttttcagtttgcttgcagtatttctgacatttcccgttacaacatcctgctctgccagcatcttcagggcaaaggttgggggcctagcccagctcccagcggcaagtacactaggctcttaacttcgcttgtcctctctgcaggccctgccgaagctccccctggtttcccgcagcgatcccgcgcaggtgagggtactggggagcccgtggccttctccgcccgccggctcctccccatcagccgtcagccagggctctcggcgccggggaagcctcccacagggtcccaggccacccaagcgcggtcaaacgccggcggcccggcctcgcttacctgacgcagccgcgcgtccgcctcgacccatcaggcgcgcagggcccgctcccgaaactcgcgcgggctctcgcagtcggccgcgcggcccttagccgcgaagagagcgtcgcgcacggtggcgccgccacagccgtgggccgccgcgcccaggtagcgctccagctgcccgcaaagctcctgcagcgccgcctcgccggggcccacgcgcgccggccagagcagcgcccaccgcccgagccccagacctcaggccccgccgccgcccacgtccagctccggcggcagccgtgggaagcagtgttccagaggcggccacagcgccgctggctgccggcgcgcgccgcggaaccccgcggccgagagccggccggcccagctgggcggggacacggcggcctcgggcttgtgctccagccccagccgggccccctcgcgccgctgcggctgctgcgcggtgcggtcgtgacaagtcacagcaaacttgccctccgcgccgttccaagccaccaggaagcgcaaccggtgcctctggggatcggcgaagaggccctcccggagcggcgcccagccctccaggctgtcgggctgctcgtcctccatggccgtcggcggcagcggccctagggcttggcgggcgcgggcctgacctcgtcgcaccgcctgtcaggggacagtcccaggtgaagcatttttcgctccacaattggtattttaacaatatgaatgaaaaaaaaaaacctcagctgttttgatagaaataacaaacgtgcctaggaatcatcttccttgaagggagaggagggtcttactgaacttgaaaaaactaaataagcaaagttgatacataaggacacccttctctttacccttacctattcttaacaactttaattcatttctgacactgtcaccaactgaaaaagggtccaactaaaaaaaaaaaatcataaaggtgagaaaaattgtgacgtgttctatcctaatccaatatatctaaaccaattttactgatagagaaaatatattaagtgaatgatgtaaatacattaatataggtaacaactctttgaaagtaaagtttgcacataacatgaaatacatagagaattactgccgtctcgaaggagagaacccttgatggggagtggtagtcaaaaaggtgtatgagcaagtcatctgttgcaaggtgatgggaggagatttttatgcaggcattcaatatcagtcagaggttttaatgatttttgttttttatcttgagagttggagactagaagatctaaaataggaaaattttggcatatccatagatagaatggaagctcttggccaaaaataacgtgctccaagtcatgaaaaatagcacacatgcacaattaactacagagttacacaagatggtgtcttttcattcgattttatttgaactcttattcttctctatcttttacgctttgtatccttgttaaattaactcttccattttttcctcatcctatggggtactttaaacattttattcaataactcttaaggcaatttttacaattctattcacatataaaattgtcataagcatgttttgtgagtgaaaaattctaatttgtaatgcatatcaagtgaaaagcctcagttcagcactcgtcatatccaaaatctgtgttatataataatgtaaaagacatattttcacacatgtagctcaaatgagattcttacttaacatttctttttttttttttttttgagacggagtctcgctctgttgcccaggctggagtgcagtggcgcaatctcagctcactgcaagctctgcctcctgggttcatgccattctcctgtttcagcctcccaagtagctgggactacaggtgcccgccaccacgcccggctaattttttgtatttttagtagagacggggtttcacagtgttagccaggatggtctcgatctcctgacctcgtgatctgctcgtctctgcctcccaaagtgctgggattacaggcgtgagccaccacgcccggcctacattttacaaaatttaactcaatcttttattttaaaaaatgtgcatatactgcctgttcaagtacttactctttttatttattatttgaaattggaggtccatctttttagattgttaggaggtcttcacatatttgaatgagttattaagttgatacaatcattttggaaaaataattatcattatctactacatttaaacacataatttatgactagcagtttcaacagaaacacctggatgttcatcaggctagaatggattggaaagctccatattcattcaacagggtgctacacaaaacaaaaaggaatgaatcactggtccataacataaacagatttcacaaatgtaattttgagtgaaataagccagaaaaaaataaataccatatgcttccatttatatgaagacaaagataggcaatattaatctatggtaacatgtgagactgacttctttttctcagcatcagctgagagcctgaaaaatatttttctggggtgctaaaaaagtgccagatcttaaaaatatttgtacaaaagataataatatttgttttttatataa

SEQ ID NO: 1886377 - DNA, 4001 bp, Homo sapiens
agctgtggttccggtctctgctggttattgcttgtgctgcagggcagaaaacaaactgaacagtgtataatctaggtggactgatttggttggaaattattttactcccacaagaagagaaataaaatcaaataatatagatttttttcaaccaatacattcttaaagtcttctatttccatccttctgcttaaggctaaagtgatctactttcagctgtattttttatccaggtaataatattatcattttttttaagtgaaagcctcactgaacaaaattaaaacacacaagcaaaagtcaaaaggcaagtggtacatttcagccttctttcttagactattcagaaaaattccagagttaaaacattcagcttcattttatatatcctagcaatgctagcaattggtctaattctagaatcaattgcttttctattctaaatataaagtaaatattaaaattatatatttggacatgttgtgaattttagcttcccctctcaacccctcatttttgagttccagataaatatgtgaactacactaacgtgaacagctagctcaacagaatgaactacattcatgctatagtaccccagagtgaacttaaatttgggaaaactaacttttctgatagcaactacagtaaaatacaccatataaatgttcgattttaaggagaaaccacctatctctgtgagaaaccaagtgtttaaaaaacaagtctgatacaaaatgataccatttttgaaactcccctgtgggttcctcatatcctaaggtgaaagttataaagttgaagatgaaaagctgactggcctgaaactcccctgtggtttcctcatattctaaagtgaaatcaacacgttaagtgggtgtgtagacatttacacataaagctcacagtacaaaaatgaccccactaacaagctccttttataaaaccattttaatttagaaagcttattctatatttagcttaggctgaattcttctcttcacctccccttcctcaaaagaatgcacagaaaaatatcattcaggttaataagagcagtgagccgagactccagcctggctctgcttagtaaactgtaggtgtggatttagaaggcatactttctcctaaacccttctatgaacatgtacttccccgtccccttaagttcagtaagtttaccactcaaataattactctctcaaactacctctttcaagcttaaaagggcactaatgcggttattctaaactgatgaataaagctcactttctaccggctttccatttgaccaagtctgtattacttaaaacaaaacaccctaactcctaaaagccatttcttcctttaaaccattttatcccacttgcgacgtccccgcagacacagacttggaattgcttacgtgtagtccgtgttattctttcctacatggatgggttgttttcagttttgcttgcagtatttctggcatttcccgttacaacatcctgctctgccagcatcttcagggcaaaggttgggggcctagcccagctcccagcggcaagtacactaggctctaacttcgcttgtcctctctgcaggccctgccgaagctcccgctggtttcccgcagcgatcccgcgcaggtgagggtactggggagcccgtggccttctccgcccgccggctcctccccatcagccgtcagccagggctctcggcgccggggaagcctcccaccgggtcccaggccacccaagcgcggtcaaacgccggcggcccggcctcgcttacctgacgcagccgcgcgtccgcctcgacccatcaggcgcgcagggcccgctcccgaaactcgcgcgggctctcgcagtcggccgcgcggccgttagccgcgaagagagcgtcgcgcacggtggcgcagccacagccgtgggccgccgcgcccaggtagcgctccagctgcccgcaaagctcctgcagtgccgcctcgccggggcccacgcgcgccggccacagcagcgcccaccgcccgagccccagacctcaggccccgccgccgcccacgtccagctccggcggcagccgtgggaagcagtgttccagaggcggccacagcgccgctagctgccggcgcgcgccgcggaaccccgcggccgagagccggccggcccagctgggcggggacacggcggcctcgggcttgtgctccagccccagccgggcccctcgcgccgctgcggctgctgcgcggtgcggtcgtgacaagtcacagcaaacttgccctccgcgccgttccaagccaccaggaagcgcaaccggtgcccctggggatcggcgaagaggccctcccggagcggcgcccagccctccaggctgtcgggctgctcgtcctccatggccgtcggcggcagcggccctagggcttggcgggcgcgggcctgacctcgtcgcaccgcctgtcaggggacagtcccaggtgaagcatttttcgctccacaattggtattttaacaatatgaatgaaaaaaaaaacctcaggtgttttgatagaaataacagacgtgcctaggaatcatcttccttgaagggagaggagggtcttattgaacttgaaaaaactaaataagcaaaattgatacataaggacacccttctctttacccttacctattcttaacaactttaattcatttctgacactgtcaccaactgaaaaacggtccaactaaaaaaaaaatcataaaggtgagaaaaattgtgacgtgttctatcctaatccaatatatctaaaccaattttactgatagagaaaatatattaagtgaatgatgtaaatacattaatataggtaacaactctttgaaagtaaagtttgcacataacatgaaatacatagagaattactgccgtctcgaaggagagaacccttgatggggagtggtagtcaaaaaggtgtacgagcaagtcatctgttgcaaggtgatgggaggagatatttttgcaggcattcaatatcagtcagaggttttaatgatttttgttttttatcttgagagttggagactagaagatctaaaataggaaaattttggcatatccatagatagaatggaagctcttcgccaaaaaataacgtgctccaagtcatgaaaaatagcacacatgcacaattaactacagagttacacaagatggtgtcttttcattcgattttatttgaactcttattcttctctatcttttacgctttgtatccttgttaattaactcttccattttttcctcatcctatgaggcactttaaacattttattcaataactcttaaggcaatttttacaattctattcacatataaaattgtcataagcatgttttgtgagtgaaaaattctaatttgtaatgcatatcaagtgaaaagcctcagttcagcactcgtcatatccaaaatctgtgttatataataatgtaaaagacatattttcacacatgtagctcaaatgagattcttacttaacatttctctctctttttttttttttttttgagatggagtctcgctctgttgcccaggctggagtgcagtggcgcaatctcagctcactgcaagctctgcctcctgggttcatgccattctcctgtttcagcctcccaagtagctgggactacaggtgcccgccaccacgcccggctaattttttgtatttttagtagagacggggtttcacagtgttagccaggatggtctcgatctcctgacctcgtgatccgcttgtctctgcctcccaaagtgctgggattacaggcgtgagccaccacgcccggcctacattttacaaaatttaactcaatcttttattttaaaaaatgtgcatatactgcctgttcaagtacttaatctttttatttattatttgaaattggaggtccatctttttagattgttagaaggtcttcacgtatttgaatgagttattaagttgatacaaccattttggaaaaataattatcattatc

SEQ ID NO: 1886378 - DNA, 4001 bp, Homo sapiens
caaattcaatttggaaatggcaaggattggttttggaaagaaaaatgactgaggatatgaccgggtgaagacagggccaagcagccaagttcacatcattttctgggacgaagcagagaatggggaagacattttggatggggtgttgcagtctgtgaagactgatggggaaagggggtttttaggatgtttgcagcgcattaataatccactcccccacccatcctgtaactgcattcaattgtttggggttttttttccccctgtatgctcattacggagactaggctatgtaaatccctagctatactcacattatatactaccatttatttggcatttatgtgtcaggtattgtagtaagcacttaaacatgcattttctcatttgacccaaaaaagaaaagaatacaccaacaaaaaacctttgagtttgctattattattaattactattattataatttcaattttagggataggaaattgagactcagaaagataaaatgacatgtctacattaattggtgggtcaagatctgaagccaggtctctgtgattccactgaacaaattatttagcatgagcctcctccgccccaggcactctaggaccctggatctaggcatgaacctgacgaagtccctttgctcgcggaatgggctatccagaacatcatcagagtgaaaggtgctatgtacacagtaaaatggggaacgagccgctcaaaccctactccatcaggactcttgggggtgggcgatttccgcccccggcccggggcgttgcattaggtcggggccgtcgggtcgtggtgccggcggctggctgggcgcggggctggcggtgcgggtcgcaggcggctcccagcggcaggaccggcagcagccctccctcacccggggcgccgggaccacggacgcacctcactgtggtccggccgctggcggcgctcggggacccattggccccggcccgcggcaactgtcggccccgcgcggcgcccgccctcatgctggagcccgggagtccctcactccacctctccctgccacgccaagggggcccgcccctcccaggctctcctgcctggggcgacccagtcccacgacccggtccggcccagggacaccccgacccacctccccactcccgtcccgttagaccgcgacccgtccctgggaccgcctaatgtgacacgcccgggaccctccctgcaggcgactccctgcagggcccccgccctggacactccctccaggtgaccccgttccgctcgctccgtgaggtgaccccgaccctctccggaccacctcctcaggtgaccccgaccctctccggaccctccccgaccctcccctcaggtgaacccgaccctccccggaccatcccgtcgggtgaccccaaccatccccgaacccccccaccctcccctcaggtgaccccgaccctctctggaccctcctcacaggcggccccgccccaccccgggaccctcccgccaggtgaccccgacaaggccgggccctcctgcctgaggtgactcctacccggctggggacccccgaggcctccctcgctccttaagtgagggcgactccgctcatcccgggacaccgcgccttctcctgtaaactcgacgcctgccccgacggccgaattccagaaggttcctcgccgccgcctcgccttcggtcgcgccccagcgcccggccagaggcggggaagcccttcccccggtgccaggagtgacgagggcccaaggaaagacagtgcgtgaggagaaatggagaaacggccaaagtcgagtttccgggtgtgaagacttccactgctgcgaaacgcacgtgcgcagagtcattcctgtcagaggccaccgcgccctcgctcggctaccgccgctgcgcgccccctgctggacataggcgcgggcacagagcagtgcgcaagcacgggctgccgcgcggccgggtgcgaaccgcgtactcgcagggtggctgactgcgcacgcgcaagtcagagcgccctctgccgggcatgggcgacatgcagggggcaccgcgcaggcgcggggttgggctggccggagcggccgaggcggccgggggtggaccgggcacctgcaggggcggccgactgcgcacgcgccatccgcggcgccccctgcaggagccggagcggccgctgcgtccgccagtagcgggttgcaggcgcaccctcccctccagggcggccacgcagctgtcagtgccgccgccactgcgaggctggagcggagcccgggtggccgagggaggggaccccgcgagagggccgcgcgccggccgccgccgccccggcgcccaggctcggtgagtgccgccgggacccgccgctcgcgcgctcgttcccggggcttgcggtccccacccgggtccgcccttcccaccctcgccggccagctcgggcctcgggccccccccagctccggcctggcctgcgggcccctcccgcgaccccgcatcccctccggccgcgcccgcgcccgcccctcctgccgcggcctcggctccgggcgctccctgcaggtgccgctccctcagcgtcggctcccatccgagccttgggcgtgtcccgcactgcgggcagtgcctgagcccgcgccgcgcggggaagctcgaccctgcggagactcggcacggcccgggccctctgtgtgcgcccagaaggtggatatgtagcgaccgacagccccggccccgagggatgcaggcgtccgccgcgcacttgcggagatggcgccgctttccggccgcagggatgccgggcgcgcggtggcaaagccgcccgggttggattccgcctgctcccaccctctggttccgaggagcctccaaatccgaatccaaggcccacggtccgcggcgggcgtttgctgcgccctccactgtgtgggaacgggaaaggggagccgctagtccaggcggaggggcttgtggcagtcgccggaggccgcgttctcggcgccctcggtcaggacgcctgtgtgcatcgcgtccgtgtgtcttggctctgttccaagccggctccacgcttcagaagggccgggacggccttatggtcaggggcgtggggaaggcgcttggtgtctgtcgcacagatgaagccatgtcctcagggggtaattgccgcttgttctccgggttacgtcctggactgtgcactccgggaaggcgtcgattggatcttgttggggtttgtgttcctggaactccagaaatgcccgctgagtgagtagccgagaccccgcgacagcatggagcccaggcagggagcacgtgggagaggttcactcttctcctgggcatcccgtcattttattcagatagtctgggcgctgccttttgtaaacttgaaaagactaagactgttttagaaagtttgcctcatgagaaatgtaagagaaagggaaaaatagataaaaatggatgtcatgggaatctcccccacactttcatttttaacttcttagataatttttcttttaaattgaacctttgctaactctacctgaaaaacaggacgacgtctctcccttcctaaagtgacttaccaccattctgaccagacaggcttttggaacaggagagggtagcacgagttgtttctaaaaagatgttagccttccatctgcatgagccaggcagtctcatgggagcccattttgacgtagtctcaactgggaaggcccaggtaagatccctagtttgccatttcttccccagccctgcttccggagactgtggaatctattgaggggaagcattctggaactttggggacggctctgacggggaaggccttgtgcacaatggaaagatgaattggaagccgggctaagtggctcacacctgtaatcccagcactttgggaggcagaggcgggcggatcacttgagttcaggagttcgagaccagcctggccaacatggcgaaacctcatctttaccaaaaatataaaaaa

SEQ ID NO: 1886379 - DNA, 4001 bp, Homo sapiens
tctgtttgggagaaccgtgttccactgaattgacctctgtagcctttctaatattgctctgtttgattaacagattcccttctacaccccgataggaggagtctactttaagacttcaccaggttccagcctgtcccctgcctccccccaccattgcctggttccaggctcccagggatggcagctaccatcttggctttgaagagtggggaacatccggaggtagccccggccatggtggtggatgaagaggaggtagatgggaccaaggacccagaggtacatggggggtacccagacccctgctgttctcaggaagcacaggctcagcaggctggtggcggcaggttcaggctctgtctggttccagacctgagggaacacaaagaggacccttaggatggtacaaggcaggggtccccagctcacctgcccggggggccaggcaactttttggatctttaacatttacacaaaaatgtgccaagcactctttggaatacctactaattctcaattcctttcatcctgacattaaccctaggtagttgcaattatattgatttgcagatgaagaagctgaggaccagagaggttgagtaactttgctgagtttacccagctgaggagtggaagggctgggatttgaacccagggaactgggccatgtggtctaggagacctgggctccataatcattgctaggcatggactgtcagttaatccttataacaactccaggacgcagacagtactgtctccatttcagaaaccagcagactgaggcaccaatcggggaaatgcctcccccagggacacacaaatgggaagtggcaaagctgactctgacccaggcttatctgaccccaaacctcgttcgactggtggtcttgatgtatgatttatttttattttttattattaattaatttatgttttagagacagggtctcactctgttgcccaggctgaagtggcacaatcaaagcttaacaaagcttcgaatttcctgggctcaagcaatcctcccacctcggcctcccagagtgctgggattacaggcataagccgcctcaccaggcctggctaattttttttttatgttttgtagagatgggggtctctctatgctggtctcgaactcctggcctcaagcaatcctcctgcctcagcctcctaggtactgggattacaggcaagagccaccggcccagcttgatctgttattttcatctcagcaggtctgctggtcctatctaaccctagaagaaatttgaagtttagtggacgtggcctcttcaattctctctccgctgtctttttactcctcctggtttcacaactcactggctgtgcaaactttaacctctctgtatctcagtttccttccctgcaaaagggggataacgagactctacctctatgagttgtattaaatggatgaatagcagcaaagttcatagcagcatggcacaaggttgggcacaaggctaggcacagagaaagccctcagttcattgccagtttattgcttcaactccctggccctcgaaatgctggcagtttgcaacccccacccccactccatgaactccactccctggagtcctttgctaagagcaatggaaaaagaaaccagagaggtaagggctctccgggggtaggagggcttgggggacccactagctttatgcaaagaagggtcaaagcctctagtagctgggaggtctggtggccccttaaatagagctgggctctcggcggctggcttggtgaaagaaatccaacccgctgcagtgagggggccggagtaagtctcctcgcttcccgggtccaggaatttgggggtctctcctctccccagtatcgcagcccgagagatctgcagccaaaccaagcctggaaaaggagagtggggcgcgatggggggcactcaccccctgccccgcgcagggctcagcaggcgcggccatcggcgccttctgtcgtcgtgggtcccagcgtctgtctgtcgctaagtctctgggcagactgctcggccgcgatcctgccggagaagaggcggggctgggctggtcgggctaggctggtccggctgggattcgagctccgggatcgggaggccccgggcaaggtccagctgcgcggcgggagtgaggccacgggaggtgaaaacaggcgaggtgggggaggggggaagagaggcgctcggggagctgggacgggcaccgggttggggggtcccggaacccctgaaagttcagtgacacctccatagttccctcttccccctgcaacaagaatcactccaaacttcccaaacactttggacccagcaatttccaggagttcatcctgatgagagaactgaaaggtgtgcacacgttagtaacaaggaggcctggtgaccgcctaagcgtccaatcgcggggaccaccgggtcgaggccgagaggatggagaccgcatcacaggcacctcgctgctggaatggagggtggtggggagaacttagaagattatgcaatgggctggcagggctatacccagccgccctggtaagcagaaactcaagaaacctctagggtcctgttttctggtcgtatgatcccaggagtgcacatgagcccctcgggtgtctgaacagaagggcataggagggagggccgcagccctgcagtcttactctgctggtgtagcggtcacctgccaactcccaccccaccctgcaccgcgggctcctgagtcggcagattaagcattttataaattctattttaaatacgtgttttaaacttgtcagatatttgtcttcatttcagtccctgcgcctctacctcttgctgtggtcgcttatttaacactggggggctacgttctgctaagtcccagggagagactgttcctaatatccgagggagatattattcctaatatcacgctgggtgaacaccacgtgtgtacagcctctgatacgattggtaatatccaagggagatattatcctaacatcccagtgggtgaacaccatgtgtgtaaacgctgtggtattattagaaatatccaagggagatattactcctaatatcacagtgggtgtacatcctgtgatattattcataatatccgaaggagattttactcctaatatcacagtgggagtacacactgtgatattatttataatatccgagggagattttactcctaatatcgcagtaggtgtgcaacctgtgatattattcataatatgctagagatatattactccagtgggtgtacactctgtcacagaattcgtgatatcctagggagttattaccgctaatatcacagtgagagtacaccctgtgatattattcatactatcctagaaagatattacttttaatatcacagagggtggacaccctgtgatattattcgtaatattctatgaagatataactcctgatataaccgtaggtgtataccctgtgatattatttgttatatcctagggagatactacacctaataccacagtgggtgtacaccctgtgatatgatttgtaatatcctagggagatataactcctaatatcacagagggagtacaccctgtaatattattcataatatcctagaaagataatacttttaatatcacagtgggtgtacactctgtgataatattcgtaatttcctagggagatactactcctaatatcaccttgagtgtacactgcgtgatattattcataatatcgtagggagctattgcttttaatttcacagtgggtgtataccctatgatattattcataatatcttaagaaggtagtactcctaaaatcacagtgcctgtacacactgtgatattattcataatattctagggagatgttactcctaatctcatagtgggtgtacaccttgtgatactatttgtaatgttctagaaagatattccttttaatatcacagtgggtgtacaccctgtgatatgattcgaaatattct

SEQ ID NO: 1886380 - DNA, 4001 bp, Homo sapiens
ttgggagaaccgtgttccactgagttgacctctgtagcctttctaatattgctctgtttgattaacagattcccttctacaccccgataggaggagtctactttaagacttcaccaggttccagcctgtcccctgcctccccccaccattgcctggttccaggctcccagggatggcagctaccatcttggctttgaagagtggggacatctggaggtagccccggccatggtggtggatgaagaggaggtagatgggaccaaggacccagaggtacatggggggcacccagacccctgctgttctcaggaagcacaggctcagcaggctggtggcggcaggttcaggctctgtctggttccagacctgagggaacacaaagaggacccttaggatggtacaaggcaggggtccccagctcacctgcctggggggccaggcaactttttggatctttaacatttacacaaaaatgtgccaagtactctttggaatacctactaattctcaattcctttcatcctgacattaaccctaggtagttgcaattatattgatatgcagatgaagaagctgaggaccagagaggttgagtaactttgctgactttacccagctgaggagtggaagggctgggatttgaacccagggaactgggccatgtggtctaggagacctgggctccataatcattgctaggcatggactgtcagttaatccttataacaactccaggatgcagacagtactgtctccatttcagaaaccagcagactgaggcaccaatcagggaactgcctcccccagggacacacaaatgggaagtggcaaagctgactctgacccaggcttatctgaccccaaacctcgttcaactggtggtcttgatgtatgatttatttttattttttattattaattaatttatgttttagagacagggtctcactctgttgcccaggctgaagtggcacaatcaaagctcaacaaagcttcgaatttcctgggctcaagcaatcctcccacctcggcctcccagagtgctgggattacaggcataagccgcctcaccaggcctggctaattttttttttatgttttgtagagatgggggtctctctatgctggtctcgatctcctggcctcaagcaatcctcctgcctcagcctcctaggtactgggattacaggcaagagccaccggcccagcttgatctgttattttcatctcagcaggtctgctggtcctatctaaccctagaagaaatttgaagtttagtggacgtggcctcttcaattctctctccgctgtctttttactcctcctggtttcacaactcaccggctgtgcaaactttaacctctctgtatctcagtttccttccctgcaaaagggggataacgagactctacctctatgagttgtattaaatggatgaatagcagcaaagttcatagcagcatggcacaaggttgggcacaaggctaggcacagagaaagccctcagttcattgccagtttattgcttcaactccctggccctcgaaatgctggcagtttgcaacccccacccccactccatgaactccactccctggagtcctttgctaagagcaatggaaaaagaaaccagagaggtaagggctctccgggggtaggagggcttgggggacccactagctttatgcaaagaagggtcaaagcccctagtagctgggaggtctggtggccccttaaatagagctgggctctcggctgctggcttggtgaaagaaatccaacccgctgcagtgagggggccggagtaagtctcctcgcttcccgggtccaggaatttgggggtctctcctctccccagtatcgcagcccgagagatctgcagccaaaccaagcctggaaaaggagagtggggcgcgatggggggcactcaccccctgccccgcgcagggctcagcaggcgcggccatcggcgccttctgtcgtcgtgggtcccagcgtctgtctgtcgctaagtctctgggcagactgctcggccgcgatcctgccggagaagaggcggggctgggctggtcgggctgggctggtccggctgggattcgagctccaggatcgggaggccccgggcaaggtccagctgcgcggcgggagtgaggccacgggaggtgaaaacaggcgaggtgggggatgggggaagagaggcgctcggggagctgggacgggcaccgggttggggggtcccggaacccctgaaagttcagtgacacctccagagttccctcttccccctgcaacaagaatcactccaaacttcccaaacactttggacccagcaatttccaggagttcatcctgatgagagaactgaaaggtgtgcacacgttagtaacaaggaggcctggtgaccgcctaagcgtccaatcccggggaccaccgggtcgaggccgagaggatggagaccgcgtcacaggcacctcgctgctggaatggagggtggtggggagaacttagaagattatgcaatgggctggcagggctatacccagccgccctggtaagcagaaactcaagaaacctctagggtcctgttttctggtcgtatgatcccaggagtgcacatgggcccctcgggtgtctgaacagaagggcataggagggagggccgcagccctgcagtcttactctgctggtgtagcggtcacctggcaactcccaccccaccctgcaccgcgggctcctgagtcggcagattaagcattttataaattctattttaaatacgtgttttaaacttgtcagatatttgtcgtcatttcagtccctgcgcctctacctcttgctgtggtcgcttatttaacactggggggctacgttctgctaagtcccagggagagactgttcctaatatccgagggagatattattcctaatatcacgctgggtgaacaccacgtgtgtacagcctctgatacgattggtaatatccaagggagatattatcctaacatcccagtgggtgaacaccatgtgtgtaaacgctgtggtattattagaaatatccaagggagatattacttctaatatcacagtgggtgtacatcctgtgatattattcgtaatatccgaaggagattttactcctaatatcacagtgggagtacacactgtgatattatttgtaatatccgagggagattttactcctaatatcacagtaggtgtacaacctgtgatattattcataatatgctagagatatattactccaaatctcatggtgggtgtacactctgtcatagaattcgtgatatcctagggagttattaccgctaatatcacagtgagagtacaccctgtgatattattcatactatcctagaaagatattacttttaatatcacagagggtgtacaccctgtgatattattcgtaatattctatgaagatataactcctgatataaccgtaggtgtataccctgtgatattatttgttatatcctagggagatactacacctaataccacagtgggtgtacaccctgtgatatgatttgtaatatcctagggagatataactcctaatatcacagagggagtacaccctgtaatattattcataatatcctagaaagataatacttttaatatcacagtgggtgtacactctgtgataatattcgtaatttcctagggagatactactcctaatatcacctagagtgtacactgcgtgatattattcgtaatatcgtagggagctattgcttttaatttcacagtgggtgtataccctatgatattattcataatatcttaagaaggtagtactcctaaaatcacagtgcctgtacacactgtgatattattcataatattctagggagatgttactcctaatctcatagtgggtgtacaccttgtgatactatttgtaatgttctagaaagatattccttttaatatcacagtgggtgtacaccctgtgatatgattcgaaatat

SEQ ID NO: 1886381 - DNA, 4001 bp, Homo sapiens; identical to SEQ ID NO: 1242566

SEQ ID NO: 1886382 - DNA, 4001 bp, Homo sapiens
ggctggggcaagcatggccatttcggcacctgtcatccccgcgatcggctctgaccttggtcggcacccttggcgcagaggctggcaccagccagacgagccttggttgggtcttggggccccaccaggaggcctgtgttccttcccttgccccacagagatgcccagtgtcctgtgaaggcagcatggccaggagggttttggtcaatgagacaaaggccccagggcttctgaaaaggtccctcccctggacgaggggacagctacaggaacagcccaggtgcccccacctgacctcaaatgtgccatcaggcctggggctcagcgtccacctcgttaccacagggagaggctgtgggaggctgagaggctgtgggccgggaccacgacactgccggtccccacttggcctccacagtgcctgccggggagctctggcgccacagggaatccccggcggctggggctgctgtccctctgattttcgcttcttgaggccagtgagtcccaactaagtcacaaggtccctttaaccctttgccactggcccagatgtaagaacccaacggctgagacccagagggttctggggtgcccagggacacatggagccccagctgggccctggaagcagcggactcttgctcctaccccaacacgcctcagacagggtgacaagtaagctagtgcccggcagtggtgcccatgagcacgtggagggcctgggaggctgggctgatgttcaaccttgggggatggggccacctgggcccagctcccttctcgctccgagcagaatttctcagtctgggggttctccagccccccactcccctctccccatccttccctgtgagctcctggtggtcctcctgggacctggggctcttcccctcagtccttccccgtgagctcctggtggtcctcccgggacctggggctcttcccctcaatccttccccacgagctcctggtggtcctcccgagacctggggctcttcccctcaatctttccccgtgagctcctggtggtcctcccgagacctggggctcttcccctcaatctttccccgtgagctcctggtggtcctcccgagacctggggctcttcccctcaatccttccccgtgagctcctggtggtcctcccgggacctggggctcttcccctcaatccttccccgtgagctcctggtggtcctcccgagacccggggctcttcccctcaatccttccccgtgagctcctggtggtcctcccgagacctggggctcttcccctcagtccttccccacaagctcctggtggtcctcccgggatccctggctcttctctaaggagttcggttatcaggtttcctcacccggctggagcctaagacgccattcacccctgcagggatgccgccctgccctaccgcccctctcctgacccctggatgcccccaggaggggctgctgctgctgctgctcccgcatctgcccggcagaggtgcccacctccacgtcaccttccactcgccccaggtggcaaatgtgcgcgtgtgtctctgagcgagggcacgtggagtcagagcatctgcagagatcattgtggccgtcagaggagttacctgagacagacctttgacgtctgaagacatcgttgtggccgtcagaggagttacctgagacagacctttgacgtctgaagacatcgttgtggccgtcagaggagttacctgaaacagacctttgccatctccttgagcagcagcggagacccctggcctcacaagcccgctgtgtgatcttgaggcagaagcgggctgtaggcacagaggcaggtgggggaggcaggagcggctggcatcaaagctggcaacctctcctctcatcctgacccggaggaggccgttggggagctgcaggccggcctcggccatcctcagctgtgtccagccatccctggctgtcccctgtgcccgccggcttatgccagaatccgtgtggcaggaggggctggccagggaaagggttaagtttaatttctcctgatttctatttaatatcatgctctcccggcaggagcggcagctgtgagctgattgcaggctctcattatgcagcagcatcgctaatggcctgtgacaaagacatgcggcttccaggccttacccccgagagccaattaaacacacatactcccttcctgtttgcagcacattacaatgaaattaaactgaatttcaaaatcattttctactaaagacatctctgtacaataattaatgcatgtgattccgccccggctgaaacatgcctcagcactggcgactgcgagtgtttccacgctcgcagccccgcatctcacacggctgccctcccagcggctccgggagccccgcgactcgcaaaatccacagggctgtggttcctgtgctttcaaagaagaaaacgtcttcagcttttacctgaatttaaaaatacaagaaccggccagacgcagtggctgacgcctgcaatcccagcactgtgggaggccgaggcgggcggatcacctgaggccaggagctcgagaccagcctggccaacatggcaaaaccctgtctttactaaaaatacaaaaattagccgggcgtggtggcgggcgcctgtaatcccagctacttgggaggctgaggcaggagaattgcttgaacccgagaggcagaggttgcagtgagctgagatcgtgccactgcactgcagactgggcgacagagcgagactccgtctcaaaaataactaactaaataaataaaacaactgcagcgtgagtcggattggggtcggggcattcagagggcactggagggatgctcagagcaagacctgctcaagtccggttcctgtaattctgcatttgaagggaagtcatggacaggctgtttccccagatcagcatgcgctaatggggatgtataaaaaagataaattgggagggagtgtttgatgtgctgaccacgtcctgtcacagagaggcttctagggccccagccctgggtcctctgctgatgtccagcccacgaaggtgcctcccagggtaccttgggaagcctatgagatgctgcgtggggcactggcctctgctctaggggctcacggagccttcactttgcaaacgtgcggaactgccacacacctagcacacctgcctcacagcagcacatgctccagggcctctgggacccacaggatcaggccatgaggcggagaggctgcaggccaacattgccccttccagcatccctcaaggagcccatcccgcctgcacgctgcagccccccgctctgctccctgtggaagggcatggggcagatgcgtttctgattttgggccagcagattctgatgcatgaaaatgggcctcttttttttggaaaatattacttaaaggttattataaaataatgatgttcagcataaaatatagacaggccaaaaaaaaaaaaaaaaaaaccaggaaaagaaaaaccaccgcaatctcaccacccaggggtcaggagcaacgtgcacatcttccggataaatacactacagtgagtacctgcagccacacaaccacgtgtgtccactctccaaatgtccacccacgcacgtctgctatccaaatatccatggacatacgtccactatccaaatgtccatctgagagacaggactagctggatttcctaggccgactaagaatccctaagcctagctgggaaggtgaccacatccacctttaagcagggggcttgcaacttagctcacacccgaccagtcaggtagtaaagcgagctcactaaaatgctaattaggctaaaacaggaggtaaacaatagccaatcatctatctcctcagagcacagcaggagggacaatgatcgggatataaacctggcaacggctgccctctctgggtcccctccctttgtatgggagctctgttttcactctattaaatcttgcaactacactctcttctggtccgtggtagt

SEQ ID NO: 1886383 - DNA, 4001 bp, Homo sapiens; identical to SEQ ID NO: 1242574

SEQ ID NO: 1886384 - DNA, 4001 bp, Homo sapiens
ttctaagcgattctcctgcctcagcctcccaagtagctgggattacaggtgcgtgccaccacaccgggctaattttgtattttagtagagacggggtttctccacatcagtcaggctggtctcgaactccccaccttaggtgatctgcccgcctcagcctcccaaagtgctgggattacaggcgtgagccatcgtgcccagccgtctctactaaaaatacaaaattagccgggaatggtggtatgcgcctgtaatcccagcttctcgggaggctgaggcaggagaatcgctttgaacctgggagccggaggttgcagtgagccaagattgcgccattgcactccagcatgggcaagagggaaactccgtctcaaaaaaaaaaaaaaaatgcaaattgctgccacctctccaacctctgcatgtcaccctcagtccacaagtcataaagctctcaaaagagagcaagccagtggggcagagcccttgcctgtcgtgttcaccaagatattccctggtaaatgattaacagatctatctctaataaatgagaagcagatgaatgatccagtccgggaaggaactcaaagatcattcaacgtccgtcctcccttcataaaggggtctatagcagttcaatgattcaaaactctcctgggctatattaggctgtacacaccgatattgcatatcgctgactttcaatatgtgttagcaaccaggaggacctctgcaatgctgatgccacatggccaaagctgaaagactgctttcactcatattgctagcaactaaaccatcatacactttcccaaatgaatggagatggcgggggggggggggagttcattcctgaagacaggacagaaatactcatgggatccttcttcttattttactgctgtctgaaaaccatgacagctttctgggatcaaaattcaaaaactctgcattagaaaaacaattcaacgttactgctgctcactgggatgtatcaatacaaaaataaagcaatcttaaaatgcagaatattccggtcttagaccctaaccctataaaacagggttatgagcagggcacggtggctcaagcctgtagtcccagctactccagaggttgagaaaggagaatcgcttgtgcccatgagttcgagatcagcctagacaacacagcgagactccggccccgctcccaaatttttaaaaataatataataaataacaatagggttatagcgatatctacctatagggcgggtataagacttagataatccgcgtaaagcccttagctctcagcattagctgttaacgacagtgactggtcgctgtataaagaacagtttgcaaaaccctttcacgcctcttatcgtgtctggttcactgagtaactgcgaggtggataaagccgaacgccgccgagcccaggaggacacgggctggcacgcggggccacaaagctggttcgcgaggaggtgggactcaagcgcaaatcgctcaacgcccggcgctttacaaagccgagcaaggaggctggaggtcccggttccgatgtccgaggggaccgggcatccagtaaacagcgggaattccgcaagaagtgggtggaagaggtagcgaggagaagagcaggagtttggagacggaggaggcgggggggcgggaagctctggccaggtgctgtcggcctcactgcgcggaccaggtcagggccgccgccctcccgcgctcccccgcggccggcgcaggcgaatggcgtcacgcggcgtccagagcagaccagccgcccggcaccggcggagagcgcctccccgctcacctgtcgggccttgcccagggccctcgcgctggtcttggccgtcctgccgcctcctgggccaccacatcgccacagcaaggccagcggcctggccaccgctctactgccggccgccgccagcagccggtaccacatccccagacccagatcccgcgccgcccgggcgcgcgcatgcgcaatgggagagcggtcctagggccccgcgagcgcagggaggactcgcgcaggcgcggcaggggcgcggcgccggctggggccccgtcttgggtgtccacgccgtcgcctgaccgttcgagggtttgatcgccagcgcagcctcgccctgcccagacagctgggccctaaggggatagccagcgcctttagacttatcttaaatcgggcatcggcatcaacacttatttctggggtcctccatggaaagcagctcccgaaacaacacccgcccggtccgccctccgctgcactggaaaaccgcccctggacgtttctgccgcagtgtccccctcacggagttccgtttgtctgcttggtcggttgttctctggagccccaggacccaggccgcttgtatgtgcctgcggccgcacggccccaacacgcggacttcgagcggtaccgggagacccgcgcggcctcctcggagtggacagtgaagcagcagctgggctaggcagtggggctgggcctgcccatggggacccgtccacgtctccaggacatcagcctgagcctcttcgcagcctcgttttctgttgaccgagttctgcaaggggacgtagaggaaccacagcgttcttgcgcttgagaccgctgtgattttctgacattttggaggcagaaatgcctggggaaaggcccacagatgcaactgtcatccctagtgccaaaagggaacggaaagcgattacccttgacctcaaattggaagtgttacgacgatttgaagcgggtgagaagctcagtcagatcgcaaaggccttagatcttgctatctctacagtggcgaccattcgagatagtaaagaaaaaatcaaagcgagttcacaaatagctactcctctgagagcctctcggttgactcgccatcgaagtgcagtgatggagagcatggagcagctgctgagcttgtggctggaagaccagagccagccaaatgcgaccttgagcgccgccatcgttcaggagaaggctgagtttgatgacttacagcgtgaacatggcgaaggttctcaaacggagaggtttcatgcaagtcaagggtggcttgtgagattcaaggagtgccactgtttgccccacttcaagatgaacagcgcagctcccagcaacaaggacatgtacacagaaatgctgaaaagcatcatcgaagaaggtgagtacaccccccaggtgtctttaacgtagatgagacgagacttgattggaagagaatgcccaaaggaacgtttatttccgaggaagagaatgctgagccagggtttaagtcatccaaagatcgcttgatgctgctgcttggtggcagtgcagctggggactttaagttgaagcccttactggtgtaccgctcagaaacccgcaaggctctgaagggttcttgaagcccagtttgcccgtgatttggcgctccaacagaaaggcttgggtgaccaggagcatctttcatgaatggttcacttactttttttgccgttgaaaaatacagtgcccaaaataatctcaccaacaaagcactgctcatactagacagtgcgtcatgccactctgtaaatttgagcgacctttctgataactaagagtagaataccttcaggccaggcgcggtggctcacgcctgtaatcccagcactttgggaggccgagacgggcggatcacctgaggtcaggagttcgagaccagcctcaacatggagaaaccccgtctctattaaaaatacaaatttagccgggcgtggtggtgcaggcctgtaatcccagctactcgggaggctaaagcaggagaattgcttgaacctgggaggcggaggttgtggtgagccgagatcgcgccattgcactccatcctggacaacaggagtgaaactccgtctcaaaaaaaaaaaagaaaaaaaagaagtacaagagtataataccttcatgacagtacagctgactcaatccggaccacgtgtcaaggtgtaatctcg

SEQ ID NO: 1886385 - DNA, 4001 bp, Homo sapiens; identical to SEQ ID NO: 1242588

SEQ ID NO: 1886386 - DNA, 4001 bp, Homo sapiens
tcttttttaacatgaattacttctcttacaagaaatactaaatatcttttcctatgtcacttatagatctacaaaagaagtactttgcccaaatttagaattattttcttgttgatctgaattatctgtaatatgaagatacatttttcacctgatgtgtatgtattacatgtgtgtgttatatgtatgtagtgtaaatattttgcaagtaggttgtctttttttcttatttacagagtgttttaagttttattttgctaaatcaacctgcagaatgcttgcttgtgaagttcttaagaaagtctttgtcaacataaaaatgtatctgtataaaaaggcatgtgtgtcttcttctggtactttccttattttgtatacttaaaatatttgatctatatttcatcaggaacttatttctgtgacataaaaatctagttcgttttcaccaaacagcaggcatttcatttatgaataattcacccttcctactaatctaaaatgtcaacattatcaagttctaaattcttacatgtatttgggcaattctagatcttctattctgtttcattcatttgtcttttcagttgttaataaacaatttgtggaaattaatagcacattttgatatatagaaaggccagtctttctcacctcattacaaaaaacattttcatgtcatcataatagtaaaacacagacaacaagtttaattttaaaatgttaaaactttgatatttttatctgatttatgtaaagttgatagacaaagagctcacatcttaagaaaaacgaatcttcctactcaagaacaggaacgacttcccacttcaaagtttccttctaaggttcctcagtaaataacgtatttacgtagatgtacatttatataaaaataaatattagatataatctgaagaattgttagcccagaagttgaaatgtcatgggaattattgctctccttatgcacctgtctatagcgtatataactttatgttggccaggcgcagtggctcacgcctgtaatcccagcactctgggaggctgaggcggacggatcatcttaagtcaggagttcgagacaagcctggccaacatggtgaaaccccgtctctactaaaaatacaaaaattagccgggagtggtagtgtgcacctataatcccagctgctcaggaggctcaggcaggagaattgctggaacccgggagatagaggcggcagtaagccaagatcgcgccactgcactccagcctgggcaaaaagagcgaaactacgtctcattaaaaaaaaaaaaaaatatatatatatatatatatatatatatatatatatatatatatatgttttgaaatgtgtccattcaagataaagtgctgtatagacttaattaacccctccaaggtttccccaggccaggtgctgtggagcctgcagaggcaggaaagccaggaccccggggtcaggagggatcgccccccaccccgcatccccccgccaaaaagggggcacttctcccacacacccgcctcctcccagtccccgcccccagccccagctcctgtcaccttttcttcttgtctctctcatccaagtcagcgctcccgctcgaaaggatgcactccaccttggagacttcaccccggctggcagctctgtggagcttgccgaggtgtttctcttggatattgtacccgcactgggcgaaggggctgtcatcgctctcggcgacatcgtcccccctgcaacaccaacagccggtgaaggagcaggagggcccctggcccttctggcccccgaagccagagctcctcctcatggcggaggctatcagagacacctcagcaccagtccgcctatcacagcctcagaggcccagtaagaccaagccactctggtcagccaccacctccaaccaggaaacttcgcagtttccaaagtcagagccagtaacaagcgaagccaaccagccaagccgcgccaagcgaagccggtatgcccgaccgcgcatgcgcacctctgacagctcgtcactgcgcgtgcgcacaaccgacaggtggccaaccgttctcagcgcgcatgtgcatggctcacgtgtcagaaacatcgatgacagcttgtcaccagccctgcgttcccgccccacgtcagtgagagttggcagagttttcaggacattccccggaaggggaaggcatcctgaagttccagctactctagccccagtcacgtgtgaagacgccattcccacgtgggaacacaggactgagggtagagcagctagagaaccttgggatgctgaaggcctcgcccggggaaacccccatgaggacactctctggcgggcggagctccttgcaaatcgcggctgcagctcgggcgccagcgaaggctgctgagctcagaaccgaggacctcagagtaggcagcgcaccactccctgcccagccagcagaccctcccagcgcagcttctggtgcctgcctgcacccgctcccctggcttgtgcctagagccacctggatggagcccagcggcccattccgcccctacgcagccacagccgctgcagtccggcctggcttccttggttgagactgaccccggggcccgcgctgctggaggaaaaatagtcagaggagatgctgggttgcattcatctgtgtcatattagagtctttcctcagctgtctggggatcctgcgcggtctgctccatttaaaaagtcagcacattaccacctgattggaggctcaatcccctgatgcttagcaactatgagctttaccagaggtcaatcatggggcgttcccttaaaaagcatccagtatttgtacagtatctctggggaaatgaccacgaagggagacctaaaaaacatttctataaacctctgcccgtagagtacagacctggcagtcggcatcctggaagctgagcatgagaagaaaactagggatcaggctcggtgactcaggcctgtaatccctgcactgtgggaggccaaggcgggaggatcgcttgagctcaggagttaaagaccagcctgggcaacatggaggaaccctgtctctacaaaaattagctgggtgtggtggcgggcacctgtagtcccagcttctcaggaggctgagccacgagaatcatttaaaccctggaggcggaggttgcagtgagccaagatggcaccaccgcactccagcctgggtgacaggacgagaccttgtctaacaaaaaagaaaagaaaaaggagaaagagaagaaaactaggagccattcacataaccccgttttcagtacagcactccagtggcctactacgcctagtgtctgccaggccagagaccctcttttttttttttttttttttttttgagatggagttgcgctcttgttgcccaggctagagtgcagtggctcgacctcagctcactgcaacctctgccacccacgttcaagtgattctcctgcctcagcctgccggttagctgggattacaggcgtctaccaccacacccagctaattttttgtatttttagtagagacggggtttcatcatgttggccaggctggtctcgaactcctgacctcaggtgatccaccgcccccccccaccctcggcctcccaaagtattgggattacaggcctaagccaccgtgccctgccgattttctgctttttcaaatctcacctttacctttacttccagaagtacctgaaagtgccaattcctgcaccaggcacttcccagcagagaaaactgactcctaagctagcagtagggagaaccaagtcagttcccacttgtccatgtgcttttcaacttccaaattttgcatattttatttcctttctctttctttttgtgttttttttgagtttacatattcttttaatcttcttactctttgttactctcaaagcttcgctaacatgctaagtgatgcatacattgaatcagccatctctacctagaactgaaactgactttcaatcccca

SEQ ID NO: 1886387 - DNA, 4001 bp, Homo sapiens; identical to SEQ ID NO: 1242589

SEQ ID NO: 1886388 - DNA, 4001 bp, Homo sapiens
taattttaggttatgctgaaaaaataattatttcagtcttttcttcaggtcagtttacttgaaaagaaataatgcgtaatgggttcagtcaaagtcagcctggcaatttgcctacaaactattgtcaggcagtaaattacagaagtagttgatcatcacacatgctcatcagctcactaatagagagaagccaatgacaatttagggagaaaataaccaaaatatatatcacatttattctattcagaacaaatcattttttaacacttattttttttttccctagttaagtttcaatttatctggggctctgtcaggatgacagaaactcatttagaatccatgaagacagctgacagaaagtgcattaaaaattagattttgaattcaaagaatgaaagctttaaatcactacagtcaagtcagtgggacaagactgataccagatgctattttgttcatattattaaggaattattccagccttgaagagaccttgtcactacacagcttctgtctatgtaaataagaatgaagtgagtatatctgttgtcaatgatagaaacagccatccattgcctcaaaacaacaggctggttcattagaggagaatgctaaaagttagaagaaccctgaaaggtcatatatgcccaattccctcattatgtgtatgggaggactgaaatcccataggagacggttagcaggtgtattagacacacatgaactcttcagtttaaatcgagtggtctaagtaagggttaagccactctgttgataggggtttcgggcaagtcactggacaaccctgggcatcattgtagagaatattcatttaccctatgtgtgtttttagtctgttcagcagccattccaccttccttcagcacctcactttattctttgggaactacagaaatcttgaattgcctatgctttttttttttttttaatttgggttttaattatgtaaataaatagcaacatgaaaacgaggagttctaaggtttgtacattatccctaggtgaaaggatttcagattagtttgcgtgtaggatggtaccacccaagataacagaggtctgatctagtatttcctgaagaagaaagccaatttaatacattcaatactgacttctctgacatttttctgtagaaatactgatttactctgtggagtttccaatgtgtacctataactgattaagttgtaggtaacttaatataggtaacttaaataagttaagatgggcagatcatggagttttctacttagttccaggtgaattcttcacatttcctggcttttgaaagttctccttccacaaatcttaaactccagtcatataatctctccccactgacctgggcaaacacgatggtttgttgtggataatacagggaggcagctaatctcatgaaaccaggcagatacactagcttcttcatttttgaacctctagtcaaaaggagtccaataaggccagcaaaaccaataacaccaagtctcggaaaaaatccaggaggtgcattttggagatagtcatagctgtctaacccccactgaaccaaactttgcatcttgggcttactttgggagtacgtgtcctgacaccagcttgtgtatggctcgcaataagtgtcggagctgtgagaagctttcttcaagctggttccttgactcctccacacactgcgatttgccctcgcgaaagctcgtcaaccttcacggaagttttgggaggtgagtcctttttcggtgctgcacagactctgaaggtgaacaagctccggctggctggccccacggacccttctgaattaccttgaacatgtcgctggcaactgcagctccggcaggctcaccccagcctcgtccacgcccacaacagagaggtggccccggtagggccttgatttctccaaccgtaagcgagccgcggtgtgggtgactgcagtagggcaaactcggtgcggtgaaggcttggttcaatcacccctgcctgtgctcttgatggaaccttcaattcaggtatcctgccctcctctctggcacacagtgttaattgttgccacaagctaagtccaccagtctctccctacagggaaatgaagtcctgagcgaagtgacacaaatatggaaaaggtttagaactgatttattctggtagtcatccccaaagcactatccatttgtcctggttactacacctccaaaattccaatgtccgaattttccaatgtttgtattctctttccaatatctgattgtttacgttctccttcagttctatggagctgcctatgaaccttccactaacacccatttttaagttaattgcagtggtctctgttgcttgcaaccaaaaacaaacctaactgatatatcgtacatgtgaaactgtaactaatatattgtacatgtaaaatgggaataattatacttcgctcacaaaggtggtgtcagttttttttttttttgttttgtttttttgagatggagtgttgctctttttgcccaggctggagtgcagtggcaccatcttggctcacagcaacctccgcctcctgggttcaagtgattctcctgcctcagcctcctgagtagcggggattacaggtatgcgccactacgcctggctaattttgtatttttagtagagatggggtttctccatgttggtcaggctggtctcgaactcctgaccttaggtgatccgcccgcctcggcctcccaaagtgctgggattacaggcatgagccaccgcacccggcccagttttttttaatatataaaaataatgtatattaaaactactggcttggataataaaacttaagaggaacccagtcagtattgtttgcttggtttttaagatccttcctatgtagtctcatctttattcctggattctgctgagatgctcaatggatccatgagtcacatgcttaatctcctcaaagaactctctgggcgagaacctacgcacaccttttggtctttctgagacactgggtaatagttgtttaaccacacccttgactttctgttcagaacacactttcctaagaatgaatcttctcgttttagcttcttttgcaaaatgaataggcagagaatttcccaaatcatgaaatcctggtttttgtttaatagtcttcctcaatttatctccctcctcttgcattttattataagcagcaaaaagaaatctgaccgtactttcaacatgttgcctaaaatattcagaaaaacaaccaagttatttgcttacaagttatgcttccacataattgtaggacacaattcagctaggctttctgtcactatattacaagggtccctctccttcagctccccaaatcaagctccttatttttttctgagccctcagcagcaaagcctttaatgtgcatatttctaccaacattctgttgatgataacatacatatactctaagatgatagagagtttctctcctgttctcttaacttactcctgagccctcatcaacagagcctatagtacccattttttctaccaatagtctgtttaaagcagtataggcttttcctatctagcacctcaaaattatttgagtctctacctattacccaattccacggccatgttcacatttttaggcatttgttacaagatttttaaagacatttgttacagtttttaggtatttagttaaatatagcattttagatacttgttacaggtcttagatatgtagtttttaggtaccaaaatctgtatgtttcccatgactgctataacaaattatcacaaatgtggtggcttaaaacaattattctcttaaagttttagagacctaatatctgaaatcagtatcactaaactgaaatcagggtgtcagtagggttacactccctctggaagctctaagtgataatctgtttcttgcctctaccagcttctggtggctgccaccctttcttgacttgtggtcacatacgtctgatctctgt

SEQ ID NO: 1886389 - DNA, 4001 bp, Homo sapiens; identical to SEQ ID NO: 1242604

SEQ ID NO: 1886390 - DNA, 4001 bp, Homo sapiens
gaatttttattagagtccaatgaggatgcaccattttcagaagggctacatttggttatttcagtcgtcctagttatgacactaggactgaaactctgattaccgcttggaacattactcccaattgctgttttcagcgcttcaacattccttgacttattcagcatctctacttgcttccggcaacttaggggcattgtctttttggcttttaatatcttccgtttacttctatctggacttgccatctttcatatcctggaatttaagacatcatatttaaatgcatttctctagtgaataaaagttatttactactgaattaaagttatttatttacaatattaaaataacattgacactgtctctccatatttagataatcaccttactgaaaatcatatccattttcatgacactgaaaacataaaaatcttttctattgtttctataaatctaaactacataaattcaaaatctgtattgctagtaagcctctacctgatagttttatctagccacttcttgttatatcacctcagtgctataaccattcactatttttttatccaggtaagtcatagtttaaataatctaaacattaaattgcacttattcataaaaacaaaaaaaagtttttataaaacattccattttctatacataatggcatctgtttaagctttcctaatgttcaagtttctaaaataaatgtggccaggtgtcgtggctcatgcctgtaatcccagcagtttgggaggccgagttggaaggattatttgcagtaaggggttcgagaccagcttggtcaacgtggtgaaaccctgtctctactaaaagtacaaaaattagccaggcatggtggcatgcacctgtaatcccaagctactcggcaggctgaagcacaagaatcactcgaacccgggaggtggaggttgcagtgagccaacatcgcgccactgtactccagcttgggcaacagagtgagacagtctaaaaataaaataaaataaaataaaaataaaataaaataaaacaaaataaaaataaaataaatgaagtaaaataaataaaataaaaattaaattaaattaaaataaaataaaataataaaataaaataaataaaataaaataaataaaataaaataaaataaaataaaataaaataaaaccagcactaagatacataacattccagcttaaataaataagccaactaacctggtagggtggctcacgcctgtaatcctagcactttgggaggccgaggcaggtggatcacctgaggtcaggagttcaggccagcctggccaacagggcaaaacgccatctctattaaaaatacaaaaactagccaggcatgctggcacatgcctgtaatcccagcttctgggaggccgaggcaagcgaatcacttgaactcaggaggcagaggttgcagtgagccgagatcgtgccattgtactccagcctggatgacagagcgagactctgtcttaaaacaaacacacaaacaaacctgatatatatactaaataaatccaaaaaacagcacaatactcttcattaattaagaccctaatatgcctatacaattctatttttcctataggactgtgtattatatgattgtctcttcatgaatacaatttttgtattattttccaaagaaaatgaacaaatcaaatctttcctctagcatggttttatgatgtatttgctaaaagtgataatcatgatgcataaaattagcagctttgcctgaagacactgctacagttttgtgtcctacaaataaaaacattcttatattattttaaagggagaattcaaccaggtgtggcacatacctgtggtctcagctattcaggaggctgatgcaaaaggttcacttgagcccaggaattagacactgccgtgatctgtgattgcaccactgcactccagcaagggtgacagagtgagaccgtgtctcaaagaaaaaaaaaaagcaggattcctatcaaaaaaagaaaataaatatatggtgaatttataattgaatgtgctatgttatttttgacaggagaaaagtgctgttttgactggaaattgatgagaacgaaatcctacacttaaaattttaaacatcagataattgggaattttttcctgattaccttctggttccataatttgcactttggcttctctaatactcacatattacaggtgccaggcaccagagaccacattcccaacacaatcaggctgacaggctataattacctacatccagaaatgactctgaatcacaaacacatcccactaaacacaaataaatcccccaatcacaaaatgcctgaaaccactctactgccagctgacacaaagaagaaatcaaggtgaagagagacaggggtcttaaatgactatacttaaaatatcttactattgtaaatctgatgaaaacatccaaccacgtgaacatattgttactatggcccttctaagggcctttggaaaaggcccaaattagtaaaacgtgctgaaatttaagctctggagtaaaaaaatgcctctacatttgatgcatacaaaagacttgtaatatgtgttaattacaaagtataataaagtgaacatctttgaaacacctgcaacaaataagtagaatactatcagtaacctgcatttacttatgtttctccaaactatgccccttgcacctcttctccatcctgatgatgtatcctaaacttagtttataattctattactttttctacagtttcatcataaatgtcatatgtaaacaaatatactgtttaattttgttgttgagcaaactatagctaatacttgttttttcagttatgtatatgtacaaaattcatccatgtgcttacgtatagcaataattcgtgttcttctttgcactgtaataattctttgggtagatataccaaaatttgtttatctgatcatttgtgaaagatctttgggtcacctccagttcctttttttttttttttgagacagggtcttgctgctctgttacccaggctggagtgcagcatggctcatggcagcttcagcctcccaggctcaagctatcctcccacctcagcctcctaagaggctgggattacaggcatgcaccaccacaactggctaatttgtaaaaaaaattctgtggatattgggtcttactatgttgcccacgctagtctgaaactcctgggctgaagtgatcctcatgccttagcctcccaaagtgctgggattacatttccagttcttgttgatgttctgacacaacaatgctattctgattatttctgtctcaaggggcttatgtgtaagcatttcctgagtgaatttctagatactgaaaaggtatccatgttcaacttttcaagaaaaccaaattatttcctggagcagttttaccagtttgcatccatacagtcaatacgtaagagttaccactgagccacatcctcttgaacccttggtattgccagatttgattttagccaatctacttggataaagaattagctctcattgtcttaatttgggtttccctaattactatcatcttttcctatgtttattagctatgtttacttgtctgtaaaaattcctggttatttcctgctcatgacttcttggggtgtctttcctctttcattttcaaagcatacttaacatattataaaccatattccggccaggtgcagtggctcaagcctgtaatcccagcactctggaaggctgaggcgaacggatcacctgaggccaggagttcgagaccaccctggccaaaagggtgaaaccctgtctgtactaaaaactacaaaaatttgctgggtgtggtggcacacgtctgtattcccggctacttgggaggacaaggtaagagaatcgcttgaacccgggagatggaggttgcagtgagccgagatcacaccactgtacttcagcctggacaacagagtgggacactgtcttaaa

SEQ ID NO: 1886391 - DNA, 4001 bp, Homo sapiens
tgtccccttgactctctcccctcacttccccttgtccctctaggagccactcacttcctctagcccccaaaagatgttctcccttcatcagtcccccaaaggcttggggtatctctgccactgcttcagcaaatggggtgaggaggaaggagactgcggcaatggaaacaggctccgggcagatgaggcaggaaggggggtgtgaggaaagggacaggtgaggccggggatggaagagggctccgggaagaactggggggatgagtttggaatgggaaattcaatgcagctggggaagtcgaggcaatgggggggcagggtcagtagcagatgacagaaagtgaagtctctccctaccccacttccctggggctggggctacctttgcgtccctcatgagtgacatctcaggctgcagccccactgttccccctctgtcagcagaaatatctctcttttctgaccacctcctgctggagtctcagccagccaatccctgatctggtggaggggggagcccggcctccccctgctccctcataaggaccagctgggggccggggggtggccggctgctcaagtgggacgggggtcagagctttgtggagggaagaaaaacctggagggggcaggagagtaaaaagaagaaacccaggcagacaggcagttggacacactgaggaagaccccccacgagtgggaaccccctggaaggaacacaccggccccggcccccaggaagggagcacaatggaggccgctcatgctaaaaccacggaggaatgtttggcctattttggggtgagtgagaccacgggcctcaccccggaccaagttaagcggaatctggagaaatacggcctcaatggtaagtgtcccttggaagagcggctggtaattaatgccctcctgcacccccaaaacacacgcacacgcatgcacgcgtttctcccttcagggtttcttaaggaagagctgggccgttgtccaatgctcgcagggggaagaagatactgagaaaacagagtcccgagatccagagttttgggaggttttaatgggatgaacttgatgaacctcaaggtggcctgattctcttagccacaaagtcttgggtgtggggggcatgaggctgaaccccaaatgaatctgtccttttcttctttttcctgggtagagctccctgctgaggaaggtaagttactggaatccctgaactctcataaatgaccaccccccaccccgccctgtcccactccctcctccctgcctctttagattctttgagcaaatatcccttcccaaaaggcaaatctccctccctaaaggttagagtcctgtccggggcagaagtctcccaggcgctttctccttgaagcagccaacccttgaactgccccccactttgccgagtctgtttctggactccaggcgagcttcttagcccttctctgggcaccaagctgtctgcccaccaccctagagcctccccactgcaggccggagtccagggcgctccatcccagaccttcacccactagaccttaacccggggccctccccttgcctcctcccccagggaagaccctgtgggagctggtgatagagcagtttgaagacctcctggtgcggattctcctcctggccgcatgcatttccttcgtaagtgtgggagggtctctgggggctggctgggggtgtgaggctgggatcgggcgaatgcggggctcgcagtcactggatcctcccgtccgagtcccgagcatcccattgtacagacggggcgggctggcgcgcagcagcgggtgtgattcgcgtcctcctctctcctcccctgcaccccagaggcaggttttattttaagctttaagggtgttctcagccaaaacaccgaagctaagccaccctcgcggcttcaagagcttggagagctcgggttacccacccgaactccgggctccgggtcccgccgcgatgccggctgcggcgcggggggccactgccactcccggcatgcgccgggcggacggccgctccaccaatccccgcgcccgtcggcgcccctgccccgccctccccagcctcctgacgctgattggtcgaggggaggactcgctcctagtggcgggaaagcgcggcggtgtgatgatgactccaaggagcccggcgcccggtcagggagggcactggcatccctcattacccgcccagcctggccttagcccttccccgcgctccctaggcacccccacccccgcagggcatctccagggctctgcctcctctcccgccctgggggctactccccatcccgcggtccatctgcatgtcgcgggttcttccgcagcatgtgagcctcgctggggactctggaggcaacgaaagcctccctgtgccttggtctccgaacgcaggccccgtcgcgttaagcacaagctggcagggcctctcctctcccttctcagatttgctccttgacatttgcctgctgcctggcggtggcaacagctggggcggggcgcgcgcaggaggccccgtaaccctatccccgctccggctccctcgtgaaaccggagcttccctgccttggccgagggggagggctgcgggggccagaccgcctgcgaagaccacagggtttttcctctcgggttttggctcccgtgggatggatgtggctgtgcggggggttggcctgagcttcgcttctaagccagcagcttggtcagggaaacctgaaagcattcccagctaatcccccaagtggtgcaagtctgtgcgcgcccatcccgctgagtaaggcggtggcaggacctgcagtggatggacagaccctcagacggatgtggggccacagcgccccgacggtgcccggccctcctgctggctcctgcactctcctgcacagttctcccctttgcagtggtccacttcctttctccatctgttttggggcctcattacctgtcattctcctttcccctgctccccaggtgctggcctggtttgaggaaggtgaagagaccatcactgcctttgttgaaccctttgtcatcctcttgatcctcattgccaatgccatcgtgggggtttggcaggttagcgttgacccttccttaccccttcatgtcccaacagtgaagaagaggccaaccctccctccagtctcctcctcctccatcacctcccccatacttgcctcttcctctggtcctatcccctggtctggaatgggatggagtgtggggaagaggtgggagactgtgacccactgtcacttcctggctatgtgaccctgagcaagttccttcatccctctgagcctcagtttcttcatccataaaatggggctagcaatccagtgtgaaatcgactaagatgatgcatgttcctggcacacagtaggaattcaatagacgctagcttgatttccttcttccactgacctgaccaccccctacatgtcctgtcctctgcttcctggtttgttttgttttgttttgtttttaggtcatttccaaagtgaaaacccaaatgctaccttgctttggttttaagaaatgtcaggctataagccattttttggtgctcactggtttctgaacactgaggatagaaatagccactttcatactttgggaggccgaggcgggtggatcagttgaggtcaggagttcaagagtagcctggccaacatggtaaaaccccatctctactaaaaatacaaaaaaattagctgggcatggtggcaggtgcctgtaatcccagctactcaggaggctgaggcaggagaatcacttgaatggggaggcggaggttgcagtgagccaagattgcacaattgcactccagcatgggcaacagagtgagacccagtctcaaaaaaaaaaaaaagagagaaatagcactttctctttgccccagtgttacaggcgcagcagagccacctgtgtctgtggtgctgacaggtccaggacagcatctgcagggcagcctctgat

SEQ ID NO: 1886392 - DNA, 4001 bp, Homo sapiens
ctcaggggatccacccacatcagccgtccaaagtgctaggactatagatgtgagccagcgcacctggcccacaatattaagtgaaatctcactgtcttttctcttccagtttttaggtttttgtctcttcattcagttttgggaacttattagttcccattatctagacttaagaatgttgtatgggccgggcgcggtggctcacgcctgtaatcccagcactttgggaggctgaggcgggcggatcacgaggtcaggagatcgagaccatcctggctaacacggtgaaactccgtctctagtaaaaatacaaaaaaattagcctggggtggtggcgggcgcctgtaatcccagctagtcgggaggctgaggcaggagaatggcgtgaacccgggaggcggagcttgcagtgagctgagatcgcgccactgcactccagcctgggcgacagagtgagactccgtctcaaaaaaaaaaaaaaagagaatgttggtatgaaataggaataattctctttgattttttttagcttatctttcctgcctaggttattaaatagcaaatgtttgttttttccccctgctttgcaggggcgtattgatctgccacctttttcaagaaccagtttagggccaggcacagtagcttacacctataacccccgcattttgggaggccgaggcgggcggatcacaaggtcaggagatcgagaccatcctggctaacagggtgaaaccccgtctctactaaaaatacaaaaaattagctgggcgtggtggcaggcacctgtagtcccagctactcgggaggctgaggcaggagaatggcgtgaacccgggaggcggagcttgcagtgagccgagatcctaccactgcactccagcctgggcgacagagtgagactctgtctcaaaaaaaaaaaaaaaaaaaaaagagatcagcctgggcaacttagtgagacccctgtctctactaaaagtctaaaaattttttaaaagccaagcacaatagctcacgtctgtaatgctaacactttgggaggccaaggagggtagatcacttgaggtcaagagttcaaaaccaggctggccaacatggtgaaatcccgtctccaataaaaatacaaaaattagcagagcatggtggcacatgcctgtaatcccagctactcaggaggcagtcagctgagattatgccactgcacttcagcctgagcaacagagaccctgtctcaaaaaaaaaaaaaaaaagaaaaagaaaataaaaagaaagaaaaaaagagaaatccaacagcctaacagaaaaatagtcaagggagatcaacaagagactagatctctgaagaaatataaatcataacttaatataaaaaaaatatacagcccgactaacaatattcatatttaagtcagtcttttaagtgactttcaaacacacttaacaaaaagcaagctaaaagttttataaaagaaatgatagcttctctcacctggtacagcaggcaactttttagtcaaaataaggtcaggaatagtttccccaaaacagccagacaccctctgtcaagacaaaccgtccttagataaaaagatgagcaacaagctgctgtgtttcttttatacgaattaggctcttgattggataattgaaataacacggattctcacaagcagaaattttcacacatcaggttagattgttttcttaattcatccaataatgtaatacctcagttctataaacgttgaagaaattcacttctcacaaggagagactgggggcaaatgcatatagcagttcacttgaatgtccccacataaaaaaaaataataataacaacaacaagaaataaaagatctgttttaccctggttggctttcagttgaccatttcatttggttcacctgctgagaattcggtaacgatgttactgtgaggcaggacgacaggacgacttctagccactgtatccttcttagcactgtttcccagcactaactgagcagaagaatcacctggcctcttggtcaaaacacagattcctaagtcccgcatgtatacagtaattccagttaagcaggtctgcagcaggaccaggagtgtgcatttttcagaaataccacctgcccccaccagaaatctttaaatatttttatcatgctctcaataatagacatttcagagggatgagttgaaggagggctggcatttgttcactacaaaatcatatcattgaaggaatcttggaaaatatagaccagaaggaaacaaagggagaaaaataagcacaggagccgggcgcggtggctcacgcctgtaatcccagcacttcgggaggccgaggcgggtggatcacaaggtcaggagatcgagaccatcctggctaacacggtgaaaccccagctctactaaaaatacaaaaaattatccggtcatggtggtgggcgcctgtagtcccagctactcgggaggctgaggcaggcgaatggcgtgaacccaggaggcggagcttgcagagagctgagagctgagatcgcgccactgcactccagcctgggcgaccaagcgagactctgtttcaaaaaaaaaaaaaaaaagaaagaaagaaaagaaaaataagcacaggaaaaaatactgtaaaaaaatcaagatattaaatattaactgtgcttatgcttggaagtggaactatatgtattattattatttacaggttttatttacagactaaagggtgcagaaggcatgaaaatattttgtgatactaatcccattttggagagaaaaaataagcactggccaggcacagtagctcatgcctataatcccagcactttggcaggctgaggtgggaggatcactagaggccaggagttcaaactggacaacataatgagatactttttttttttttttttttttacatggaatctccctctatcgcccaggctggagtgcagtggcaccttctcggctcactgcaacctccgcctcctgggttcaagcgattctcgtctcaggctcccaaaatagctggggctacaagtgtgcaccaccacgcccagctaatttttttttttttttttttgagacagagtttcgctcttgttgcccgagatggagtgcaatggcgtgatcttggctcaccgcaacctccgcctcccaggttcaagcaattctcctgcctcagcctcccaagtagctgagattagaggcatgcatcaccacatccggcttattttgtatttttagtagagacagggtttctccgtgttggtcaggctggtcgcgaactcctgacgtcagttgatttgcctgccttggcctcccaaagtgctgggattacaggcgtgagccaccacgcccggctaatcaggctgagtctcgaactcctgacctcaggtgatctccccacttctgcctccctaagtactggcattacaggcgtcagccaccacgtccagccactttctttcatttctgtttctgaggtccattgctccattcagtagaaaaggggtggcttggagaggatttgccaaccttcccatgatttccatcaccacatcccccaaaatgcacaacctaagtttaaaagcatagcaactggtcaggtgtggtggtttacgcctgtaatcccagcactgtgggaggctgaggcaggcggatcgcctgaggtcaggagttctagacaagcctggccaacatggtgaaaccccgtctctactaaaaatataaaaattagccgggcgtggtagtgtgcacctataatcccagctactcaggaggctgaggcatgagaattgcttgaacccaggaggcggaggttgcagtgagctgagatctcaccattgtactccagcatggttgacaagagcaagactccgtctcaaaaaaaaaaaaatagaaaaagaaaaaagaaaatgacccagctgagttatataagcaggtgatactaatcttttatttatttttctttcctttttttttttcagatggag

SEQ ID NO: 1886393 - DNA, 4001 bp, Homo sapiens
gaccacttcccaatggctccccatcaccctcaggacagagttggccctctgcctgcccacagagcctttctgtagtctagccagacacagagaggagccacaaatctttgagaatgagatgggggtgggggaggaagaagaaagagggagggagagagggagggagagagggagggagagagggagggagggagggagggagagagggagggaggaagggagggagggagggagggagggagggaggggaaatagagaagagagaaagaaagaagaaagagaagagaagaaagaagagagagaaaaaaaggagagaaagaaaaaggaaaaagaaaggaaagagaaagaaagaaagaaagaagaaagaaaggagagagaaggaaagaaaagaaaattctgtcattctgttccatcttgagctttaagagagatctggtggctgactctgtctcctgtcacttctgcaggtttagagcaagtgacttcactctcggtctcttcatctggtggaaggggtaaccactgctctcctcccacagtggggtgtgaggtagatgagatcatagagattgagcacagcaggtgctcatgagtgccagttcctcttcctccctctcccagagcctgtcaaggggcagtgaacttggagtgatgttaaataatgaaccaaggtatcggggtaaacaggaggtttcagcttatgtgaagtgggaagcagggcttccggagtcctggactatttggatctgtgccgacagggaagtcaggagagaagggaaaagaagggatttgggaagttcaaatgggagtggcgggtgcaggtttctttccagctgtctctcaggagctctgcccagctggatgtctcaggtttggggtctgagcaccttagggcagcctcagttttcccaagatgctcccctctgggaagtccaagaaaaagcagcccaagaagaaagggtagatagcagtttgctccagctctaacagccctcagcgctgcccacccagtcactcctctcaggtccaggaagcagccctgactttccccagggatccctgtgtgacaggcacacctgctgccctgcaggtggaaccctccctgaacccaaaaacccttccctggcaatgctggctggtggggcgaaggggtacctggcacccaagcccagcagccctggttcaacttccagtctcaccttgttgctgtgtgctgttgtcttttcttagtttctttcctaagttcttccaaaaattctgtctctcagctggtgccctgaacaggagaaacaaatggcatttcagctccttttttacagcatatgttattgacttcatttctcctagtagaaaagtaatgtgtgttcattatagaaaaccttaaaaatatagacaatataagaaaagaaatataaagaaataaataggccaggcgcggtggctcacgcctgtaatcccagcactttgggaggccgaggcgggcagatcacgaggtcaggagattgaggccatcctggctaacacggtgaaacccggtctctactaaaaatacaaaaaatgagccgggcgtggtggcgggtgcctgtagtcccagctactcgggaggctgaggcaggagaatggcgtggaccccggaggcggagcttgcagtgagctgagatcgcgccactgcactccagcctgggcgacagtgagagactccgtctcaaaaaaaaaaaaaaagaaagaaaagaaaaaaagaaaaagaaataagggtcatgatcctctgtcatctggacagggccaccatcaacgtgtttggaatattttcttctgagagctttctcggtgtcggtatataaccctgggattggaattgtacctgcagatagagtttcatatccagattcttccactcactattatatgaagagtgggaaaaagagtttaggggagtgggaagagcagtctttggggttatacagagtgcataaattacaactccatgcttcaccacgtatgtgaccctgagtatcagcttccttgtctgtagaatggggatggcaactgcgccactcacagcagagaaaggttatagctccgcccctgatgccaagccccacccccagaggggaggaggcacctgggagccctggactgaggagacctcgtgtctcagccacctttgcagctcccactgttcccatccaggacgatacatgtcagaaactgggctgtagagagcttagcaaggaggagccaagacatccagctgccctctggcccaaccactcactgtgtgttgtcctccagcaagtcaccgggcctcccagaacctcagctgtggaatgagaggattgtgctccagcagcatttcctaaacagtgttactaggtctaagaaaggaagattctgaggtcgaatgctggacaggcacagttaaatgtgttttttagctgcaggacttttcagagcctttgatgtcctggtgcatggtaaaaaatgcagaggagaatgcagtgtggggagctgccagactcatcatagaagcccctttttttccccaagatacctaaagggcagtgagtgtgggagggctgatcccagagttctctgaagccctcattccttgctactctccaccgcattttccatgcccagcccaactccacagctcaaagctccctgttcacaccacactcttctttcttatctccctccttggaaagctattcagttccctcctcccggccttcccctcttcccctggttaaatcctagacaagactcagctgtagcagcccctcctccaggaagccctccctgacttccagactggtcaggcctgcctttactcccacagtcccagtaggacctctaccaaagctcatgacacactgcctagtgccaggttatccccaaagcaggctgccaccaccttgggagctggccaggacagggccagctctgcttcctctctgtatccccatgcccaacacgacaatggcacccacattctggagctgtcactgatggatgaaggcagctgtgcttggtgaggagaggagtggtcaggtggggaatcagagcctccatggccccaggtagacctacagacccataaggaccatccctggatcctggtctgaggcccaggccggtggtctgttccctgcagtgtcggacgagcacacatacagccgctcaagccgcaggatgcgctatgcctgcagctcctcagaggactggcccccacccttggacatcagctctgacggggacgtggatgccacggtgctcagggagctgtacccagattctccaccagggtaaggaggcctcatggggaagggggcatcagaggatggggccctggacacaaagaccccccaactccatcatgggaaagagtggcacctctgcatgtcgtataaatgcagaaaacatctgctcagtgggcatggccacctcctccccactcctgaccaagtaggtcccactgaggcagtgtgacttagcagatatcacctggaagtgctaggaaaggaagagacaagcccacctcctcaggctgttgagtaggcatgccgggaatgcccctgcagtttcaggggaggttccgtggcagctgttctgaattccctggggatctgctcctccgggtgtctccctcagggtgggagggaaggccagaggagtatctggctatttccgtggctgtgggatcaacttccccctagggaaaaaaaactgtattgtgtttctataaataacaccagggactggggggtaaagaggggacaagcccatatgctgacatctgatggccccaggtgcactcgctctggaaattgtttcttgtatgatcatgagcaagttacttaatcccgctgtgcctgcttctccattgtggaaatgtccatgtaataatacctgccccagccgggcgtgggggctcacgcctgtaatcccagcactttgggaggctgaggtgggggatcacgaggtcaggagatcgagac

SEQ ID NO: 1886394 - DNA, 4001 bp, Homo sapiens; identical to SEQ ID NO: 1242643

SEQ ID NO: 1886395 - DNA, 4001 bp, Homo sapiens; identical to SEQ ID NO: 1242675

SEQ ID NO: 1886396 - DNA, 4001 bp, Homo sapiens
gaatcttctttacatcacccaccagcttagtgacagtatgcaagacacagaagcttttgtaactttcgttccccgcaacttaaagtgaggggaataatagtacctacttcatgaggttactgcaataattaaatgggttcacaatacatttaaaccatgtggcaaatacctaacacatgataagcactcaataaatggcagctattattttatgatgacttccaaaggtggcattatatcataacaggaatagacagaggaatgaactacctattttaatactaatactcctgatgacaactggctaccaagttattagaaatttctcacttggctatggctgccacccgcatactccaaaaatagtgtcattaattgttgcagtcaatgattaccattagggaggtttagggtgatgaccatcttccaccaaaataaagcttttaccttatcaccaaaatcacctaggccaatagagagattagaaaatgcttgcagggaaacctggcatttggatcctaaaccctaaagatggggtcatgacttctcttctctgtaaacaaaatgtaggagatctgtttggtggtgagagggttcgggtctcatgttatcaaagtggcatcagacttccattaaggcctcctcttgatatgtattattaggaaaactgttatgagttcaatcgtgtcctctaaacagatatgttgaagtcctaatccctggtacctgtgactatgcttttatagagtctttgtagatgtaatcaagtgaagacaaggtcatacggaatgagagtgggtcccaatccgacatggttgatgtctttgtaagaagaggaaaagagacagacatgcatggggagaaagccctgtgattacagaggcagagcttggagaaatgtgtctactccaagccgaggaattacaaggatttccagctaacaccaaaaactatgagaaagcatagaacacattttcccctacatccttcagagagagtatggccctacagacacctttatttcagactggtagcctctagaactataatgaaataaatttctcttgttttaaaccactcaagtttgtggtaatttactacagcagccctaggaaactaagacagtccttgatgaaggtagattgggagcttggttttaaaaaaaatcaaggaaagataaaggcacaagatctttggggaaatctatgactattctcatgtgcacatatttagagaattatgcgcataaggactctaccagtaacatcctgctaacacaattctcattgtagggacgacctggctattccttcacactggaaagctcttggtcctggaccttaccaggtaaccttccttctagcattcagcttcctgtgtaaatttcacctcctctgagatgcccccatggactgtcctcttaatagtagcttaaaactctagatcatctttgtttttttctattatgttgttccaaaatgtaataccatatgaaatcctcttgttgacttgctcttgtttgacttacctgactccactgtggtgggatgtgaacaccactagaggatggtgctgtcttggtttccaccgtctctagaacccagacaagagcctggcttgtaacaggcacacgattccatattccatcatgtctaagatgatctcaattgtgagatgcatcaccattactgtgtgtgacattaaaaaaaagtgctgctgattaagctccaacctgacaatgatgaagaaacataacccaaccttagagatgttaaatttcaaaaaaaaaaaatgtgtcttagatacaacgaaatatggtaaaggtttccacacagcgttctgttcttgaaataatcactcaagccctgtaaagaccaatgtggaagttgtagcgctgcccctgagcacagttctcagagtgtgagtggagggagagagtaaggtaggtgtcaaagaggacctgcagatggggccaatgcatctgcagcaaggaacattctggccatttctgagactcatgatgatgtcacagagctttagaaccctagtataccctagaccacccaaacgtcccacaacctattgaatctcacaacatatgtttggatagcacttcccagcctacaacgcactttctcagggattctcaaacttcctcccacctcacatccttttaaggcaagtgagtgtgggaactctggttcagggaagttaaatcacttgcctaaggtcatgcagatcattaatgccatagccaagacctgagcacgttctcctaaagccaggtcaggcctcttgtcacatactccattgactctagtgcctaacccatgctcatcacagagctcacattggaaccattgttaaacagactctaatggaaatgacttcgttcagctggtgaacattttggaagattccagaaaaacatgaacaagtgtttgagtgctcttaaggggattgtctaatatcttggctcctgactcatccttagaagtcttccagccaccttgtacccatttcaagcccaagggctctttaacgtaaatgagttactgagcaggtgagagaaaaagtctgggcccctttgagggggtatattttggagcagtttgctgttttcttaaagcttggggaagagtgagcagtaatcaatagtgaaatctgcctgaatctcggaagctcgatgaaggtgtttttgaagcacatcacagagcttgattttctgttatttagtgccaaaagttattacctcagcagcagtgcaatgtctaatttataccaaattgttagctgaaatctattaaagtttattagccccatctcagaatacagtaacatctcactgcttcagttcctctttaaattgagcagctggtttaactctattagctttgaggctgagataaactggagtccacaggagccatccacagcgctggggagaatgagtacagatgaagctcagggtatttggggtgttagctgctaccaaactgcttcaggcttcatctctcttgctgcagcctctaccctgttattgtattacctacaggatagggagcgtcctcacaattcagaaagcagttgtcaatgggctggagctttcagctgataaggaggcatttctggaattgtaagggtgttggcctaccaccaggacttggggcaacttgagttgtctgaaaggagaagggatttttttatttttttgagacagagttttgttcttattgcctaggctggagtgcaatggcacgatctcagctcactgcaacctccgcctcccacgttcaagggagtctcctgcctcagcctcccaagtagctggattataggcacgtgccactacacctggctaattttgtatttttgtagagatggggtttcgccatgttggtcaggctgttctcaaactcctgacctcaggtgatctgccctcctgggcctcccaaagtgctgggattacaggcatgagctaccacacccagccaagaaagggattttttaagacattccccaaattgccagcaagcccatgacgtctagagcgcacttccagctggatggaggaaggacaaaagatctaactttaccaatagagagatattctgaccttaggtctatcctatctgtctccagggtaaggatcccaaagaaatcgggccacgcccatatggaagcatttaggtagaggctgaacgaccctccacaatgatacacaatgttcagtcattttggacagcctgaagcagtgggcatattggccttaaaagtcacccagatctggttggaaagccaacctcattgcttactggctgcacagtcttgaaaaagtgacctggcattcttggtcccagttttctctccaggaaaaatggcttttcatgacagtttgagtattgcacatgaagcatctagcaaagcctcaagcacatggtaaatatgtaatcagcattagtttccttatctttacctctcttggcattttacagtcattg

SEQ ID NO: 1886397 - DNA, 4001 bp, Homo sapiens
aagctgggataagagtactatcccactgtgtccatttctattatggaaacttatccagactgtattataattggccatttccttgtctgtccccacactgaactgtgaactcttcaagggctgagactgtaccattcatttcagtgtcccaagctcctaagacagggaccaacatatagtgcaaactcaaaaggtttggttaatatcgaatagccttggcagccatggaccctgcatgtaccttttcaccaggagttggcaggaggtatgccttgctgcaggtacggtttctgtccgagcaggagatggtggaagagaggggagagggctgagaattcagaatttgaggatcagggcagaatagaatggaagtgcacggttcaaaaattcccccaccctgctgggatattgtgaaaccctcactctctcccctccaggttcctcacctctctcccaggacaaagagcatctcccttgaagcctcactcaccaggtgtctgtgcctcaggtcttggtgaagaatgctggaagtagaggacctagtcagagaaaggactatccccgtggccagaagagatgcggccagggcagacggggctaaggggattctcggccagcagtgaggagtgggtactgggttagcgggtgagaggggcatttcacaggtcctagggctggctgtgagatggatgagatgggcacagactcctggagagttcagctaggggtgggaggggtcagggactgtaaccaggcatagtgggggcagcggttctctagacacggtggtcctgaggcagggggttaccgcgtttggatatctgagtcgcttggtcttgtgactgcttttttttgatgggcacagggttcaagtggcagcaagcagtgcacaaagcctcctccatgagttctgcactgatctgggacaggtattcctcagaacgagataacgaagcctgggaaaggaaaagccggaggggttcagcctgggagctcccacatgggagtgctggctgtgggagttcccaggctggggcctgtgggtccaaggagcttgctcctgaaggactgggccttgagatttagctagaaagctctggacctgggggaggggggtttggtgggggtttagagtcagggcctagtgctgagagctatgagtcggggcttcaggactcagggttgaggctagagtctcagggcccgtggctcagacctggcacggggtgcctctgcctgggaggctttcacttcattacattcccacctctagggttccctgcagtgctcaccggacctcctctcaaggagggtgcagcttgagatggccagctgctcttcttctccccctcattccccatcggagtggacgccatccccctgggaacagtcgaagcctgagttgacctgagaaaccagcccgctttcccccagaacccagtccaccaccattccccgggcccaggtttaaacaaggcctttagaggaaacatcccgctgcctcattccctctcacaagaaaaaataataataataataaaggttgctttatatcttcgggagtgagagggaactcccgcaaccccctacccctcaccccttcgcctggtgggcctctccttccttcttccctcccaagcaccttcccaagccgaggcagccgacttgacgccccagacctggcagatgggtggaaaccttgggctactcggcaaaaggagagacgtggaggcctaaggacctctggtataggtcgtgggggatggagaatgggagatggggaggaaggctggaaaagggggagccggctccgtgtcgctaccggacgctataaaacccttggagtctgcagaggttccgcagcctcgttgctaggagatcaggggttctagaactaaagacagaggaatttcctagcgcgccccgtttgctcctccagcctcccctccgtacccctccaggtgcctccttgagggcagtgaccccaagcgccagacgcttgagaagcttgggaggatgacgtagggtggagcctgcgacctaatcctcccatcacaaggggcacgcgaaaagcaacccatctgcagggcgctctggagcctctctagccgcctagagcctgcgagagcaaaggcggctggagacttagggggcggggagtaaagtgaggactgcaccaaatctcctggcctcttggggacgcaaagactcaggaggaggaattttatcgccttatctttgcctccaggaagtcataccctccacaaaaggaaagcagagatttttattcggtcttctcttttaccctttccttttccgtttctaactttgcttgacgttaatggttccttcctccctctcctcctctgcgctttggtacgagccaagggagaggggcggagggaggaaaagggaaaggaagccgacaggccttaaaggggccgcaactatttttttaagccactttttcctctctccaattttgcaacgacgggcgcggaggaggaggttcccggaagccacgcgcagctggagcagcggcgaccgcagctggaggcccggagcgcctgcggggctggcagaggcgagggaggttgcgggtaggaagggcggactgcgcgcgccccctgcgtcccgcgcacctcggggccggtccatgctcccgacggctgcgggcttcagcatctggggccaggttggggcggcggggtccagggcgcaggtggtgcggccgatgcgccgggccggaggctgaggccgcgctgcggggctgggacagcactggcatctccagagcaggcccggggcagcaagggaggcgccgcgatgccagacgaaaatatcttcctgttcgtgcccaacctcatcggtgagtgctgcccacggccccgggccgaacgagagggcgaggggccttggcgggctccctgatcctgccctgtctccccgcgtcccgttccaaggttatgcccggattgtcttcgccatcatttctttctacttcatgccctgctgccccctcacggcctcctccttctacctgctcagcggcctgctggacgctttcgatggacacgctgctcgcgctcttaatcaaggtgacagacacccctctcagccagccttggggttcaacaatcccctcctcccttcccctgcctcctcgggacctcagagtcagagggctgtcattcccatctctggaaaaagcagaacaggatggcctggggctttttgttttgtgttttgtttttttgtttttgagacagggtctcgctctgtcacttaggctggagtgcagtggcgcgatcatggctcactgcagcccccatcttctgggctcaagtaatcctcccacctcagcctcctgactagctgggactacaggagcgtgccaccacacccggctaatttttaaatttttgtagagactgggtcttgcagtgtcgcccagattggtccccagctcctagcctcaagcgatcctcctgccttgctcccaaagtgccgcgcccagcaagaatggactgattttgtagcaaaaggaatttaagctagctcttgagaactcactgcttgtgagaggtgtggattagcaagacatgacatggcggtggcgctgctggaggtctctctgaatacaagtccattcaggccaggggcggtggctcacgcctgtaatcccagcactttgggaggccgaggtgggtggatcacgagttcaggagttcgagaccagcctggccaacatggtgaaaccctgtctctactaaaaatacaaaaattagcgggcttggtgacgcgtgcctgtaatcccagctactcgggaggctaaggcaggagaattgcttgaacccgggaggcggaggttgcagtgagccaagattgcgccattgcactccagcctgggcgacagagcaagactctgtctcggaaaaaaaaaaacaaaaaacaaaaaacagtgtattcaacaggtgtttactggaggcctactgtgtgcc

SEQ ID NO: 1886398 - DNA, 4001 bp, Homo sapiens
gctgaggcaggagaatggcgtgaacccaggaggtggagcttgcagtgagctgagatcacaccactgcactccagcctgggcaacagagcaagactccgtctcaaaaaaaaaaagaagaagctccatggctcctgtccttcctgtccaattgaagctgggataagagtactatcccactgtgtccatttctattatggaaacttatccagactgtattataattggccatttccttgtctgtccccacactgaactgtgaactcttcaagggctgagactgtaccattcatttcagtgtcccaagctcctaagacagggaccaacatatagtgcaaactcaaaaggtttggttaatatcgaatagccttggcagccatggaccctgcatgtaccttttcaccaggagttggcaggaggtatgccttgctgcaggtacggtttctgtccgagcaggagatggtggaagagaggggagagggctgagaattcagaatttgaggatcagggcagaatagaatggaagtgcacggttcaaaaattcccccaccctgctgggatattgtgaaaccctcactctctcccctccaggttcctcacctctctcccaggacaaagagcatctcccttgaagcctcactcaccaggtgtctgtgcctcaggtcttggtgaagaatgctggaagtagaggacctagtcagagaaaggactatccccgtggccagaagagatgcggccagggcagacggggctaaggggattctcggccagcagtgaggagtgggtactgggttagcgggtgagaggggcatttcacaggtcctagggctggctgtgagatggatgagatgggcacagactcctggagagttcagctaggggtgggaggggtcagggactgtaaccaggcatagtgggggcagcggttctctagacacggtggtcctgaggcagggggttaccgcgtttggatatctgagtcgcttggtcttgtgactgcttttttttgatgggcacagggttcaagtggcagcaagcagtgcacaaagcctcctccatgagttctgcactgatctgggacaggtattcctcagaacgagataacgaagcctgggaaaggaaaagccggaggggttcagcctgggagctcccacatgggagtgctggctgtgggagttcccaggctggggcctgtgggtccaaggagcttgctcctgaaggactgggccttgagatttagctagaaagctctggacctgggggaggggggtttggtgggggtttagagtcagggcctagtgctgagagctatgagtcggggcttcaggactcagggttgaggctagagtctcagggcccgtggctcagacctggcacggggtgcctctgcctgggaggctttcacttcattacattcccacctctagggttccctgcagtgctcaccggacctcctctcaaggagggtgcagcttgagatggccagctgctcttcttctccccctcattccccatcggagtggacgccatccccctgggaacagtcgaagcctgagttgacctgagaaaccagcccgctttcccccagaacccagtccaccaccattccccgggcccaggtttaaacaaggcctttagaggaaacatcccgctgcctcattccctctcacaagaaaaaataataataataataaaggttgctttatatcttcgggagtgagagggaactcccgcaaccccctacccctcaccccttcgcctggtgggcctctccttccttcttccctcccaagcaccttcccaagccgaggcagccgacttgacgccccagacctggcagatgggtggaaaccttgggctactcggcaaaaggagagacgtggaggcctaaggacctctggtataggtcgtgggggatggagaatgggagatggggaggaaggctggaaaagggggagccggctccgtgtcgctaccggacgctataaaacccttggagtctgcagaggttccgcagcctcgttgctaggagatcaggggttctagaactaaagacagaggaatttcctagcgcgccccgtttgctcctccagcctcccctccgtacccctccaggtgcctccttgagggcagtgaccccaagcgccagacgcttgagaagcttgggaggatgacgtagggtggagcctgcgacctaatcctcccatcacaaggggcacgcgaaaagcaacccatctgcagggcgctctggagcctctctagccgcctagagcctgcgagagcaaaggcggctggagacttagggggcggggagtaaagtgaggactgcaccaaatctcctggcctcttggggacgcaaagactcaggaggaggaattttatcgccttatctttgcctccaggaagtcataccctccacaaaaggaaagcagagatttttattcggtcttctcttttaccctttccttttccgtttctaactttgcttgacgttaatggttccttcctccctctcctcctctgcgctttggtacgagccaagggagaggggcggagggaggaaaagggaaaggaagccgacaggccttaaaggggccgcaactatttttttaagccactttttcctctctccaattttgcaacgacgggcgcggaggaggaggttcccggaagccacgcgcagctggagcagcggcgaccgcagctggaggcccggagcgcctgcggggctggcagaggcgagggaggttgcgggtaggaagggcggactgcgcgcgccccctgcgtcccgcgcacctcggggccggtccatgctcccgacggctgcgggcttcagcatctggggccaggttggggcggcggggtccagggcgcaggtggtgcggccgatgcgccgggccggaggctgaggccgcgctgcggggctgggacagcactggcatctccagagcaggcccggggcagcaagggaggcgccgcgatgccagacgaaaatatcttcctgttcgtgcccaacctcatcggtgagtgctgcccacggccccgggccgaacgagagggcgaggggccttggcgggctccctgatcctgccctgtctccccgcgtcccgttccaaggttatgcccggattgtcttcgccatcatttctttctacttcatgccctgctgccccctcacggcctcctccttctacctgctcagcggcctgctggacgctttcgatggacacgctgctcgcgctcttaatcaaggtgacagacacccctctcagccagccttggggttcaacaatcccctcctcccttcccctgcctcctcgggacctcagagtcagagggctgtcattcccatctctggaaaaagcagaacaggatggcctggggctttttgttttgtgttttgtttttttgtttttgagacagggtctcgctctgtcacttaggctggagtgcagtggcgcgatcatggctcactgcagcccccatcttctgggctcaagtaatcctcccacctcagcctcctgactagctgggactacaggagcgtgccaccacacccggctaatttttaaatttttgtagagactgggtcttgcagtgtcgcccagattggtccccagctcctagcctcaagcgatcctcctgccttgctcccaaagtgccgcgcccagcaagaatggactgattttgtagcaaaaggaatttaagctagctcttgagaactcactgcttgtgagaggtgtggattagcaagacatgacatggcggtggcgctgctggaggtctctctgaatacaagtccattcaggccaggggcggtggctcacgcctgtaatcccagcactttgggaggccgaggtgggtggatcacgagttcaggagttcgagaccagcctggccaacatggtgaaaccctgtctctactaaaaatacaaaaattagcgggcttggtgacgcgtgcctgtaatcccagctactcgggaggctaaggcaggagaattgct

SEQ ID NO: 1886399 - DNA, 4001 bp, Homo sapiens; identical to SEQ ID NO: 1242714

SEQ ID NO: 1886400 - DNA, 4001 bp, Homo sapiens
catacacaccatggatttgtatggcttcattgaagatgccagtgtgagagggaagagaaaaaaacaaagatcaaacacagggaccactacagccaagacgaaagatccatcagagtagcagggagagaacgttcccacgtcctggaagcccagggaggaagagggcaaggaaccaactaagattgctgaggacttcagggaggtggaggagagtcaagtcagagaagaaaccactgggctggtcatgctcagctcagggattcccttcaacaggatgaggtggatggcagccagattgccaagggtgaaaaagtgggtgaatggggggaggcagaaacaagtgtgagaacaagaccagttgctgctgatgttatatgaagcacgaacatggtgggcacctactatgtgccaggcatgcattccagttttttaaattaatcttcaaataagccttgctgggtaggcatcaacatgcccattttacagaggaggaaactgaggaagtggaggcagcctgtatggtcttcctaaggaaggaaatggatggcattgccaggagtaaccagaggtaaaggaacattcagttccaaataggcttcctctcttcctctgcccttccccacagttccagagctctcgcagtgtcaggctgccagaaggaagacaggatgcagacggggctgggctgtcaggattcaggacccagagacagacctaggcgtgattttcgggttgaccctgggcaagtacatttccctgtgtgagtttcagtttctatgtctataaaatggcatgggggtatttcgaggcccctcgctgcacccctctatgtaccatgtgttttgttttctgtattctgatgctctggcatctgaggccttgttgaccttggagaaactccctctcagggtccagccaacctggagcccacactccaaccgcctctttgatcgggttgccatgccctggccactacccacctgccctaatcatgccagggctaggtacaaaacaattaggaacagcccctgtgccccagagcccctgaagtatcccaacttgccagtcctcagcctgcctgccctgcctttcctcttctatccttggaagccacagtaaaagccccttggcctcagatccgccctgtcccctccccaggctctgctgcttccccttgtgccccgcgcactggtgtccccctcctgttgagaacatgagtaagaaactgtctttttaatggcaagaggtcctgatatagtggcctgaccacagctcgaattttctattcatacactacatttttaaacagcgcctttaaatttatccacccctttttcatgctttctacataccaggcgcttccaagagtgctttagaaacaaccacccatttcctcctcaccaaagcccagtgaggtaggtagcactgccacctctgtttcagagagggggtaacccaagcacagaatagctcagtctcttgcctaagtacacacagcgaggaagcgcccagcggggactcgaacccaggcactctggctccagagtcgatgctcttaatattctcctgagccgctatccgttatcgagccataacgggacgaattatgggacaataaactgagctgcctaaatttctcttgtgtgcggagtgaggtgggccggctgccggccttcttggggcaagcagtgcagggcggtctcagcatgttcaccctccctgtgtctccgcgcgggccaggctggctgggctcagctgctccaagtccaattccaagtacggaggtcgcgccccgccacggagccggaccttttgtgtctttgcctttctacgcatctgcgcccagttcggcccagaacaaggatttcaaaaagtgccccgcatatttgacttcagaaggactcaccccaagccgcggaagcagcgagagtggccaggacaagagcagggagccacatcctggaagggcgacagttccgggggcctgcgaggtctccgtgcagctcagagggactgtgctgtccagccctggcgccaccctggcccccagttaccgccctgcactgccaattgcctaatcctctaattgggagagatcagaaaagccctccctttccccagatctccctgggcttccagtggggcctcaagccacgcccactcacagtttaccctctttcatcaaaccaatctggactctactctcagattacagagagctgtaaactcgcccaactgcttgtggcataacggtgtcacccttgcaggactctaaccttagtgctctctgagggcccccaaaggcccgcaccagcaggcagatgcttttaggcaaagggaagctttgatctgaggtcctcagaaacaactggaaaatgttagagccactcacacctcacagctcagctgggtaagttaggacatatctcagctcccagggcttgtgtttcatagcgttccaggatttcaagcttggaagcgatcctaaattttatccagtccactttctgatgcctgaattagcttcacagtatcctgccaactagccaagccttctcacacacttccaatctcaggtaaatcactaccttccaaagcaggaatttttggacagaatgtaaaaatgattccatctctcaatagctcctggctttaatcatccatccattcatgtacccatccattctgtgaacatttaccaaaatgccaggcacctggccatgtataatggatacaaaggtcaattcaagacatggttcagcttctcaaggggttcaccattgtagacaacacatatagggtggaggagcagtaggtgtgatgtcaaggcaatgtgaaatcaccaaattaaggggatacagagtgctctgggcacacctggaaaactgtcatttacaagctgctggggacacaaggaagtcactcaaacctctttcatgggattattaaatgtccaacaatagggaattcactaaacacactgtgataccgctggctaaggaaatatgatgtattcactcaaaatagtgatgtgcacagctacttattaacaatgaagacaggatgcgttgtgaaaggaaaaaataacaggttataaactgttgtgcggtgtaggcagttcctccaaaaattcaacatagagtttccatatgacccagcaattcccctcctaggtgtctaccgaacagaactgaaagcatgtccataaaaaacttgtacacaaagagcagtgtcattcatcctagtcaaaaagtgggcacaacccacatgtccatgacctgatgaatgtgtaaataaagtgtggtgtattcgtgcagaggcatatcatccagccataagaagaacatgctacaatgtagatgaagctggaaatcattatggtaaaggaaagaagccagccacaaaaggccacatgtcatatgatgctttttatgtgtaatttccagaatagtcaaatctacggagacagaaagtgtttgacagggtctggggaaggggaaagagacggggatgaggaataactgctaatgggcatgagttttatcttgggggtggtaaaaatgtcctgggattaaatagtgatgatgttagtgcaactttgggaatatactaaacaccactagattgtacactttaaaaaggtaaactttatgacatgtgacttatatttcaataaaataatgaaatatttttgaaaatctagataggtataatatggtcccgttttggtagtaacatatgtctttatttgcatgggaaaatattggaaggctatatagctaattagaattacaacagccatttcctggctgtaatcttgtcagtgtttttacttatttgcattttccacttttatttcttcatacattcattgacaaatatttactgagagcttactgtgtggcaaacactatgccgagagttttgtatgcaggaactcagtctcagttctcaaaataaccccatgagattaatgctgtctcacaatcttaaattgattt

SEQ ID NO: 1886401 - DNA, 4001 bp, Homo sapiens
aatgggagaagtgtagttggaatattttggcaaggaattttaacaaaagatatacacttttcgactcagaaatgtcatttctgggaacttatcctaaaataattatgaatgggcataaaggtttcactataaaatattcaccacagtgctctctatattatcaaaaacttcatatgtaacctaatgaccccagataaaagcttggggaaattaattgtggtgcaataccaaatgtgatgcagctgctaatatcaggctatgctatttaatggcatagaatgatgctcatgatatacttaatgagcaaagcaagcatccaaattatctgaacttaacattccattttaaaggaagaaagtatagcaacaggcagaaaaactggaatacaaacaaaatttaaatcataatactttaccttttttgtaataagtatgcattacatttgcagtcagaaaataaaaacagtaaatattattttttaaaaaaggaaagaaaagaaggcagctagaggtgggctgctggaaaccctccaaatgcctggctgctgagatgaatggggtcttctctgatgcctgtagggtcctttgtaccctggggagaggtggtgaggccaattagaacctttgggcttttcttcccagcttggccagggtgaatggacacacctgccatttttctcctcagcattagggagctgggcacacctgagagttgagcacttgccgactggacacctcagtacacttgccactcacacacctcctggcccactcctctcccctactatgtcaaaattcaagacagcggaattcatgggatccttccttctgatctccctcatctgcttaactgcttctttgtttccaaggcacttatcccgttctaacatatcacatgatccatggagtaatttgcatgttcttcttatctgtctccccctgctagaatgcacgctccgtgaatctagggacctttgctttgttcactaatggaccccaaggacccaagaacatgcctggcccacagtaggtgctcaataaacatgtgttaaataatggactccagaatgctgtgagagttctggaatgttcttaaggatctacaatgatcttaaggattccagagcaaaggatcagcccatcaggggactgccttgactccttcctgcatcactttgaggcgaacatccccatggacacatgccaaagccacccctggcttacataggaggttgggtaggacttgggagagtgggcatatctggggccttcaaatgaactctcccaagcttctccacctccatcagtttgctcagcagatatgtggaaaacacatgttagagcaggcattgggcacagcaaacacatgtctttctgggcccctcactcagctttgtctctgaactatgggattgatcaggtgtagattttgtggtggagaacactgaactgggagacagaagtctgaatccactgggtgacatttgggaattccttgtggaaagacagggtgtggctctgggggagggaccctctcacgcacccttcaccatggctccacactctatgaatccaggattctatgacattctccactgcagcctgggcatacgcagtgtttctggaacctcagttagtctcatactaatatcatggttttttgccttatcagcgtatcatctgtacttccatgagcagttttctttaaatgaagtcactctttttacttcaacatgctcactcaaaaaggagactttataccattgccataaatgcaagacctctataacctgccataaattagaggtatgcatggaaaacgtgtgactgcattttttaaattaaaatgatggtaaaaataaaaaagtacataaagaaatgccagtaaaaacacttctagtttacaaaagtgtataactgaaaaaagtcactcaatgggaaaagtgaaccattgaaggccagttagttacatgaaagcagggccagccttgatcaccgtcatgaccaccaggtaggtgacaaggcaagggtacctacctttggcaagggtcatcgtcatcaaggtcatttccttctgcttcagggaacgtcttcctgttaacattcagttcaatgggcagaaattggattatgtttacaccttcccaggcccatgatgctgcccatgatgctgtgttatacttagggggtcagactccctggggtcaatcaggtcctaggactgactggtcagagtatctggaggaaattttgggctcgtggtgggtcgtagaggagagagctgtactcccatgggcataactagtccacctcaatggctcaaacaactgatgattgggccatgtacattcatcagtcaatcaccctgtgactgctgaggaagaattattagtgagaccaggataaactatggtagcaattaggcccagaatttcaatggcttatttttcatttatgtaaagaagtagagtgttgttgttcaggtcaacaatgtggttgtcttccatgtggtcactcagtgatccaaattagagtatcagcaaactttttctataaagtgccagatagtaaatattttggactttgcaggccatgttctctttggcaactgctgtgatagtaaagacagccatggacgatacctatccaaatgggcatggctgtgtttcaattgtttcattcttctgcatatggctggccagttatcccagcaccatttactgaatagggagtcctttccccattgcttgtttttgttgaccttgtcgaagatcagatggttttaggtttgtggctttatttctgagttttctcttctgttccattggtctatgtgtccatttttgtaccagtaccatgctattttggttactatagccttatagtatagtctgaagttgggtaatgtgatgcctccggctttgttctttttgcttaggattgctatgatgattctggctcttttggttggatatgaattttagaattgttttttctaactctgtgaagaattggtgcaggtagtttgatggaaatagcattgaatctgtaaattgctttaggaagcatggccattttaatgaaattgatttttcctatccatgagcattgaatgtttttccatttatttgtgtcatctctgatttgtttgagcagttttgtagttctccttgcagagatctttcacttccttggtcagctgtattcctaggtatttcatttatttgtggttgttgcaaatgggattgtgttcttgatttgactctcagcctgagtgttattgatgtatagaaatgctagtaatttttgtacattgactttgtatcctgaaaccttactaaaataatttgtcagttctagtagccttttggtggattctttagggttctctaagtatagaattatattgtcagtgaagatagtttgacttcttcttttcctgtttagatgccttttatttctttttcttgcctgattgctctagttaggacttccagggctatgtttaataggagtggtgagagttggcatttatgtcttgttccatatctcaaggggaatgcttccagatttgcccattcagtatgatgttggctgtgggtttgtcatagatggcttttattgttttgagatgtgctcctttaatgctgagtctgttgagggtttttaacatgaaaggatgtcagattttataagaaattctttctttgtctattgagatgaacatattgtttttgctttaaattctgtttatgtggtgaatcacatttattgatttgtacttgttgaaccaattattgcatctcagggatgaagcctacttgatcatcgtttattaacattttgatgtgccgctgcatttggtttcctggtattttgttgaggatttttgtgtctatgttcatcagggatattagccagaagtttttttttttcattgtgactcttccagattttggcattaggctgatgctggcttcatagaatgagttagagaggagt

SEQ ID NO: 1886402 - DNA, 4001 bp, Homo sapiens
ctcactgcagcctcaacctcccctactaaagtgatctcccacctcagcctcccaagtagctgggactacaggtcacagaccaccacagcccactaatttctttcaattttttgtacactccgagtctcactatgttgtccaggctggcctccaactcctgggcacaagcgatactctcccttggccttctaaagtggtgggattaaaggagtgagccaatcgcacccagccactgtggcctcttagatctgctttaggatttggcgcctgggggcttctgttccccaaggaccactatccttgtctgaggcccctttggagggctcagggcatcccccctggccaaggacgccacacactgagagccagatgctgccagaagctattactgttattaccggccggcagcacccgctacagccacaatcataagagggaaatggactgaatccccacaccccaatccctcacccactccgaccccaggctgcctacccggcctggcatgtcccggcgctcctggggcccctgtactccgctggttccttgccgtggtgtcccccagcccgaccctttctgtgcttctaggagcccaccttgggcggcggggaggcgttgcgtggggctcacgagttccacgctgtcatctccaccagctcctacctcccaggcgcctgccctcccgcactgtcaggttctgcctccgcagcatttggcagatctgagcccggtccctgtcgcccctccgagggagcctcaccctggccccggacaagaagcagcagaagcccacaggccaccgcgctcagccgcgcacgaagtctgtgcagccgcatggtcggctcgctggtctcggttcgctgccggcggacacgctgctgttcacccagaggctgccccgggtctgtccagcagtggatcagtgccttgcccagccttggagtttggactgggcagggagtcagcggggtgcgctggcttgggccgggaaaggtgggtgtggtaggagagcgggactgagcagtcataggtgggtggggatctagtggtaggcaggcccgggcacggccactttcctttgcccgggctcctttggcatcctcggaaggggctgtgccattcctgcagcccttccgcgatccagggaatcctctcttcaaacctgtccttgtccacaggcccgatgagcgcgctgggggatcgataggagggggcaataaactagaattggagaccccaggagggcttctctgaggatgtgcacgttcaggatcccccagatggagaaatgggaaggaacttgatcggggtgaaggaaccgcttgagcaaaggcaggaaggagtgtcggcgcccttcattctggaagttcctccttgctttcaggactcagtttcctgggttccccttcacggcccctcatctccttacagtccagggtctgagggtctccgcggtcccctccctactcagtcacgccattcttttgaaacgtacacgtgaccgcggcacttcttaaggagcgccccccttttcctcggtggctttcagtttcctcacctcccgcggagaccacggccatggtcatttatccacttgacaaacatttcacgagcccctgccggtccaagctgtggggacgccgtactcccgggcctatggtgcagcaggggaggcaggcgcgtcaccgggaggtcccgagacactaggatccctgccaggccagaggcgaccaaccgtcctggatacgggagctcccggccagcctgacttccaggaggaagcggtgtggggattacctccgaccgcctttagtgccccctgagacctggttctggcctctacgtttcagcccgctactggctcgcacgacccagcgccgccgtggtcccttctcagcgccttctgctccagcgaccatcatgttcccgggtccgagcagccagggccgcggtcaccgcttctctcgcacctcaggccgagaacccacaacgcggcgtgtccctcgcgcgactccgtcgccacgccacgcccccttcccgttctccggaagtgcgcgggttggagcggaagcgcacgcctgctaggatcagcggtggtggttccgcgatggtaggcggcggcggggtcggcggcggcctcctggagaatgccaaccccctcatctaccagcgctctggggagcggcctgtgacggcaggcgaggaggacgagcaggttcccgacagcatcgacgcacgcgagatcttcgatatccgccgctgctgggcgcgggcgggttccgggggcttgcggtggggggagcagtgatatcgagcagctggtggagccgcatcccagcagggcgttcctggcagagggttctaagtgggcaagggcgcagagtcccttttccttcacttcccacatctgattcgctccatcaatgacccggagcatccactgacgctagaggagttgaacgtagtagagcaggtgcgggttcaggtgagtcacttccgaggggagcgagttgttccagagagtcagaaaggtttctgtgcagcaggagctggcgtgctctatgctcacgaacaccgaagggtatctttggggagggagattgttgtgcctattttatgggtgttgaaactgaggcccatagaagttggatgatttgcccaaaacaacaaactaagaagagggaccttgggctgagggtggttgactcttgacatctctcctccacaaccaggttagcgaccccgagagtacagtggctgtggctttcacaccaaccattccgcactgcagcatggccacccttattggtctgtccatcaaggtcaagcttctgcgctcccttcctcagcgtttcaaggtcagttggagctgagccccgggagtgagaccaggcattgagggtctactgctgaggatggggactgggagagcatgaacatggataggacatcagagtggggcctggaaggatccccattagcagagaggaaactgggaggaagctttccaagtcgatgtgacaagaataaagatctgagctggaaagtggagaaaagtattgaagagtgtggcaggaagggcagtagggagcggcagatgggtttggaccaggggtggggcacaggcaggcctttaaatcaacagtagtgggccagttctttggatagaattggaatagctagggccgggcgcggtggctcacgcctgtaatcccagcactttgggaggctgaggcgggtggatcatctgaggttaggagttggagaccagcctggccaacatggtgaaatctcatctctactaaaaatacaaaaattagtggggcgtggtggtgtgtgcctgtggtcccagctacacgggtggctgaggaaggagaatcaaattgaacctgggagacagaggttgcagtgagccgagattgcgctgctgcactccagcctgggcaacagagcaagactcagtcttggaaaaaaaaaaagaattggaatacctgtggatgggtttggggtgtaacggaagggccagagtccaaaggcatgattaggaggaaggatcagctggagatggtgcctgagggtctgggggctgcagggaaaagtgtgggtcggtgggtgggtgttcaggccctggttatctccctcccagatggacgtgcacattactccggggacccatgcctcagagcatgcaggtaagtgtggactggtggtgagggtgttggcccgggcaccccctaagcagtctgaggcttcccccttgcacaggagtctatgggcaagactggagatgggtaactgtgtgagtgaaattgccagagactcctcagtatgggttatagcctagaccgaagctggcctgagaagactctcctttgcttaccatgtcctcttctcccaaatcccctctcaccaaatatacaggaccagagtgtgtcaggcttcagcagcgcaggaggcagccagggggagggatcctaagaaggcagattaggtgggctcag

SEQ ID NO: 1886403 - DNA, 4001 bp, Homo sapiens; identical to SEQ ID NO: 1242734

SEQ ID NO: 1886404 - DNA, 4001 bp, Homo sapiens; identical to SEQ ID NO: 1242741

SEQ ID NO: 1886405 - DNA, 4001 bp, Homo sapiens; identical to SEQ ID NO: 1242744

SEQ ID NO: 1886406 - DNA, 4001 bp, Homo sapiens
caggcctttcagaccaaggaggcagctggtcctgggcatcaacatgtggctctcccttcagtatcatggaagacccatcctgcagggatgaaattcatcttcctccacaaactggtctcagcgtgtgaaggccccccaccacttatctagtcacccaacctcaatttcccatctcctatttcaagaatgccccttggaacccttctaagaagcacactgctcacaaaaccaagctgctttttttttttgagatggagtcttgctctgttgcctaggccggagtgtagtggtgtgatcttggctcactgaaacctccgcctcctgggttcaagagagtctcctgtctcagcctcccaagtaggtgggacaggcatgtgccaccacgcccagctaatttttgtatttttagtagagacggggccatgttggccaggctggtcctaagctcaggtgatccgcctgcctcagcctcccaaagtgctgggatcacaggcatgagccaccacacccagccaaaatcaagcttcttaagcccgtgttctcaggcaccagcctaaaggcaaccccagctcctgccggctcctgcacttaggtctacattccccaaaccacagaggactgagaatacctgaaacctgccctcccacctctctgcttttccatgctgcccctgacatctcagtctgtcgggcaaacactgactcatccttcaaggcctaggtgaaagtgtctacaggtagactattgctgcctacctgccacccatcctccttcccagagatcagtgaatgaaggatgtggagccccagaaggagggaactatgtcttctgatctgtccacagccttgacctccaaagtttagatgtggatggagtagaataaaggcaaacttctttttttttttgcaatttggccttggccctaatggtcaggctgcatctgcttgaaatctacaataaagagcaaatagttgataacgttgtgaattgcagaggggaagctggcagttgagaatcaggagaaggaagtgaaaatttagaattttactgaaagccttagaagaattaggttgggggaacagggtggtggatttgagaccctccttgccatagatttggaaaatgcagggaaaatcagtccccctgtggggtgttaaaataattaaatgggaggcaatttgactgaagtggctgtagtgccctgggtttctacctaagaaaaccaaaacgtaactcatgcatttcttagaaataacttaaaggaaaagaaaacactcttaaccaaccacaaaccaccaattaacctttgattacataatcagggaatttccgcctggacagttcaaataaggggactacgtaattgtagccaatcaattactgaattggctttgcttcctcatgcatcttattaaaccctttccttcaagcccctccggtggaccccaaaccacaatccatggttgtggcttcctgattcacgggtcgttatttgctcagataaaatctttaacgttttaaccaaacctcagtttaatttttaacaaaagaaagaaaggactacggaccccacggaccacagctcctcccacgcccgaaccccgagccggggttctcccctacggcccctcccgtcatcaccgcacaacgcggggagacacggggctgcgggcgcgaaactgcccagagagggctcaaggcaggaccaaggtcgtcgcgcagggacgggacgaggcgcccggggtcccagctgccggccgagccgcaccgtgtgaccgaggagactccgggccccgaccccggagccgccaggggcaggcccggttcccagccgacccctgccgcgtctcgggaagctcagccccgcagactcaccatctcgcggcttcaggagcgtcccggtatcctctctagggaccgtccagtacctgcaggtcacagggcaaaggaggctgcggaatgaaggagaaagagcagggtacacagatcaagcagggaagcgcacctgggagaggaaaaggccagcccagaacacaggaagtgcgccccctttttcggctgcgcgcctgattggacaggctcgacaacggcgccgctgaatggatagggctccaggtcccgcccccttacccccgagtgacaggagatgcgatcacaggtgtggctgaatgaggcctgaatgaatgattgtctgcagcccttttcaggcagggctgactccctgtgctgggacctggggctgctccggacattggtatttaactttgctcataagattatatcaatttatgagtaatataggtaatatgtaaaattgaaaattatataataacgattcttttaaaatttcagatttcataaccttcatggcctctggtcccttgtggaggcagcatgagatttgaaaatggagggagtcctctaagtcagaaatgtccaataggaataaaattgagccgcatgtgtcatttacagtagcctagtggcatcatgaaaggaaaacaggtaaaattgatggtaataccttaacccgatatatccaaaatattatcactcaaatatgtgagcaatatgaaattattaatgaagaccaccagagaatgcttcttaagtttggggtactaaatcttgtaaagtcactctgtatttaaacttctagcacatctcagttccaaccagctctatccaaagagctcagcagccccacgtgggcagtggcttccgcattgaagagcagatctgagggcacttgcgcgtctaacctcagggaaatcgagggcctggaccccctttcctgccagacgagagcgaacaccctcatcctgcccatctctttcctcatgcccaagggtgggagaggcagtgcccagtgagagagccagggctgcagtcaggaggtgtccacaggtcgaccactgctgcccacctgcttctgggcagggctccctcagccttccaaaggtcagacagtgaatgaagagtgtcaggcttcaggaggaaacccctgacttcagatctgtctacagccttgacctccaaagtttggatgtggagggaataaaagcaaattttttttattttgcaatttgcccttggccctgatggttaggctatggcgggctgtttcctcctatggtgtggggactgtgtgagtttaagcaccaagcatgtcaacatgcatttctgtataatttatccctatccaacaagaggccccactttaaataaagggaaaagcaaatcaataccttatacagtgccttctgtttgccaggtaacaacaagtagtgaccaacctgtcatttgaatcctggcaacctgactgcaggtgtatgtatcagttagctattgctgcattaaaaaccaccctaaaccttattagctcatgattgggatggtcagtcatttaggctggactcaactgggccattcttctggtctcagctgggctccttcaggcgtgtgtggtcagctgctggttgactaagtggctctgcttctgggtgtcagctggggcaccttggttttcctccccagtgggatctcatcctccagcaggctaacatgtgcttgttctcatggagatggcagggttctaaaagaaaaagcagaagcattcaaggccttatgtccctagaccccaaactgtcacattgccatattgatagctttctattgcccagagcaaataaggccagcccagatccaagcgtcaggaaacagattctgcctctatgttggagcagctgtaaaagcatattccaaagggcatggacaccagagccattttgcagtcagtatcattctgccttttcttacagcaaggtttatataactgttccaagtcaaggaacatgtccaaagcactacagctactaagtggctggactgggactctggatcaactttgcctgactccaaagcccatgtacctccatagacctcacaactcaagcagcttccctaggcctttgagatcctgaagactgactcttctgcaa

SEQ ID NO: 1886407 - DNA, 4001 bp, Homo sapiens
atgggggggttcaagccactctggggacggtggattcgaggcttctcccctcaagtggctcccagtggtctccagggtggggctgggagtgtgggctcggagtgtggcattggtgtctcacttgggcgttgggcaggtggcctctgggctgaccgtgggagaggctgcaggaccaccttctgccctctgccctgagtgaccagggagaggtcccggagcagaatcccccttcctcctgcccccaccctcctggccgctctcactgggcccctcagttgagccacctgtcaaatcaggcgcctgagcgctctcatctgtaaagtggggacaagggcaggaagcgccaagttcctgggatctaagcaacaagtggccgccgccgtgcgccgctctctcctcccgcctcccccggtctccggcccggcctctccctccccatccccaacggcccagcgccacccctaccccacagcggacagtgcgggcgcctccggtgtccagaggacaaagaagccccaccggccggggtgggggcgagggcggagtaggaaggagcccggccgcggaggggaggagggcgatgaagtcaccgcggggccgcctcacccagtcccgggggtgggggatccctcccgctccgcacggccccccgccggctcggccccgcaggtcgaggccccggcccgcactacccgctcgcaggaaagcggaccccgctgcggcccgggagtcccggaggtccgagttgcccgagtccccggggcccagagagggcgggggcgcctggctcacacagcaggacccacatccccgggccccacccacttcccacggcccccagctctggactcgcggggacagcgccgcggatggcctgggctcgggccccgccccgccgtccaaagtttggggacctcgacccaacttcgccaggcgcccgagagaagtcggccgaggcggcgcggagagggggtatcggagcacggcggccgcccccggaccccacccgcgccccgacgtcctcctccgaaaggagccgcgcagtcctagcggggcggccgagggtcccgccgcactcaccgactcggccagcaggaggcggcctttgagagagcagaggaaagcccgcgccggcagcagggcgcggagcccggggaccgcggggccgggacgggagccgccggcaggctcggggtccgggtcggggtcggggtctgggggccacatggcggcggcggcggtagggccggggctcggcctggctcccctcttctcgcgcccggagggaagcggaaacccgggctgtgcggaaggagggcaggcgacactggctcgcgcaggggcgcatcccccgccgccacgccccgccccgcccccacccgctcctccagcccgcccctccccctcggaccccggctgcgggggatgctgggcccgacccgccccctccccggcctggggcctccgcagactccaccttcttcttcaccctggttcgggccgctggagacctcccgatcaccgccccggcaccccttcggagctcccacccgtctgcccctatccagaagggctgtctatactcgctgtctccggtctaacttcctgcccgtgcgcgtgtctgggatccgggaacccaggcgtctaaacagcaaagaccccggccgtgatgtcggctccgcaacccatgccctctctttttcttgggggccggagttttcttgcgactttcttggccacccctcctgtccccggccagccccaccctcctccagggcctctttgttggctgttccaggcctcggtcctgcacccgcctcccccaacccattctcagaggactctcagacctgcaagcgcagctccaggcacacacacagacacacacacacgcgcgcgcgcgcgcaaacacacacaggcacgcacatctgcaggacttcctgacctgcagtccccccaccccaacacatctctctctctcacacacacacacacacacactccacacgcacatgcgtgcacatctagagagcgtctggagttcagcgtgatcaagacccagcttcctgtgcctctgcgaagggcactgccccctcctttccttccacctgactagcggagacctgcgggttgtccttgtccctcttcaccggcagtctgtaaccaaggtcctcccactttcacctcctataactttctctgatctctgtctacttctcaccaccactagatccgaaaccattcctgcctgctccccgctgaactgctgtgatggtgtctttaagaggcccttaggttttctctctgggcagccgggggagagcttatggcacagtactgcgcacccttgacataactaactccatcttagaaaaagacttcattttatatttcatagggtgctttgccaacaagggcaagatgttttgtttaataaaaaatagaaggtcaggcgctgtggctcatgcctgtaatcccagcacgttgggaggctgaggtgggtggatcacgaggtcaggagttcgagaccagcctggccaatatagtgaaaccccgtgtctactaaaaatacaaaaattagctgggcgtggtggcaccgtgcctataatctcagctactcaggaggctgaggcacaagaatcgcttgaacccgggaggcataggttgcagtgagccaaaatcacaccactgcaccccagcctgggcgacagagcaagactctgtctcaaaaaataaaaaaaaaaataaataaagactgcgtccaaccacataaggacacaaagaagcacactgttcctctaccatttctcaccagagcactctgtgactacaaaacagcagcccagcagccttaactgacaaccatcccactgccgttcataagaactctgcatctgcctcccaaggctctgcccctcaaagactctgcaagaccctcaagcccagaccaggattccttttgtcttcttccttaccctggaactggttccttaaccctttctcctatctctttttctcttgatgttaaatgctactttgtttgttgtggaatgtttataacatttacatgtggattaagtatactattatatatggtttgcaatattgactgacttgtggagtggcttgagcccatgtgctcactactgagtgaacgggaagtactaaggaaaattggctccttgggtctgggtgcagtggcccatgcctataattccagcattttgggaggctgaggcaggcagatcacctgaggtcaggagttcgagaccagcttggccaacatggcgaaaacccatctccactaaaaatacaaaaattagctgggcgtggtggcacaggcctgtaaccccagctacttgggagggtgaggcatgagaatcacttgaacccagaaggcagaggttgcagtgagctgagatcgcaccactgcactccagctgcactccagcctgggcggcagagtgagactctgtatgaaagaaaaaagaagaagaagaagaagaagcaaattggctccttgggatagcttgtggcttttgtttttttttacccttgggtatagggtgaataaaaatctgacactgtggaaagacacaaacacgtgtggacctagttatctcttttttctttcttgagacagaggcttgctctgtcacccaggctggagtgcagtggcatgatcttggctcactgcaacctccacctcccagattcaagggattctcatgcctcagtctcccaagtagctgggattacaggcctgtgccaccacacccagctaatttttgtatttttagtagagacagggttttgccatgttggccaggctggtcttgaactcctggcctccaacaatcttcccgcctcggcctcccaaaggtttgggattacaggcgtgagccaccgcacctggccagacctgattatctcttgaccttgtaccactcatgacaatcaccagtcattgatcacttttgatggcagccgtggctccagac

SEQ ID NO: 1886408 - DNA, 4001 bp, Homo sapiens
catgagccaccacgcccggcccaggtagagttcttaagcaacttggccctgtgggtgttggggaggccatctgtccctggtttctgtcactgtggctgcgtttgaacatgtctatggctgagtagtttctagtgggtgcaggagtccccatggggacacccagatgccccacaggaagcactgtggctgcttcagacaaatgaactgcagggatcccagggggtccccagagcacccccatttgctctgcacatggccttgggtgcagctgagccccctttggaaagatagactaaggcatagagacgggctgggaggctgctggggcctcccaggaaggccttccatgggactgacccagctctggccctccccttcctgtctcctatgcctgcaccccaaagcctaattctggggattcccctctcaattcctgttttttcatcccgcgatttctggggccacttcctctctctgtttctgtccatctcagcctctgcacttgcttggcctgggggtgggagtgaggggactagggaggcaggagtgccctcagcggctcctgtgaaccctgagtgctgaccgttcacccttccttatcctccctgacctggattcctgacatctgctgggcccagggtggcctctatgctcctgctggacatatgcctccctcttatgaggtggtcttgggtggggatgggggggttcaagccactctggggacggtggattcgaggcttctcccctcaagtggctcccagtggtctccagggtggggctgggagtgtgggctcggagtgtggcattggtgtctcacttgggcgttgggcaggtggcctctgggctgaccgtgggagaggctgcaggaccaccttctgccctctgccctgagtgaccagggagaggtcccggagcagaatcccccttcctcctgcccccaccctcctggccgctctcactgggcccctcagttgagccacctgtcaaatcaggcgcctgagcgctctcatctgtaaagtggggacaagggcaggaagcgccaagttcctgggatctaagcaacaagtggccgccgccgtgcgccgctctctcctcccgcctcccccggtctccggcccggcctctccctccccatccccaacggcccagcgccacccctaccccacagcggacagtgcgggcgcctccggtgtccagaggacaaagaagccccaccggccggggtgggggcgagggcggagtaggaaggagcccggccgcggaggggaggagggcgatgaagtcaccgcggggccgcctcacccagtcccgggggtgggggatccctcccgctccgcacggccccccgccggctcggccccgcaggtcgaggccccggcccgcactacccgctcgcaggaaagcggaccccgctgcggcccgggagtcccggaggtccgagttgcccgagtccccggggcccagagagggcgggggcgcctggctcacacagcaggacccacatccccgggccccacccacttcccacggcccccagctctggactcgcggggacagcgccgcggatggcctgggctcgggccccgccccgccgtccaaagtttggggacctcgacccaacttcgccaggcgcccgagagaagtcggccgaggcggcgcggagagggggtatcggagcacggcggccgcccccggaccccacccgcgccccgacgtcctcctccgaaaggagccgcgcagtcctagcggggcggccgagggtcccgccgcactcaccgactcggccagcaggaggcggcctttgagagagcagaggaaagcccgcgccggcagcagggcgcggagcccggggaccgcggggccgggacgggagccgccggcaggctcggggtccgggtcggggtcggggtctgggggccacatggcggcggcggcggtagggccggggctcggcctggctcccctcttctcgcgcccggagggaagcggaaacccgggctgtgcggaaggagggcaggcgacactggctcgcgcaggggcgcatcccccgccgccacgccccgccccgcccccacccgctcctccagcccgcccctccccctcggaccccggctgcgggggatgctgggcccgacccgccccctccccggcctggggcctccgcagactccaccttcttcttcaccctggttcgggccgctggagacctcccgatcaccgccccggcaccccttcggagctcccacccgtctgcccctatccagaagggctgtctatactcgctgtctccggtctaacttcctgcccgtgcgcgtgtctgggatccgggaacccaggcgtctaaacagcaaagaccccggccgtgatgtcggctccgcaacccatgccctctctttttcttgggggccggagttttcttgcgactttcttggccacccctcctgtccccggccagccccaccctcctccagggcctctttgttggctgttccaggcctcggtcctgcacccgcctcccccaacccattctcagaggactctcagacctgcaagcgcagctccaggcacacacacagacacacacacacgcgcgcgcgcgcgcaaacacacacaggcacgcacatctgcaggacttcctgacctgcagtccccccaccccaacacatctctctctctcacacacacacacacacacactccacacgcacatgcgtgcacatctagagagcgtctggagttcagcgtgatcaagacccagcttcctgtgcctctgcgaagggcactgccccctcctttccttccacctgactagcggagacctgcgggttgtccttgtccctcttcaccggcagtctgtaaccaaggtcctcccactttcacctcctataactttctctgatctctgtctacttctcaccaccactagatccgaaaccattcctgcctgctccccgctgaactgctgtgatggtgtctttaagaggcccttaggttttctctctgggcagccgggggagagcttatggcacagtactgcgcacccttgacataactaactccatcttagaaaaagacttcattttatatttcatagggtgctttgccaacaagggcaagatgttttgtttaataaaaaatagaaggtcaggcgctgtggctcatgcctgtaatcccagcacgttgggaggctgaggtgggtggatcacgaggtcaggagttcgagaccagcctggccaatatagtgaaaccccgtgtctactaaaaatacaaaaattagctgggcgtggtggcaccgtgcctataatctcagctactcaggaggctgaggcacaagaatcgcttgaacccgggaggcataggttgcagtgagccaaaatcacaccactgcaccccagcctgggcgacagagcaagactctgtctcaaaaaataaaaaaaaaaataaataaagactgcgtccaaccacataaggacacaaagaagcacactgttcctctaccatttctcaccagagcactctgtgactacaaaacagcagcccagcagccttaactgacaaccatcccactgccgttcataagaactctgcatctgcctcccaaggctctgcccctcaaagactctgcaagaccctcaagcccagaccaggattccttttgtcttcttccttaccctggaactggttccttaaccctttctcctatctctttttctcttgatgttaaatgctactttgtttgttgtggaatgtttataacatttacatgtggattaagtatactattatatatggtttgcaatattgactgacttgtggagtggcttgagcccatgtgctcactactgagtgaacgggaagtactaaggaaaattggctccttgggtctgggtgcagtggcccatgcctataattccagcattttgggaggctgaggcaggcagatcacctgaggtcaggagttcgagaccagcttggccaacatggcgaaaacccatctc

SEQ ID NO: 1886409 - DNA, 4001 bp, Homo sapiens; identical to SEQ ID NO: 1242775

SEQ ID NO: 1886410 - DNA, 4001 bp, Homo sapiens; identical to SEQ ID NO: 1242777

SEQ ID NO: 1886411 - DNA, 4001 bp, Homo sapiens
tttaatgatatgaaaaagaaattgttttagatcattaaggcaccccaggagactgtttcttttccaaaaaaacgaaatagcataaatttctcatatatttacctcttattatattcctgtttctgcacattaagcatgccctcctctacagacttattctgaacactaacaagtgtttgcttaataaaatactgctctattttatgcttttctttcaaaattagaaaccattattccacaaaggtagagcacaaagaaagccgacacaggcattgccaaaaagccacaagtagtattagtacatgccagaacacttaacattaaactatcatttctctctaaaacttctgttgctaaagtgctcacaaaatctggaagctcaaagacaggtttcaagtgcaattaaattctccaaaagcaaaactgtacaaaaatatgccgcccttcttatgtcaccatttatagacaacattttctcaggatcttaattaagataacgatgcacacctgtgtcaacattctctggcaagacagccttatcaatcataatcctttaagtacactccaaaacagcaaagcgatatgacagaagcaatctgttgcctttcctggtgttggtgttgtgtctctcccacaagaatgatgagatctttaaaatacagcagacctacttctatgagtctttaaagttttaactgtaaatagctattaacactaaataaacaggaataacctcttttgcacttgactgaaacaatgacaactgtacagccaaaacttgaagaacaagctctagggccatgtcttgacaatacaattgcgaaccgtactttaaagctttaaattttaagagttatgcgaaactggatcggtgcagacatgacaaaccaataaacctttaggaagtttcaaaatgagaatatttaatagtcctacgtcaaaaacaacccgagcaaacttatccctagtgtaagtttaaatgttgggaaagacacaaattcaatagaaagtaaggggagaaaaagtcttcttggtaacctaggatgggagggatacagatcccacctctgctggaagagaaagcttcagagtcaagacaccaaactaccgctaacaagtatgcagctttccaaacggaaaagctaatgaataggaagtaaaaaggaggggagagtgaaacaaacggtcaccactacccagataaaaagttaaaacctcgtgtttaccagcaaacaagtgaacgctttcatataaaaacggagaaaacccgccagatgctatctgcatgccgtctgcctgctaatcatgatcggccgttccctttctcatattaacacaattctatctcagacgccgggcggccgtggccagctgagcagcagagccatcaatgtgcaaataaagcagaaaatagagacatccttaagaaatgagtcttaaatttggcgtagagcggaggtgacaaccacggcaacagaaccatacattctaaatgcctcaatatcttgcaggagtctctccagcccctgacaccaaaaagaagacagtacaagaaaaggggttaaaaaaattaaaaaaacaaccaacaaacaagccacggggcgggggcgggggcgggggcgggggtggggggagaaagcgcgggactgccggagtggcaggatgatgtaatgaggatgtctgtgtgacagactcgggttctcggtggcacaaacctccaagggctctactccggaaagccgtgtcccggacgagagccgcggcgacgaagggaacaggcgtggacagaggagccacgcccacgcgcgcccgccccgaaccccgacacccggagaggctcgaccggcgccgacgcggcccgaggcccaggccctagcccacgggacgtctggtcgggcgcggggcaccgccgcgtccgttcggcccacgaggggacacgactagaggggcggacggcgcggccagagggcctggcccgggcgggggctcacctctcctccgccgcgcgggcgcgcgggccgcggacgctccctcgtggctggcgcgagcccccggcgggcggcgcgcgcgggccgttaccgaccgttagcgccaggggctgcggctgcggcgggcggagccgggggcgggcgctgaggggccgtggggccgcaagaggcgggagcgaggggagcagggcggggacgctgctcccaggagctcccggcgacgactcgggcctactgcgagcccgggaagaggccgccggcgaggccgccactggccggctgcgcgctcccccaggctcgggccgcctgggccgctccgcctcgcttagacattggccggctggcagccacctcggccccacggtccccgccgccgctgcagccagcttcccgtctccatgacaatagcgcgatcgagaccccgcccctccccgcccctctggcgccgagactcggaggaaagcggggttacgtcaccagggggcggagcccagggaggccagcgcccaatcataggtgaaggaggtgtcaggcactgggctgggcggacccaggggctctcggagaatgtagtctgaaccgctcaggcctcttggtgggcggtgtctgggggaggggagcagacggaggggaggagccaacgcgcgtgcacgagagcgcagcaccgagcgggtgccggtgcggcgctgggttagtgtgagatcgcgaaataaagtacatctcgcccgtcaaagtcaatgcgagaaactttgtatatagttatgcttcggcttgcgtgtggccccattatgcgaagttcccgatatcccgagcttccgcggcgtgcccaaacctgtgccatcttctgtcctggttcaccagcgcccctgtctgtcccagagttcgagtgcgtccgtggcttgtggtggcgggaggtggagagaagaggagagggtctgttttgtattctaactgtgtggccgtcgtgggcaagggctctgcctctgactcagttgtgtgtgtttgcttcgccagcgcctcgctgaacaaacagtggttgggttgggcactgctctgcccagtgtttgcagtggagcgtgggcggatgcgagagtgcgtgcgaaggggaaggcgacttagttaaacaaaagggaaggggacccgcaccctccaccaccaccgacttggcggtgcgagctgcgtgcggtgggaaaaccgggagaaagaggctgcgaggcgtgggagtggagctggggacggtcccgagatctcctcgggtgtagctgattctctgtctggcagttcttgcccaccacccctactctagaaaaaggctaccccggtagttccaggaaccagtgtcttctccctcgccgtccggcggggggtcggtagaaggaaggcgaggcggagacgtgcagacgtctgaggcctgtctctcgcccacctgctgctgccggcgcagaggggcagtcatcccggacttcctgcgccctgggcgcgggccatccatcggctctcccagagactttcattccggatctccagctggctctccgggccccctggcttggggaagacgccagaggggggtgggcaacgaatggcctcggagcccagcctgccggagaacaagaaatccgctaagtccgcgatctactgtggctaggagagcgcagagcgttcgccggcgcacagcccgcggcctcgttccctttgtgcttcggggcggcgggactgccactccgccccgagttagcagaagaggaaagttggaagagatcggcgctcctgggatgtgattgtcatcctggggccggcgctcgagagtctgagagaaagcgagagagagggagagaccggggaggggaaaaggggaggcaaagaggaggggtgagagggggggccgcggaggggaggcgggcgctagggaggggcgagaggagcgccagcgagcgggagagagagccgaggaggaagagggagagggcgaggcgcgcctggcggccgggttggctgcggccgcccagaagc

SEQ ID NO: 1886412 - DNA, 4001 bp, Homo sapiens
ccaaaagcaaaactgtacaaaaatatgccgcccttcttatgtcaccatttatagacaacattttctcaggatcttaattaagataacgatgcacacctgtgtcaacattctctggcaagacagccttatcaatcataatcctttaagtacactccaaaacagcaaagcgatatgacagaagcaatctgttgcctttcctggtgttggtgttgtgtctctcccacaagaatgatgagatctttaaaatacagcagacctacttctatgagtctttaaagttttaactgtaaatagctattaacactaaataaacaggaataacctcttttgcacttgactgaaacaatgacaactgtacagccaaaacttgaagaacaagctctagggccatgtcttgacaatacaattgcgaaccgtactttaaagctttaaattttaagagttatgcgaaactggatcggtgcagacatgacaaaccaataaacctttaggaagtttcaaaatgagaatatttaatagtcctacgtcaaaaacaacccgagcaaacttatccctagtgtaagtttaaatgttgggaaagacacaaattcaatagaaagtaaggggagaaaaagtcttcttggtaacctaggatgggagggatacagatcccacctctgctggaagagaaagcttcagagtcaagacaccaaactaccgctaacaagtatgcagctttccaaacggaaaagctaatgaataggaagtaaaaaggaggggagagtgaaacaaacggtcaccactacccagataaaaagttaaaacctcgtgtttaccagcaaacaagtgaacgctttcatataaaaacggagaaaacccgccagatgctatctgcatgccgtctgcctgctaatcatgatcggccgttccctttctcatattaacacaattctatctcagacgccgggcggccgtggccagctgagcagcagagccatcaatgtgcaaataaagcagaaaatagagacatccttaagaaatgagtcttaaatttggcgtagagcggaggtgacaaccacggcaacagaaccatacattctaaatgcctcaatatcttgcaggagtctctccagcccctgacaccaaaaagaagacagtacaagaaaaggggttaaaaaaattaaaaaaacaaccaacaaacaagccacggggcgggggcgggggcgggggcgggggtggggggagaaagcgcgggactgccggagtggcaggatgatgtaatgaggatgtctgtgtgacagactcgggttctcggtggcacaaacctccaagggctctactccggaaagccgtgtcccggacgagagccgcggcgacgaagggaacaggcgtggacagaggagccacgcccacgcgcgcccgccccgaaccccgacacccggagaggctcgaccggcgccgacgcggcccgaggcccaggccctagcccacgggacgtctggtcgggcgcggggcaccgccgcgtccgttcggcccacgaggggacacgactagaggggcggacggcgcggccagagggcctggcccgggcgggggctcacctctcctccgccgcgcgggcgcgcgggccgcggacgctccctcgtggctggcgcgagcccccggcgggcggcgcgcgcgggccgttaccgaccgttagcgccaggggctgcggctgcggcgggcggagccgggggcgggcgctgaggggccgtggggccgcaagaggcgggagcgaggggagcagggcggggacgctgctcccaggagctcccggcgacgactcgggcctactgcgagcccgggaagaggccgccggcgaggccgccactggccggctgcgcgctcccccaggctcgggccgcctgggccgctccgcctcgcttagacattggccggctggcagccacctcggccccacggtccccgccgccgctgcagccagcttcccgtctccatgacaatagcgcgatcgagaccccgcccctccccgcccctctggcgccgagactcggaggaaagcggggttacgtcaccagggggcggagcccagggaggccagcgcccaatcataggtgaaggaggtgtcaggcactgggctgggcggacccaggggctctcggagaatgtagtctgaaccgctcaggcctcttggtgggcggtgtctgggggaggggagcagacggaggggaggagccaacgcgcgtgcacgagagcgcagcaccgagcgggtgccggtgcggcgctgggttagtgtgagatcgcgaaataaagtacatctcgcccgtcaaagtcaatgcgagaaactttgtatatagttatgcttcggcttgcgtgtggccccattatgcgaagttcccgatatcccgagcttccgcggcgtgcccaaacctgtgccatcttctgtcctggttcaccagcgcccctgtctgtcccagagttcgagtgcgtccgtggcttgtggtggcgggaggtggagagaagaggagagggtctgttttgtattctaactgtgtggccgtcgtgggcaagggctctgcctctgactcagttgtgtgtgtttgcttcgccagcgcctcgctgaacaaacagtggttgggttgggcactgctctgcccagtgtttgcagtggagcgtgggcggatgcgagagtgcgtgcgaaggggaaggcgacttagttaaacaaaagggaaggggacccgcaccctccaccaccaccgacttggcggtgcgagctgcgtgcggtgggaaaaccgggagaaagaggctgcgaggcgtgggagtggagctggggacggtcccgagatctcctcgggtgtagctgattctctgtctggcagttcttgcccaccacccctactctagaaaaaggctaccccggtagttccaggaaccagtgtcttctccctcgccgtccggcggggggtcggtagaaggaaggcgaggcggagacgtgcagacgtctgaggcctgtctctcgcccacctgctgctgccggcgcagaggggcagtcatcccggacttcctgcgccctgggcgcgggccatccatcggctctcccagagactttcattccggatctccagctggctctccgggccccctggcttggggaagacgccagaggggggtgggcaacgaatggcctcggagcccagcctgccggagaacaagaaatccgctaagtccgcgatctactgtggctaggagagcgcagagcgttcgccggcgcacagcccgcggcctcgttccctttgtgcttcggggcggcgggactgccactccgccccgagttagcagaagaggaaagttggaagagatcggcgctcctgggatgtgattgtcatcctggggccggcgctcgagagtctgagagaaagcgagagagagggagagaccggggaggggaaaaggggaggcaaagaggaggggtgagagggggggccgcggaggggaggcgggcgctagggaggggcgagaggagcgccagcgagcgggagagagagccgaggaggaagagggagagggcgaggcgcgcctggcggccgggttggctgcggccgcccagaagctcctgccagtcctcccaccgactacaccccgggaaggaggagcttcgggcgcgcacaaggcgtcagaatcctcaatttccaacttagcatcttggcaggacctttgcaaaggcaaaagcagagccccccggtgcaaagagcgaggggaaaaaagagaaagcagcaagggaggggaggggaggggaaaaaaagcccagctggggcgagcgaggcgcgcagaggagcgggcgcggcggtcgcagccggaggcgcgcgggaagccagcgaggaggcgccgcgggccggagccccggagccggggccagaggagcggcggcccagggcagccagaggccaggtgcccgcccgctcgccctcgcagggcgccgcccggctcgttggcggccgcggcgcggcgcgccccatgcccgt

SEQ ID NO: 1886413 - DNA, 4001 bp, Homo sapiens
cttgagatatctgtaactctttttaatagcctcttactagttttacaaaccagaatcatctttgtcaaggacctgggagccattcctttgaaatgcaatcatcaaggaagacggtccccctatctcccagtttctgtgggagggtaggagcctaacttccctgagagccaattagcaaacacagctggcctaatcacggaggaaacacttgtaaactcagcaaacaactcagtatgcttccgacagccctccagcacctttctactctcatcctagagcttaaaaaccctgccccactttgtttcagcagagttagtttagactgagttctggtctctcttccctaggacaacagctttgcataaagtattccttacatatgtgactttctctggtgtaatttatgctttcacaaaggaaaactaagacaaattaaactacctataatcactgaacttccacagccccttctgccatttatggaacacttaacatgttctcgcaatgtaagtatcaggactgccctctgagttggatacaatagcatcctttcctcttatagttattttcagatataagccttaggaaatggaggcttagagaaaccaagcaatttgccataggtcacagcaaataaattctggactagtcaggactagggacaaggcatttgcctccaaagtcagtgcgttcaagcactttgcatagccaatataaaattcctaacagtgcttctatttgatttgattgtgtgtatgtgtgtgtgggtgtgtgtgtgttggcggggggatgaggaagtctctggaggatttatatgcgtgagttttgtttgggggtcgcccttttgggctctgcgcgcccatcgcggctagcgggtgggcctcccgggcgtcggggagcagctgcaagcgcagggggacgccggcagaagaaggacgcgccaggactccctagcacgcaccctcaggcctcgccgctgccgcctccgcctccgccgctgaagggcgcgcgtccacccggcgggactcctcctcccaacgccctccccaaccaccagccgcccgcgggcaggttggcagcctggccctcgcgcggacccggccgggagctggctgcactagggctgggggcgcgcagtgcgcggagcggtaggagtcagcggtgcggaaggcaggaggtgcgggtgaagctgtcggcggtgctcgaggggagcacgcaagaacctcctcagtccctcttccgcacgtgcgcccacgagtgtagtccccagtttgttccacctattatcccgcagctccagtgcgccccacctgttgcctcaccagcccaacgttacttcttccctgcttcctcgccagcccgtctgggggcggagacctcacccaccgccccacccacctcgtctcatgctcccacccacctcgtcccatgcgcacacccatctcgtcccttgcgctcacccacctcgtcccatgcgccctaccctatgccccaagtccctgaaagggccccacctaggtacccttttgggtcgtcttcaggttctttgccttgtcgaccctcctggacgaccccacatttctccgcctctcgcgggcttctctctccctcgtgtgccatggtcaccttcagctggcccagccgctgatgacagaagtttaagaagattcatgagccgctgctcctcagggtctactggagtttagcagataacttcccaaaggcccggggtcctgcaaacccctcatgcgggccacccaaaagattccgtcctggagcagaccccgcgccacgcgcgctgtactcgcgttcctttttccagccagcgcagccctgcggcttctgtccgggacggttctgcgcgtgggacgcccagcccgcttcatctgcgcccgctgcctttacccgccagccactccggcgtttccacctccgtgtatttctcatgctccccacgttctataatgcttgctcctcttggcgcgccccaccccaattctcgcatccagtgtggcttcctgtttagaatcgcagcttctgattggatcacaggccaaattcactcttccctgcaatgccggatacgacttgctccagctccgaagttaagctttgtcaggagagggcgcaagaggaacactgcaggacaaggagttctcttcctggttggggaaaaatccaggactgtatagaacatcctccgccccaaactgggaaaggagccaacagaccaaagaatgactcagaccagtccagcttgatgagtagatgagtttattgggactcacgtgtagggcatttcttttttttttctttttctgttttttttttttttttaagagggaatctcatggcacctcgttttcatcatcactggatgatttctctgggttagcaaaggtcaggaagacttgttccagtgtgatctgacagaatagtcttctaaatcaaattgctctttagcttgctccaaaatgccaaacacctttaacaacagcaataaaaacacagttaccattgcaatctccccttcagcccccaactcagatgagcctctcctccactcccccactcctatcaagtgtatgttggaggacaaaaggcacagaagggtgaggtgagaaggcggaagaacagagaattgagaaagtgagaggaggccatctcttgatggacatggactaatagtcggatttaggggaagaaatcaaggcaattaaactctaggggtgtttggaaagtaacctaacgctgctgctcctcccaacaatgccaggctcccattccaaatgcccgaatcccaaatactccccaccattagtgctctcttacttaacatgcaatgttacaagggcaagatttctaccatcacctttccccagtccttgctgggaatgtagcagttaaggatcccttggttcttgtgttttaagacactactcaagaaaggataataggaccggtgaataatcttacacacttaatttgaaatcaccaaaatattgctacatttacttaactatatacttgaaggggtggatagaggaggttaatacaaaaggcaatatgacctgctaacccaatctctttggtatccatgatatagttaatggtttcggcagatttattcctcatgaactagtcttattatgtggagttcatagcaatgattgagggtacaaatattagccagttcacctgcccaatgtaaaacacctgagccttctaaaagtctaatgtggtcaggtgcagtggctcacgcctgtaatcccagcacttcgggaggccaaggcgagcggatcacctgaggtcaggagtttgggaccagcctggccaacatggcgaaaccctgtctctactaaaaatagaaaaattagccgagcagtggtggtgcactcctgtaatgcaagctactcgggaggctgagacaggagaatcgcttcaacccaagaagcagaggttgcagtgagctgagatcacgccactcaactccaacctgggtgacagagtgagactctgtttcaaaaagtaaaaaaaaaattaaaaaaaaaaactaaaagcctaatgttgctacgagactttattcctaaacgcagtgctgagaatctgaaccaggatgttttcctcccggcagtgtgtgggcaggtacagtgtgtttggtggggaggacaacaggaataatcacaataagaacaagattaataacaataaggattaatcataataagaataatcatagtaagaatagcctcacgtgtgaaacaggaaatcacatataaatcaccaaagtcaggccacttgttctagtttcttatacaggtgagtaatgatccactggtggagtaggaggaaagagggtggtgtctattcctaatttagaataaacatttgtatttacacttttattgcatatttgtagattatagcaaatgaaattaactgggattaaaaatgtttgaaaaaacacatgtttgtaacagtgtgggatttttcttaatgtt

SEQ ID NO: 1886414 - DNA, 4001 bp, Homo sapiens; identical to SEQ ID NO: 1242814

SEQ ID NO: 1886415 - DNA, 4001 bp, Homo sapiens
  modified_base (3556)..(4001): a, c, t, g, unknown or other
taactttagttattatagaaagggcagtagcagatgggtctgctccgtctcgcttctaagaaggtgggcaggacaaatggcagcctcctgcagaggcccagtgagaagcctggccctcggccacgcaggatggaagacagattggattccacagaggggagctgccctgggaagatctcacggatggccaggacccaccatttcttcgggattcccctgttttctccaacgggcactaatgcctgtgcctgggtcctggcaacactctggattccacactctcctgggtttcacctttgtagcaggatccctgcagaccaggcccatgacaaacaccgtctccagcgggcagagcaaaggaagggcgcagcgccaggcagtggtgcagctgcctgtcaggaagaggcctacttctggtgaaactgggcagacaaaaggcagtgagaaatgtgatctcggggtggtggaggctctagggaaaggaaaaggcaggagtgaacttccacacagcagcaatggcagaaccaaaggttgctttgacctccacgagggctcagattcaggccaacagcctgtccaggacagggtgccgggtgtatcactggtccaggagcactatgctggcagaatccctttggtgcctgatggccctgccttcatgggaacagaggctaaggctttgagttacagctgcctccccaacagtgcatccccttctccttcctcagcctcaggtaggagacagggcaggcaactcccctttcctcttctccccttctccagcccctgtctgtccacccagctggaggcagccaggcttgcctatggactggttgacagccttcatgcacaggttctccaccagagcctttcttgggggcccctggcctgggctctgagctgggagtgaaggggatgacccatgcggactgtttgctgcttatagctttccctgggaaagactctgccaggccttggagccagaccaggaggctttataggccaccgcaagcagcagggctccagatgacatcacagggaagagcaagagggtgtggaggggcatcgaagcctctccaggagacaggagacgccggcccagtagagccctaggggtgacgccactcccactcactgtcgactctcctctcacctctgcaacactggggacactcacaagagtgtgatccaagtcggccgtcgtcttctgcagctctggagacctgatgctggggaagggcatgcctggcatcaccacacacctggggggagacaggagcctggggccggtgggcccacacatcaccagctgctccgttctaccatttcttcagccctcttggctgtgcctgcggctctgcccctcccctctctgcacctaccacccagagagggcttgttgagctcagagatcccacctaggccaatccactgggttctgcggcagcgatggcctgcctgatcttccacctgctctcccagggccaaagccagacctgctgagcccctccctccagccggctggtctgagcagtcacagctcggctttgggctccgatggcagcagacggcaggtaggggtccagctgctggagcgagggccggccacgtatcacagccaaggagatgagcacaagcactacttactggcctaggttgtcagagaagttgatgctctcactcatctttcctccaatctttcccgtatgcctggttgtggtattaagttacatgcagacaacaggggccagaagatgaacaatggcccatcccactctaggcatggctcctctccacaggaaaactccactccagtgctcagcttgcaccctggcacaggccagcagttgctggaagtcagacacctgcagatcaagaccacagcatcaagaccctgtgacctctcaaaggcccggtggaaaggacacgggaagtctgggctaagagacagcaaatacacatgaagagaaagaagaggtcaaagaaaaggctgacggcaagttaacaaaaagaaaaatggtgaatgatacccggtggtggcaatctcgtttaaactacatgcaggaacagcaaaggaaatccggcaaatttgcgcagtcattctcaacaccggccatgcagcaaaatcatcagtggaaatttaaaaaaatacacatggccaggccccagcccaaatgactaataagaatctccagggcttcacctgctagactggcaaaaatccaaaagtaaacactttgtggagaaacaggtattcctagacattgctggtgggatacagaacagtataattctgatggtaatcagttaacaaattaaacatatttattttatacttttaaacccaggaatcccatatttaggagtctactgagaccaaacagcatatgctccgggtgtttccctataatccgccactactgttggagcaagagggcccggcagtgtccccagctgccagcaggcgggcgtgctgccactacactttgagcaagaggagcctgcaatgtccctagctgccagcaggcggcgtgccaccactatacagtaagcaagagggccctgcagtgccccggcgccagcagggggcgctggccaccactctaagcaagagagccctgcagttgccctagtcgccagcagggggcgccctggcacagcaccgtgagcaagcgggtcctgtagtgcccggctgcaagcaaggggcggtcgatcccggcttttcggattactgaggttccacccgtctctgcgccgcgccaccgtgacgtgagtttctgcgcgtgcaacggcgccccccaccccccgcccccaggccggcgccgtgcgactttgctcctgcaacacacgcccccccaacccccgcccgtaggcgtgcgtctctgcgcctgcgccacgcctccacccctggacgcgctagcatgtgtctctgcgcctgcgccggcgcggcgcgcccctctgcgcctgcgccggcgcggcgcgcgcctttgcgacggcggagttgcgttctcctcagcacagacgcggagagcaccgcgagggcggagctgcgttctcctttgcacagatttcggtggtactgcgaaggcagagcagagttctgctcaggtcagacccgggcgggcgggctgagggtactgcgagggcggagctgcgttctgctcagcacagacctgggggtcaccgtaaaggtggagcagcattctgctaagcacagacgttgggggcactgcctggctttgggacaactcggggcgcattgacagtgaataaaatctttcccggttgcagccgtgaataatcaaggtcagagaccagttagaacggttcagtgtggaaaatgggaaactaaaagcccctctgaatcctgggcaccgagattctcccaaggcaaggcgaggggctgcattgcagggtccagttgcagcgttgaaacacaaatgcagcattcctaatgcacccatgacagctaaaatataacacccacattgctcatgtggttagggtgagggtgagggtcggttagggttagggttagggttagggttagggttannnnnnnnnnnnnnnnnnnnnnnnnnnnnnnnnnnnnnnnnnnnnnnnnnnnnnnnnnnnnnnnnnnnnnnnnnnnnnnnnnnnnnnnnnnnnnnnnnnnnnnnnnnnnnnnnnnnnnnnnnnnnnnnnnnnnnnnnnnnnnnnnnnnnnnnnnnnnnnnnnnnnnnnnnnnnnnnnnnnnnnnnnnnnnnnnnnnnnnnnnnnnnnnnnnnnnnnnnnnnnnnnnnnnnnnnnnnnnnnnnnnnnnnnnnnnnnnnnnnnnnnnnnnnnnnnnnnnnnnnnnnnnnnnnnnnnnnnnnnnnnnnnnnnnnnnnnnnnnnnnnnnnnnnnnnnnnnnnnnnnnnnnnnnnnnnnnnnnnnnnnnnnnnnnnnnnnnnnnnnnnnnnnnnnnnnnnnnnnnnnnnnnnnnnnnnnnnnnnnnnnnnnnnnnnnnnnnnnnnnnnnnn

SEQ ID NO: 1886416 - DNA, 4001 bp, Homo sapiens
cttaagctgacactcaccagtttttccccactgtctgtgtcccaacaggggctggagaatcaggaaaaagcaccattgtgaagcagatgaagtaagtccctgtggcattgggattcgtacttttattaagaataatttttaaatcgtttttattacattgcttactccacattgctctccaggcctgttttttaattcgtgcacacacacacacacacacacacacccctatatttgactcccctcccccactccctacgttggttctgggtcctccaccctaactcctgggtgggtgttttttgggagggggaaggggagcgcctgtagttgtatgaatgacagtgtccgccatattgatcagaacatcacactattggcatgattatgatcattactcttgcttgtggaatattttctgtgtctcactgcctccatttctgtctgtgtctctgtttcattctgtctctatttctttctcctcttccctccatacctccctatcccccaaggtccgtaatcccacttccccctgctcttttcctggggcagtgattttgaacttggctaacatggaggggacccagccctagactggggtggaggatcaagtgtctgctgttcatgcgtttggtgctgaattggaggctgtggtttctacatcccctcgcaccccctcccccgcaaaaaaagagggccagggttaggggaggggtcgtgtgctaggggaaggagtgggtttccaaacgtaggtgacgggcacagttttatccaaggtagaggtggaagggggagggaagctgcctgtgaggctgaatgtccgccccttgctgcccccagctcctctcctcccccaccctcccagcattgctctcctgacacccgcagttttcgttcgctccgtggcctttatcagtgtatttatttacactctgcataggccgtgttccatgtaatctacccacaatgcggatttcaggccccacttgccgccgcccccttctgccttagctatcagtttcccctcctaattaactgggggtggatttgagtgatggttgaaaattaaaacaaaatgggatattccttcccttccacactttctcaataaggagcctcgcccctcctttccacttgcaggctcgcttcttgccctatccactcggcagttcctggtgatcccacaggcaggtttgcttggggagggggtggccggcagcgaaggggtgtgcgccctccgggcctcctgtttcggttggcctgtcagttcgagacggaggagttcgtttagaccgtttagcgaagattccacgtcgctttgctgtgacaccttcgtgcacacacagctcctaattaggggttgctgtgcagtaaacaaaaatgattatttttcaacttgacacaatagccgaaataattgcatcgcgtagggaaacaatggaaaataaaaacccctttcgtgggaaggtgggagtgggagacgaagcatgcttgcggtttcagaaccaagatgcaaaaaatcttggatgtgtaacaggcatgacaagcgggttctaggcggcgccatgatggtagggagtagcgactcggagacaattttcccatctgcttgacatgttcttatttttattcgagagctccctggggctttcttcgcagagccccccttggctcgccgcacccttctgagccaggggtaatttagcttggggcttctcttgagcttgtgcaacccaaattgatggggaggcggggcctggggaattgccctttgcaacaaggtgcatgttgcatctgtctggagcccttgcagatctgtaaatgcaagccgcgccacccctttctcccgaggggggacgttttaaaacttcagaagtctgtaatcagcagtggcggactcggagcccagtagaagccccagccacctgagctggatgaggtttcaggcgttgcaagtggtggacagcgcccagccgaggccggaaaagtcgatggggctcagttcggcgacgctcggctaggttcggtgcggtctgggcgcggggctcggagggagtcggcggtgttcggagccgagtcggtgctccggcggagagagccgagccgcttcggagggggtcgaaagcattcggaaatactcgggggaggggagtgcgcaggaggggaaggaggagggggagaggccagagtctgcaaattaactttgcatccgccaaagcaactgcttttcctgaacatgccccataaattaggttgatttaatgagaagtttaaaaatatatactgaatcccccaaaggggtgcctcgcctttttttattcaaagagagctgagctctctgaggaaataggtgtgccactttaggatgaaaattcctaattatgtactgggcaggaaatcttaaatgaaggctggatgtagacttccccaggaaagtcctctgtgtcttgtatttggttacaccgaggaggggggaaaatgaagtgagtgatgtttgagattgttaaatcagaaatcagagcatttcttctctttccctttacttctcctttttttttttttttttttccaaccttacaggacacctttttcaagaaaaatgtcaggaaaacagattttgtaggtaaaacaattttttttttaaagcacaatacaccaactctctttaggaagtagggtaggtctgttcaaaaggtccatcacaaaagtttctggttcctggtttgccacaagggaccctggcgtcctgtcctcctgaagcattcatgaatggcagttttccctgtgagccttccagcttggcttgaaatacatcagatcagggccttgtgccaagctgaatgcaggacttgttttgttaaccacaaaatgtgggattggtgtcactgtatcctagtaacaaatttttttgagtcctcccttgcagagatggtttttgagatggccacttgactgagagtcactttgagtcaggagaattctactgtggatggggccaggcccgaaaatctaggtggcatttatagaaagcagtttccaacttccttgtgcaatacaattggtgaccaacctatcaggccatatgtacaggttaattaggaagctgtgttgtttcacctggacagatgaaattcagcagaaagccctctttaggttacaccctgtgataacccagtgatttcctaatggggggctgcagtctaatagctcagcacattggattgagaggaagaatgtggatattcagacatcactgaataaaactccttttatttagcatttccagaagagcaaagagtcattccattgagcctgtgttctcatccttgttgtggtgtgctaatttgaagaaactggcttccatatatttccatagtaactgaagtgaaataataaaggaccggctggcaattgctgtttagaacaaagggttaacatcttcatcagcctaggaacattgcagagatactgacataaagttcttctgcttgataagtgttgtaaggggaaacgtgcatctgcttaagagataccagtttagagtgtcatttgaaaagcctgattctcagtacttatattaaaatttttatttgaacatagtgttttgggttcccccccccttgtgtgtgtgattgtgaattcgtgtgagggagctctgtgtcagacaatccaaaatatttcagtactgagaaataaacagtgataattgagacagcacaaatataattttatacataccatgtgtgagtaatcagtgactctttttttgcatggcattttaaataattttgcttgttagggggttgtgacctcacctgtgatacagcctcatcattttgtagtcagtcaataagactctgagttattcagactaatcagaaaatttttaaagaattgtcaattttatttaattgccaaacccttacaaagaaatcccataacaagttgtaattttatgaggtgtagaattgacagaatatcactttaagtgacttcccagt

SEQ ID NO: 1886417 - DNA, 4001 bp, Homo sapiens; identical to SEQ ID NO: 1242838

SEQ ID NO: 1886418 - DNA, 4001 bp, Homo sapiens; identical to SEQ ID NO: 1242850

SEQ ID NO: 1886419 - DNA, 4001 bp, Homo sapiens
gggggcttctcacacagggcctacagggccaccctaaagtccagatgcaaacccacttgaaccctgaagatctatccatcctcaggtgaaaatccagtatcagggctgcctctaccattacagacaggaaacacggcatgttctcacatacgtacacatgggggaatccagctgacagagatgcaaaacgcttgttcgtgacacttcctcatgtggaaatccatcttgcattctatcattcttgctcactggattccagtgtttttgtgcaaaaaagccatctcatgcgaagaaaactgcagatatgaaatgtccatcatgtggaactgccaaggccatgagaaaatttgctgtttcctcttcccgtggatgacaccaaatacacaccttgcattggaacagcgttactgggtgcgagttaacctcacaaacttcgccatgactgtcactgggtgcaggttaaccccacaaactttgacatgactctcggccccagcctccactgagcctcgccaagccgcctaattcatggttttgcgtgttagccagggcactctggggtacagccacacatgtcgaaatagcgaaaggcatccctttcagccctccaactttttctcaacagaaccttcttccttaacacttcggattattacgcatctctacaaactccacgagtgagctgcagaaggttcaagagcctcctgatgtagttacaaaattcagtgtcactctgcatttttctcaaaagagggcccataccttccccggtctctactaaaaacacaaaaattagccgggcatggtggcacacgcctgtaatcccagctactcgggtggttgaggaaggagaatcgcttgaacccgggaggtggaggttcccgggtcaagatcgcgtcactgcactccagcctgcgcgacggcagcgagactccatcaaaataaaataaataaataaacaaaagtcgcatcctggaagataaggaatcaagtaaacttcttgggttttccttcatttaaaatatttgccttttaaatccaattttaaagccatgtagacgttcttccatcacccactgcacatcgcatgcaaggcataaatttttaaaccgtcgtccccagactgtagaacttagcatatggaaaacataaaaacacgagggatacttttagcgacagagagaaaataaacaccagcgatacatttagcaaaacatttcacccaacaagtggtttgttttgatccttcccctaaaatccctcctacctgtcaagctcactttcccctcggtgatcctgcacattcggcctcccaggggcttcccacaacgctgagcacagccacgggcagcaaaagcacccaaatgccccttggccgggccgtgaaaggcgagttttcccgaccaatgtcatcaagaatctggaaaagggggcccaggagcatcaggtgctttcagcaagaacttgcaccttctgcttctctcgcaggcggaggcgccaaggaccccgttccaggtggaagcccagggcggttcctctacagacagaaccgaaaggtaaccctggaggctcggctccaggctgcgccaagccgaaaacaaactttccaggcacttccaccccgctgggccgggtgacacctcccggcctcccccgccctccgcgcgtctgtcagcgcccccggccaggccgccgcccgacgcaacccaggcccggtctccccgccgcagccaagcagcgccctcggccggcgcccgccatccccggcccggccgcccggccgcaggtaaggcggcacccgaccctcgggaccccgggccgccccgcctcgccgcgcgctcaccagctaggtggtggtcctggctatgggcctcgcgtctgcgcgggcgcctcccccgaagcgctccgccgctcggggcctcctcagagtcctccttccctaagctgaactccagcaacggcggccctcacgctgtgcccgcgacgccccgccccccgcgatgcccccgccccccgcgacgccccgcccccgcgcgacgccaggcaggacttccgtcgcaccgccgccgccgcccgcgcccattggccgcgcccatcgtcccttcgccgcggtctgagtgggccccgcctctgccccagctgcatttccgggttggggcctggcgggcgggagaggcccggccccgcctgggcagggggacctcgcgcgaaccaatcccagggccccgggggcggggctctgcgggggtggggcgagctgtcattcccagctcccagaccgggaaactgaggctcagaggggacctggctccggccaaggtcacgcccgaggtaatagcggggctgggctcgaacccggggctcggactccggagccggctctgcgtaaatgcggaggcgcaactttgctagtttcacaactaacaagcgttcacggaaggaaatctgggctataagtcacattcataaagcggaaaacaaccaatcctaccactgtccatagtcctggaggcagcctcagaacttctgtccttacctataaatgattttgtggcggttttttttttgtttgtttttctttttgtagttgttaatgtcaatcatgattttttgcttgtgttttttgtattttaggtttttttgtttgtttgttttgagacggagtcttgctctgtcgccaaggctggagtgcagtggctcgatctctagtcactgcaacctccacctcctgggttcaagcaattctttttttttttttttttttttgagatggtctcgctctttccgcctgcctcggcctcccaaagtgctggcattagaggcgtgaggtactgcacccaactgaaatgggttaactttttttttttttttgagacgaagtctcgctgtgtcacccaggctggagtcaatggcaatttcactgcaacctccaccttctgggttcaagcaattctcctgcctcagcctcctgagtagctgggactacaggtgcgtgccaccacacccagctaatttttgtatttttcgtagagatggggtttcaccatattggccagactggtctcgaactcctgacctcatgatctgcccaccacgcttcccaaagtgctgggattacaggggtgagccaccccgcccggccaactttatttttttttatactgacacatggccatgcagatcttgagtaatgaacagagaaaagggaagcagtgaaggagaaacaacttgaggaaattgtacacggtgaactttagaacacagagcctggggtggaggagcctcggggcaggggccaagggtgacaagaaggctgtcctgtgaagaaagcagctgagcaggcaccaggggcagagaagacaggggcagctgaagggcaaggaagaaaggacagttctcagttgtcctggaggcctcagtggcagccagaatgcttggccaagcccaagggaagccagaccaggcagcccctctgccctctggagacacagagaaacctccccactggtcaggtccagctgcccatcctaggacaccacacagggagcggatgtctcacctggcccagcaagattctccggacccaggctggaggaaggagactgaccccactctttatctcatcctttcctacccagaacctctgtccatgaccaatggatgacctcaggacaagaatgcaataacttggcctgatgttgtgaagtcacggtccatccagggatgggcaagaggatgaccagaaccatctcgagaggggctggaaagctgcctcacgtatgtggtcctgtgctgtgtctacatgttcctcactcacctctacaacgctcatggcacgagggaggaaatggggtgcagaggctaaggaacgtgcccaaagccctacagctggtgtattagtaatctactgctgtgtaaccaattgccccaaaatttaaatgtgtaaaacaacaaagacgtctaactcatggttcctgtgggtctggaatccaggagaggct

SEQ ID NO: 1886420 - DNA, 4001 bp, Homo sapiens
tgagatccactttatttctacaagtttatgatcaggtggtcaggacagggaaagaagaggaaaaaactttaaatcatggacctttattcttagacacctttatcctacatacacaaggtacatgcatggttgaaataacggaaacaaggtggataaaagtgaaagtaacttaaactgctttacccaggaatgcccaattcagatgctgcagagaagagcatgagaaccgggtgtcttcaggacaggtgtgcatctgggagcagagtgggcattcatcagcagggaggagcaaggcctgggtcgggggacactggggctgctgtcccagaggttggcagtgtagccctgaatccccaagacttcactcagtctcccctcaaccacctaaaccagaataaactgatgtagcaggactcctcaaacactgtgcagggtctccatgtcctcgatggcccctgatgagccacagtaccctcaggtcctagtgaaggagctggtgctgcctcctgcctttccccacatggggtcctgcagctcatcccacacagcctcagattccctctacagaacctgcccacagatgtcttctgagaccagcaatactgggaggcctgtggcccagacccaggaggaaccagctgagaggctccgtggaggtatcgctgatggtgtaaccagaatgaaaatgcccacttctgttctgctccctgagaacaactgtcaagccagcatgagtttccagttggaacttttccttttctccccatgtttgtcactgttttaatggacatcgcctggctattaaatcccccgatgaactcactttgaaaattatctattgcactgggcaccctttcaggaatcactgagtgttaattttctcagtctgagtgataatttatgagtcaaacaaggacagatctgaagccagaggctgctcctgttgggaaatccctgaggatgatgttccagggaagcctccagccttgggagtcccgtggaactgagccagcccaggtcatgaagggagctggtgccagacactgactggggacctgctggcctctgggcagaccgctctgtcgctgcacttggcctgctgggtatccctgtgcagtcataccaagtcctgtgctcagaagggccccagagtagtttaaagttctgctgccgcccctggaagctcatgattttgaacaacaacaacaacaaaaaacccacgttttccactcggccccacacattatgtggcctgcgcagctgtcaggctgtggccacagtgctggcatctctcacacaatgaaggctgctggagtcctggctgacttgttttgactcttttgtgaggcccacacctaagctaaacactcacgtgcccccacgctgactccccacactctaaagcatgaatctgccccttcagctgggagagggtcctcgtgtcatctgggtttttggagagaaggtcaagggagcctgggttctagttcttcagtaatcaagagcaatggtcttacctgttcacaggtccctgtggctgctttacagaaagcaggaagtggccacttcagccacacggctgcatttccagctcagtccaggcagagctgcaccctgccttgcacctctgcagatcctgaggggagtccttaactgagccagggcgagtcctgggggcactctgcccctgggcaggccctgaatctcctctgctcccacactctagagttcaacaggtctcaggggctctgcctgaggactgtccttcaaccaggtattcgtaatttccccaagacccaggcttgctgagtcactcagttacctgaatgcctttttcacaaaggaatgactgtgctgctccgtcttccttcttttttgtttgcgaggccacagggaaatctggatcctctggtgaaaaagcaaatccagttgctgctgctgctgctgctgctgctgctgctgctgctgctgctgctgccgccgccagttcttgtaaatgtcctcacttggtttctgggcagcaacttccttgacttgcctggggagcggatctgagctgcatttaccaggccatgcccaggggaagtgatcagtgtgggaccgtgaagctggatttccccaggagctccctccaagcttctgggatgatgataagactcgggatgaaccaaggatctggaaccatgggacaatgtgaagtctagacccagtggaggaagagaaaggctatgggaagggcaggcttcacgttactgagcatccgctacctgccacacactttcacgtggacttattctgtgtgtttctcacagcacccttgagaaatagagactacgatcacatcttttacataaaagaaaaccaccatccagggaggcgaagtcccttgctcacagactgtcatgtgggaagctctctggatgcaatgatgtcctccagttgcagtaccaggcaagctgtcccagagttcatggagcggaaaggctcgagaagcaactgaggatgctcaaatcacaggtttataaaatccattcgtaaaacacagcaagaagctgagggaaggagatgggagggccgtatgacctgattcctgtgctgtcaacattcatcggttctcttctttctctgctagtcaacctcacccactcaggtgtgaccacgaggaccagagccgaggtctgggcaagagtgctcacagcttaagggcttatgacacacaccggctcaacgggacagacatgggacaagtgtgcctgatcatggtggcgttgccaagaagcagctgtcgcactgccatgggttctacgtgtttcttgggcagaggacgcatgggaccagaatgggcaccaggaatggtggtgaacaaaggccccatggttctgcatgtttaggtgtctcttgtataaaggcacattgtgaattgaacatttagtgcccaggagcctcatgcatattaagtatctcttggcccttgtgtctcttccttcccacatgtaacatacctgttctctgtaactatctattctgaacgtatctaaaaaccatgtcttgcctgtgttatacaaaccacatgcatactcacgttctctgatgtagctgaatgtttcctaaggccagggcacatttcagggtcacatagagtggagagagggaccaaaatagccttgctctgtttgactcccagccgagatgtctgctgggcagcactgcctctgtaggctctaatgggggaagggagctcaggggagcctctggggctgggcaggctaccagagggtgtggacatttgggtggaccctgacggaggacttgggtttccttgggaggaagtgtcaggaagggcatctggggctgagagcactgtgtgggcaacagaaggaaggaaactgtggctggctgggaagggatggtacgggggacagggtgagacttctggccctgggtgctcagatgaagacctggggttgcctagtggctggaaacacacaccagctgtggcaacttgacctctgggatgtgagtgtgcaggcagctgctgagaacggctgtggatttggagatgtggctacagggaatgggcagtggattcatctgggaattctgcaggcagtggcccatagaggaaacagcctggaaatgagactgcagatacgtgctaaagaggctggaggaacagtgaccccagtacaagtttatggatcttatccacaatctaaagaaatggaggccaaatggcttttgaaattctaagatacatgcagaggaagagtaatgcttcatgggagagccagactcttactggcagtgacgctacacggtagagctctgttcctcctgcccatgtctgtggttggggctgaggtagtgcacaaacatgacgctgatgaggcccaagcattgttggaaaagaaatcagcagctgccacaagaatcttgaatccgtggctgaagaccttgactttctctgggaccaatgtggtcaagaacaaagtaaaatcatg

SEQ ID NO: 1886421 - DNA, 4001 bp, Homo sapiens; identical to SEQ ID NO: 1242883

SEQ ID NO: 1886422 - DNA, 4001 bp, Homo sapiens
tgagaagaggggtatggctgctggctcacacctataatcccaacacttagggaggccaaggcgggaggcacacttgtggccaggagttcgagaccagcctgggcaacatagcgagacttcgtctgaacaaaaaaaaattatagtttaaaaattagctgggtgtagtggcgcgtgcctgaagtcccaggtattcacaaggctgagggaggaggatcgcttaagcccaggaggtcgaggctgcagcaaactatgatcctgcaactgcactccaacccaagtgacagagcaagaccttaaaacacacacaaaaaaaaccaaaaaacggcagaaagatgagaagccgttccatttgcataggcagttgaagtgtctaggcagaggcctccaaggctgactggatatcaggcaggggatgaggctggacagcctgcaatgcctccaactccaggttgcggaaatcgtgtttgtagtacctcagtcgaatggagattgagcgccccctgggagcagtgctcggtaacagacgctggaggaccccgatgaggaggggcgggggtcggttcaatctgggaggagcctgcgggtcagttttcttctcacaggagcgaactctgtccggcatcatggattcctgggctcccagaacggctgggctggaagggaccttagaaagggatctaccaccgcgtgccccgtgccagagttgggcactttggtgacaagaacattggcttgtttaacactcacaactgtgcttcgaggtggggatcattatccccattgtccccattttgcagatgagaaaaagcaaggtttggtggcttcccggggcggggcggggattcgctgtgactccaggtccttttccccggagcccgcacgtcttgtaagacactgattcccggaggtctgaggagcaggaatcgagtgggaggtgcccaggctttctagggaacaagagtgtgaatgcactctcgacgagaaccacgcccccctgttcgacaagactgattcctgctgccttcctttaagggccctcccctgaaacgcgaagtcctcgccccatggagaggcggacattctttattcccggatcgcccgacgtttttctcccccacccgcactgatccccactggtgacataaatccttcccctccactcgcgagtgaaagcttgggactacatttcccgccaggctgttcagaagccggtggcggagagaggagaaaagagtctttccgtttccgtcgcctcgcaatttggcgtgtccgccgggattcacatttcaacagcgacgtcctttctctgttggactcggcaaggaactacatttcccagcaggcaccggcgcagaggtcgaggggcgaggtcgccatctttttcgtagtcctctccctcatttccgcagggaagaggccagacgcctggactacacatcccatgtcgcagtcgccccggccctgcagccgccatctttgccggtggccccgccccatccccttccattgtctcgacttgagatgatagacgggagccgggagactgcaactcccgtcaggccgtgcgccactggtgggggggatttcgagaccacaggcgggcgaggtgcccaaggtggtggaaagcggagaccgggagaggctaggtagcctgccatctttacggtagtctcctcgtcctcctggttccgccattcttaaggaacactggaaggctataaaactactaatcccatcgcacctcgtaagatcgactactagtcaggtgtatgtccctcttccgccatcttgcttgtagtcctctttccttttcacctttccattgttcctgacgagtagaaatggcagcgggaaggcagcagatggactgcgactcccgtcaggtaccacacacgcggagggttgtggacaggagggcgtgtgagtgcctgggaaggaggtcgggtcgggggagaaggccatcttgtttgtagtcatcgttccctctccttctcgatgttctgcaactgggagcctcggggcaacgggactctaactcccggcatcctcggctcccggctgggcacgccctccgccgtcctgtttgtagttcccgctgtccccagcgtcctattgttcccccgtagcatcagtggccgcaggactacaactcccgtcgagccctgcgtgcgttcgtcctggaaagtggaggtggtggaggaaggagggggaagggggcggggttcctctgggagaaggagggagtaaagagggggaggaggaggaggaggagggaaggaggagggaggggaggggaggggggaagagaggaggaaggaggaaggagctgaggagggatgagagaggcggccagggccccgggccgtagcagcgcggggctgggggaccaggggggctgagacaccccaactgcccccttcccctttccctctccccctctatcctttccttccaccctcccgcttgaggagggggatttattcaaattttatttaaatccctatctcccgagggtcgcgcgcttgggggagggggagaggtcgggggtgcgcgcgggctggggggggcggggccggagcagcttccttcacctccccctccgctcgcctcgcagccgtagggcagggggtcgcagtccaggggcgggcccaggggaggggggcaggttacagcgacccccccctccccgggaaccggcggtgggcgggcttgaaccccggaaacggtggggggggcccaggcctggcactggacccctgggcagtggggtccgggaaggggccagttaaagggccaggggcgctggggagaggcggggcggggtggggggaggggagctgggactcggacccgggactgagtgggccccgggcagaagctgagcaccctgcgcccaaggagcccccgttggcctgggggggctgagggactgagcctcccagagcaggacctccccctggaagggccgcgccgcagcccgtgggagggcctcgcccccggcgccccccatctccactcgccgccgtcccggcctccgccggagggaggggccgagcgccctcggggggccgtggaccccggcgttctgagcgttccgcgccccgcgccgcccggcccccccgccgccgatggccgccgacccgccgggagctgccgagaagggagagatggctcccgggacacgtgtgaggtgggttcatgcggctcctcctcacccccagacctgggcagcgcccactcccattcatcctcagcccggcctctctctaccttccccgcccccagcctcaccctctctctactccaaactcatctccagccctccttcctatgacctctccaccctggggaactggccctccttcctagaccctgcttccccttgaaagcccccacccccgcctgcagtcgccgccctccaggcccctcccctggagcgctggagggccccttagccccatggatgggtatgaaagtccccggaaagggggaatctggggtaagactgactgggaagagaccctccaggcttctaattccacatgggatcttggaggatctggtttccatgggagggggagcccaagggattctagatgattagggatgaaagcagcccgggaagctgggggtcctaggactgagcccatcctcagttctgggaagatgtcaggctggattctagaatcccaaggaatttgggagattgcccaggtggacctgagggatccaagaggagggtgtcctggaggagggaaccctgtggggaacaagaggggctgagatcttgggctgagaagggtctctgaagaagcatctccagggctgtcagagctctggggagttagtgggcagaggagatcgttagggacttgggggcaaggatctcgctggatctggtgaggataactgggttgaggggaagagagattggatggctgctgtggatgaaaaggttggtggggcgggggggaggaaaagtccggagcttccgtctagga

SEQ ID NO: 1886423 - DNA, 4001 bp, Homo sapiens
aagccagggctgtgtaatgatggcagaggcatttctaagccccattctctccactccccgcctacacagaggcacatgggagagtgaaacgccaggaaattttgtccttggacgtagagaggggagatggagagtgttcacctctcagtgctggctgataagagattcaagtccatgctgagcctcagtttctccaccctaaaaatgtaggatcaagggagacctctcagggacattgtaagagctgagaatgaagtctctgagcatgaaggaaagcccttcttgctacggctgtggttttccccagaattcagggggtcccctccaaattacagagctgggagctcattcgcctcctctctcacgcccccacttctacacacacccagcagtagagatgagcagttggggagagcctccatctttggccttcctgagactcccaggcctactgggccggctctttcgctgggctccgtgactggctgttctgtaaggtctggtttgctatcagagccggtgaaagggcagaaagaagggtggaaaggagggaaaaatggatctccgggttagccaacgatgggacctgcggcttcccttccccaactgaagagggcccaggagtgaaggagtctgctgggaaagggctccccaacttcatgctctagggacccgctcactttgaaggcgccccatgagtgggggaggggcgaggggaagggagatgctatttccactttcagcgagccgcagcgtgcgccctgcacccctagctggcttaagagctgtgcagccttctctgctcacctctgctaagggccagatgtgctctggcagtcggcagtagcgaccccttcctgggaacagaactttcctccggaggccagggtctcctcatctgcaactgccatttgccacacacacacacacaaaagttgggagagaatgtgagaatgcttgtgttcgtggacgcgtgcgcacgtatggagcggcggtacctatgattatttgcgcgtggcgcctggctatgcgtgggcgaacgcgcagtggagaacatgtgggcgtgcatgaagtgtgcacttaaaccaaagtgtgccctccccgttgggcaggcctgtgtgttggtccaagggttgggagcgcctgagctgtgtgagggtcgctgggaagggtgtttgaggccgtgggcggtgcggagcgtgtctgtgtgcgcggaggctgagctggttgtgtgaagtggtagcgggtctgccagagagcgtttacctgcgtgaatgcacaaccacacactacgggtcacgtcccacactcattctttccctaggcgggccaggctgtctgcacgcggagacccagagaggccagcggaagggcagcgcgggaaggcggctctcttctcccgcgagcgcagatctggcggaggaggcggcgactgcccggcaggctgcgccggcgagccccccagctcctctcaccgacgtgccaggcgccccgaaggcgacaggcgtctcccgccgaaaatgaaggcgtccgagccaggaaggtgggggcgggtagttagcgggagacaaggagtccggagaaaaccgagaggcgggtaggctttgaacgcgccgcgccgcgggccgtgctgcgagcccggcacacgcctctcgccccagctcgcgctggggcttggcctctaggctcttcgcgatgacccgcgaaaacacccctcgcccccctcttctcaactcggaaccctggagggagaggccgcgcccggccagcagtcgctgcgagagcagcactcacctgggtctgtgcgcgccgcgatgcgccggggctcctgcgctgtcctgcgctccgctctcggcaccacctttcgtggctccaccgcccccagcccgcacccgagcgctgaggtggcaagggcaggtctgcgtgcgagccccctgcgggctggcagccaggtgcgcgagggccgcccttgccggcgctcccagcccgcgctgtctgctctcaggaacctggcctggcgcgcagtgtcagaggccccgcggcggcggcaggccgagcccacaggggcattaggccaactcccccctcccgccctgcgcacgcggaattctctattattattattaaagaatcccccagaacttgtttacgttaaaccctgtaaacttcctgccagggcctttgccatctctcgggaaatcggaacctgcgctttgaaaacggggccgcggggccaaataggcgggttttcagtgtgtgttgggggtgggggagggcaactgaactacgtgtgagttcagatccgagcgtggcgtgtgtacgcgtgagtgggagtgagtgcgaacttaagctcctgtgggccttaagcttccgtgtcaacgagtgcattagtgggtgcgcacatgcctgagcgccctctgcatatgagtgtgcacacacgcatgggtgtgtttacacgtctgtttgcgtaatttaccgggtttgcatgtgcatcaagacatgtatgtgtgtgctaatgtgtggacaagagcgcgagggtgtgcgcgcacgggtgagtgactgagcacgccgcttattcaggggcctgtgcggtctgggtcgcctctgggccagcgggttctcactcgcccccgtcaggcccgcggcgcccgagacaaagcggccgcgactcgtgctgcgctttcgttttccgcctgcgctctgccccggcggctgcccgcccgctcgcaagctgctgggcgagtccgaaaaatcccgggagcggcgcagttcttcccggggcggggagagtgggtaggcggtccctcgcgggaacttagccggccggccgcgaggaccggagtcgagccggctgtgcctgcgatggtcacgaccgggaggccgccgcacttgcgatttgctacagggctgtgcgcgtcggggaaggccccggcccagggagcgtttcccgccgcgccgcccgggcggggaaggcggggtccagcgcgcaccggggctgaaccgcgggcggagggcgcattaacacttgctcgccaggttggtggaggcggggcggattctgctggcggccgcggggcggcgagagtgggggctctttaagcgcccaccaacgcgggggcccgaggggggcagggacggagggagggaactccgggagggtcttaggccgacccgcgagacgcagccgagcggagatggagtgaaggctgcctcgcccggaatctcggagccgagcgccgcgggcggcggggactcagggctgctcccggctggggcgcacggccgtaagacctggaggtggtgcctccccccaaaaaataccggcgggggtagcttcctcacggccttcgcccgggctgccctcggcctcagctcggctcctttccttgtgggagggcgagaaagaaagagggaggagagaggtgggggaggcgggagttggagagagaggggctctgagccaaccgccggcggatccagcagctcctcggggagggcgggcgggagcgcgggggcgggcgcgccgcggctcgctcgggagaagtggccgccgatgacggcagaggtgcagccagccccgcgcgcgcagccccctccccttcgccctcctcccccccgtcgtcctcttcctcctcctcctcctcctcctcccggcccgtccgcggcgcagagcagcggcggcagcggcggcggcggcagcagccacccgatgtcttcggcgcccgagaagcagcagccaccgcacggcggcggcggcggcggcggcgggggaggcggcgcggccatggaccccgcgtcgtccggcccgtccaaggccaagaagaccaacgccggcatccggcgcccggagaagccgccctattcctacatcgcgctcatcgtcatggccatccagagttcacccaccaagcgcctgacgctgagcgagatctaccagttcctgcagagccgcttccccttcttccggggctcctaccagggctggaagaactccgtgcgcc

SEQ ID NO: 1886424 - DNA, 4001 bp, Homo sapiens
tgctatataagtaattgctatgctgtattgctttcggaatctgtattatttttattgttgaactgttattttttactgttttcccccacaaatattaaccacccacagttgcttcaatccgtagatggggaacctgtaaacatggacagctgactgtactttgtcctatgtctcagagacactgagtttaaggcccaggattccatgttgaccatccagctccaaagctgaagcttttaatcaccacacaccactgctttcccacttagcagatgaaactgaagcccagagaggttaagaggttgtccaagatcacaggggtggtgagtgaccaagcctggatttgatctatcctcacagagacagatatttgcaggtactgctgttctatattagttacctgtttcccttgctaggctgcatccctagctctcagaccagggatagaattcaaacgtttggaaaattaacgccttgaagactcaaagcagtccattcacttccacgagtaatttcacttgctttctcacaatccctaggtaagataacagttaacatataatcagcactcccatgtgacacttttcaatggccatgctaagcacctgatataggtgttattatctcttgtaaatctcaccaacactattttgcaagaactaatatcctcatttaatggaagaggaaactgaggctcagtgacttgcccaagcgcctgccaactagtaagtggcagagccaggattctagatcaggctctatgaccacagagtccacatttttcttttctttttttttgagctctgtcacccaggctcgagtgctgtggtacgatctggctcactgcaacctctgcctctcgggttcaagtgattctcctgcctcagcctcccgggtagctgggattacaggcacacaccaccacgcccggctactttttgtatttttagtagggacgggggtttcaccatgttggccaagctggtctcgaactcctgacctcaagtgatcggcccgccttggtctcccaaagtgctgggattacttacaggcgtgagccaccgcgaccggaccagagtccacatttttgacgtcgaggccacactcagttccacagatggggaaactgaggcccggggcagggcactacattgtgccagcggaatggtggccattgagggaagcccaggctgcacgccaattcttcctccttggtcagggaagtcactgaggtgcaggaggcggagggcgacaagtggaagccccttcccattattaaggatcgagagcgggcgtaatttgggatctaacccacgaggcggaaccaccagggcaatggcgcaaacggagaaccggaagtgcgtcactcaacggacgggcgaataagccgcaggccaccaatgggaacgccgcgttcgcgttcgccccgcctcaaaggaagaagagtccaccttgcgaccgtatccgctagcgcggcctgggatgcgcttgggctccctggtgggtaacgtggggagctaggggttggaggggaaagaagagggacttcaaggaaggcgaggggaggacggaaggtggggtgggcgagacaggcagtggggtccggccccggggtcggtccccgtgggctgtggaactcggggactggggtcttggggtttcccccttcttgatggggaaactgaggcccagacaggggccgcagaaaacagcggactgggatgtcctcccgcaacacacacgcagacatctaaaaatcttactatttagtgaaaaatatttttaatcgtaattacgatttaacaggtaaagatacttttcattgtaacaggtgaaaaagcaaaatataaaattcgattcaaactgtgattacatctatggaaaatacagcctttgccgaccaccctctttgtcccgccgccctccgtgctcccctctgttttgtgtacggagtttcttactttgtacaagtccgcagccgcttatgttacagccccgaggccagatgcgtttaaaatcgaggagttctcggagtttggaaaggtaaagtccctatgttctatgttaggtttcaccctcagagggggctggagcagcggcttgtaatcaaatacacgaccctttccacagctaaagttatgaagatacgcatatattacattgacctggtcgcggtggcccacggctataattccagcactttgggaagctgaggggggcggatcacctgaggttcggagttcgaaaccagcctggctaatatggtgaaaccctgtctctactaaaaatacaaaaaattagccgggcgtggtggtgcgtgcctgtaatcccagctactcgggaggctgagacggaaggctgaggcaggagaatcgcttgaacccgggaggcggaggttgcagtgaatcaagatcgtgccacttcactccagcttgggcaacaagagcgaaactccgtctcaaaaaaaaaaatgcatatatttacactgttgggataaataaccataaatagcctcaccttaagtcaggtcaagttttccaacttaaacaagttttggtattcagacttttttttttttttcccctgcatccgatcatccactagtattcatacctttttagatttgagggttgcagatgagggacctggattgtagttgttctgttcactcacttttctcactctcgctggatagagagtgtccttgaaaacaggaactgtgctgttgtatggtcacgtctatctctgccaccaactcttgtgtgtcaccttgtgccctcttagtctcagtttcctcatctgtaagatggggtcagtgaccctttgctcataaggttgttctggtttgggttaaatgaggtcgggcatgtgaagcactagaattgtgttagcacccgcacgaatggtatgactgagatttacttattccacaaacatttctattttaaaattattaaatttaaataaattgatttaattaatgcatttaattaatttaataataaatttaaacgtatagatgtatttcttaaaatgtgggtgataggaattttaaagatttatataatgcttcaaaagccttcgaaaaggtttttttaattggtttatctgtatatatgaactcttgaaacttatggctaaaacactaggatttatctgcaaggttgcagagagataattctgccttaaattggctaaaacaaaaacaaaaccagccaacctatattatacatgggattaaaaccaatttttctcccattttttttctccttttttcttttgctgcccacattatgccttattttatgagccccagttttctgggcttagttaaaaaaaattcagttctaaacattgaatttagggagtttttgttcttgaataaaaaggcatatacttagaaaaaaaatctgtttatccgggaaaatatattgaaatcatgctgctgagcctctattttctttgatgttttggttctgtattattttatcataactttttagcatttaaaaatttactgatgtacatttaaagccaataaactgttttaattaatttttttaaaaaaagtaattttttttttctttttgtgacagagtctcgccctgtcgcccaggctagagtgcagtgacgcgatcttggctcactgcaacctccacctcctgggttcaagcgattctcctgccttagccttctgagtagctgggattacaggcgtgcaccaccacgcctggctgatttttgtataaaataaaattatttaagtaggtaatacatgtctatgctaatcccaccattctccctacagtctcttctcatagagacaagggacataatatgcataaacaagcttatggttgtctttcttccactcctacttttcccactccttttccaccaaattatagcattcaatcctatcctgttctcattctcatttacatttattttggctgttatttaacatattcacattattttgttgttgttgttgttgttga

SEQ ID NO: 1886425 - DNA, 4001 bp, Homo sapiens
cccgggaatgccgagactgacttccacggggggaggggtgtagcgggccaccgggggggggggcacaggtgggtgggaaacagggtactagagagtcaagaggcagttgggaagcattgtgactagtaggggaaagtgggaatggagaggcaatccaaaagcctccagcccagtctctccaggcggtcccccatctaaaccccaggaggcctgaccctgcttagcttccaagctggagcaccctcaggctgctatggtgcccacgggctgccaggacggacccccgcgcggaggtgggaggtcctgggactcacaggggagcaggctggtggaaaagagaaggccagagagtaaaaggagggttgggaagcattgtgacaagtgacagaatgcaggaagggagtgggaagccaaaagccttcagcccccattcccccaaggttgtagtcccccatccaagccccgccaggcccaacccttcttagcttccgggctggggcccccttgggctgctagggcgccagggggctgccgggagagactcccaaggggaggtcccgggccatggtgggggcacaggcgggcaggaaaagggggtaccagagagtcagggggtggttgggaagtgttgggacaagcggaagaaagcgggaagggactgggaagccaaaagcctctagcccctggtctccccatgcagtcccccatccaatcttcagccaggcctgaccttgcttacctttcaggctgggatgccctcaggctgctatggcgcctgggggctgccgagacagacttccatggggaggccctgggtcatagtaggggtgcaggtgggtgtgaaatggggagccagagagtcagggggcagttaggaagcattagaacaagcgggggtaagcgggtagtcaaaagcctccagccccggttgtccccaggcagtcaaccattcaagccccagccaggtttgaccctgcttagcttccgggctggggcgtcctcagtcagctatgctacccaagagctgccaggtcagacccctgtgggtaggtcccaggccgcagtgaaggagcaggcgggtggaaaatgggggcaagattgaaaattttgcaataagagagggaaagcgggaaaagagcaggaagccaaaagcctccagcccctggtctccccaggcggtccgccatccaagccccagccagacctgaccctgatatctaccaggctgggggccctcaggtttctgtggccccctggtgctaccaggaggaacaaccaaggggaggtcctgggcagtggtgggaatgaaggcgggcagcaaagaaagggtgagagagtcaaggggcggttgggaagcattatgacaagcaggggaaagcgggaagaaagctagaagggagcgtgaagccaaaagcctccagcccccggtctgctcaggcagtcccccacccatgccccagccagtcccgaccctgcttagcttcctggctgaggtgccctcaggttgctatggcaggagctgctgtgacggactccatggggaagtcctgggccttggcaagggcacaggcgggcggaaaaggtggggccagagaaacaggggcggttgggaagcattgcaaaaagcgggaaaaagtgggaagggactgggagtcaaaagcctccagcacttggtctccccaggtggtcccccatccaagtcccagccaagaccgaccctgcttaccttcccggctggggcaccctgagtttgctatggtgcccaggggctggccaaatggagccccaaaaggaggtcctgggctggagcaagaatgcagtcatgtgggaagcgggtggcgggggggtcacagaatcgggaaatgttgtaacaagcagggaaaagtgggaagggagcgggaagccaaaagcctccagccccgatctccccaagtggtccctcatccaagtcccagccaggatcaaccctgcttagcttccgggctggagcaccctcaggctgctatggcgcccgggggctgccaggaccaacccccactgggaggtcccaggccgtggtgttggtgcaggtgggcaggaaagggaggggccagagagtcagggtgcagttaggaagagttgcgacaagcgggggaaagtgggaagggagcgggggaaagtgggaagggagcagggaagtcaaaagcctccagccccaggtctccctaggcgttcccctatccaagccccagccaggcccaaccctgcttagcttctgggctgggtagcttctaggctggggcaccttcaggcttctatggtgccctggggctgcccaaaacaaacccccatggggaggtcccaggccatggtgggggtgcaggtgggcagaaacggggggtgggcagagagtcagagggcggttgggaagccttgcgataagcgggagaaagcgggaagggagcagtaagccaaaagcctctggcccccagtctccccaggtggtgccccatccaagcactaggcagacctgatcctgcttagcttccaggccagggtgccctcaggctgccatggcacccaggggctgacagaatggacccccacagggaggtactgggccttggcggtggcgcatatgggtggaaaaagaggtgccagagagtcgggggcagttgggaacctttgtgacaagcagggaaaagcgggaagggagagggacaccaaaaacctccacctaccagtatccccaggcggtgccccatccaagccccaggcaggccaaaccctgtttagcttctgggctttgtcaggtctctgagccaaagctcagccattgtaacccctgtgacctacacataaatgtccagatggcctgcaagagccaagaagtctgggtcaaccaaaaaaacacaaaagaagtaaaataaccagttcctgccttaactgattaaccaacattacaccattacaccattgtgacttgtccctgccctaccttaactgatcaatcaaccttgtaacattcttattctggacaataagtcttatgatctccccatcatgtaccttgtgaccctgtcctctgctaacaatagatgaccaccttttactgtaaatttccattacttacccaactcctgtaaagcaccccttccttatctccctttgctgactctctttttggactcagtccacttgcccccaagtgaataaacagccttgttgctcaacaaagcctgttggtggtctcttcacatggatgggcttgacgtttggagccatgaatcagaccaggggacctccctcggaagatcaatcccctgtcctcctgctctttgctctgtgagaaaatccacctacaacctcgggtcctctgaccagccaagaaacacttcaccaattttgaatcgggtaagcagccttttttattctcttctccaacctctctcagtatccttcaacctctttctcctttcaatttcagtgccacccttcaatctctccctttccttaatttcagttcctttccctttctggcagagacagaggaaacacattttatctgtagactgaaaagtctggcactgatcacgtactcaggaagacagttttcctttggtgtctagtcactgcaggacatttgcctgattcacccacattccagaggtgttcgatcactgcgggtatgcgtgccttgatcctccaccttggtggcaagtaccacctcccctgggtggcaagtaccccctcttttctctcaacttaacttttcactatgggcaaccttctgccctccattcctccttcttcccccttagcctttgttcttaaaaacttaaaatctcttcaactctcacatgacctaaaacctaagcatctactttttttctgcaacactgcttggccccaatacaaaattgataatggctctaaatgtgcagaaaattacccttttgatttctccatcctacaagatctagataatttttgtcataaaataggcaaatggtctgaagtgc

SEQ ID NO: 1886426 - DNA, 4001 bp, Homo sapiens
tatttgagttaaggttcaatagcatcttctttttttaaaattttattttaagttccaggatacatgtgcaggatgtgcaggtttgttacataggtagtaaatgtgtgccatggtggtttgctgctcctgtcaacccatcacctaggtattaaaccccacatgcattagctattcattctgaaagcatcttcctttcataaaagagccagttgattttttctaaggggtctcttattactactatttattatttttatttattattatgtttttcaaagaggagttctggctgtgtcgcccaagtggagtacagtggtgccattatagttcactgcagcctcaaactcctgggctcaagtgatcctctgcctcaccccctcaaggagctgggggtaaatgctctgaggcacttctaacttgaaaacatggaactgaagagaatgcccttcctagcaccacctgctttctaaaattgccactggcagattgtccctggcgtctcgttaccatctgggggccgtgccaggctgaccatcggagagacttgggctctgttttgagcacagctgggtaacagaatcctgcacacacttccactactggcaccaagtctacttgcataaaacactctgcagatctactgtgcttccatgaaaggcggaaaggacatccaacctctgtgagagattttattttatcacctccaaaatgatgtttgcactgcttttgccagcctggtgaaagacaggcccgcccacaagcagaactgaggctcctcggtgtctctatgtattaatgttgcggacaccacataggaagagagagttgtgatgggacccacaggagttgcaattaagcacgttgtcagggctacacgctctgccctttctctgctgggagactcaggccaagcttctttaacatgtctgagcctctgttgcctcctgcgtaggaggcgggtcacatttgcctctgagggtttgctgtgaaacatagttagctatgacttttaaggcgctaagctcaatgcctggcatatcgtagcactgttaattaccattattaattatgtcctaaggaggtcaaacggcacattatgagttaccagcagacatgagtaagtcgcttgtacacggaacaccattttctgtatctgttaagtaggcgggcattcaaactcttttgtctgtttcccaagtgtgttgtgaggatctcataaagttttgggcatgcaatttcgaaaggtggcagccacgttttgagtgcttgtgatgtaccaggcacgtggctacggggatgccttcattcgctcagggagtggttcctagtggctggtccctgacatctgtgtgtgtgctgggtgggggtgtgggatgtcttcttcctaataagtgaatgaactgccaggctgaacgccctcgttttcttcccgcggggctggggccagagagggaatggacgtgacggtctgtgcagcctggtctcctcgagccgcttctcgacccttaggttagcaaacatgaaagacatagacaagcagacgcaggctgccacgttcgttctttctcagggtatgcagaggtcagggtaagaatccacgggtgtttctcaaaggatggcctctggccgtccgcagcgcagtcgccggggctgggctggcctcgaatttccatctgcctgccgctttaaagagctgccggctgaatccgctgcacacccacgtgtgagcacctgagagtctgcaggatctcagaggagggaaccgcgtcctacatgaggagcaatcaaggccggctttccggaggaggcggcctctaggactggaagaggaggcgggatgtgtttcaaccggcaatgggtcccgagagaccagggacttgttcacttcagtaactccagggcttggcaaaacgcctgtcacgggcggcgctcgacaatgactagctgaaagcaagagcgaagggcctgggagcatccctgactgtccccggcgcggattttacccgcccgagcatgcgcgcctgggcctcgcccgctcagcctccgcccctcctaccatcgcgcaggcgcggagcgggtgacgtcactacgcgccagaacctgcgccgggaagcgtcgcacagcgactgcatcaccatggagccgagggcaggtggggggcctggcggggctccggggcggctgggaatggggagggacagccgggaccggtgagggtcgaggcggggccaccggggctggcagaggatggggcagaatcaccggaagcggccgaggaggtcagagggggtctgtgctgggttcgggtcgaaccagcggctctctcgcccggaatcccgagaaagatgtcaggaaaaataaagataacgagaagacgaggcgggagggacacctgccgtgcacgtgggggagcccgtgggccccttgaggtcggggaaactgaggctcaggaacaggatcggaagccggtttgacctacacgcgggggtcgcttaactactgttaagcggtttcagcatgggctctggaattcctttgtatgttattaagtgggaatcttttgttgcagtaggtgtctccaaacaggacatacgtgaacaaatttggggctacatggaatcacaaaatttagctgactttccccgacctgttcatcacaggatacccaactttaaggtactgacatatttctggagtccagaaaaggaaaacaaaatattcttaaatgaataacactagtaataaaattctcttactgcgtcatggtggatgagaatgtggcgagcagtgagcagtggtgtgaaatcaaagccatttggccagggcgtccttagcatttagagacgtcatttactcttcacctggggcctcttgcgtctctgtgcagggtggtttggttgtctctaggtgaggttgtgtccagaattggtgggttcttggtctcactgacttcaagaatgaagcctcgcagtgagtgttacagtttttaaaggcagcgtgtctggagtttgttccttctgatgtttggatgtgttcagagtttcttccttctggtgggttcacggtctttgctggcttcaggagtgaagctgcagaccttagcagagagtgttgcagctcacaaaggcagggtggactcaaagaatgagcagcagcaagatttattgcaaagaacaaaccttccacaatgtggaaggggattggagagggttgttgctgctggttcaggcagcctgcttttaatctcttatctggccccacccacatcctgctgattggtccattttacagagagccgattggtccgttttgacaggatgctgattggtgcgtttacaatccctgagctagacacaaaagttctccacctccccactagattagctacatacagagtgcccattggtgcattcacaaactctgagctagacacagggtgctgattggtgtgtttacaatcccttagctagacataaagattctccaagtccccaccagcctcaggagcccagctgacttcacccagcagatcccgcactggggctgcaggtggagctgcctgccagtcccgtgcagtgcacccgcactcctcagccgttgggcagtggatggcaccaggcaccgtggagcaggagcgtcgctcctcggggaggctctagctgcacaggagcccgccggtgggggtggggaggctcaggcatggcaggctgcaggtcttggggaggcagctaaggcccggcgagaaatagagcacagcagctggtggcccaggtgctaagcccctcactgcccagggccagccgctgtgagtgcggggctccccacgcctacatggaactcgcgctggcccacaagcaccatgcacagcagcagttcccgcccgcgcctctccctccacaccgcccagcaagctgagggagccggcctgggccagtccagaaaggggctcccacagtgcagctgcgggatgaagggctcctcaagcacggccagagtaggcg

SEQ ID NO: 1886427 - DNA, 4001 bp, Homo sapiens
ctcagctttacctgttttttgagacagagtcttgctctgtcgcccaggcttgagtgcagtggcatgatcatagctcactgcagcctcgacttcctgggctcaagtgatcctcttacctcagcctcccaagtagctgcagttacaggaatgcaccaccgtgcccagctaattgtaaaattttttgtagagacagggtctcactttgttgcccagactggtcttgaactcctaggctcgagtgattctctcctcagccttgcaaagtgttgggattacaggcgtgagccactgtgcttggcctcagttttacttccttatatgtctctttttaatttaactttattttattatgtatgtatttatccttttagaaacagagtcttgctctgtcacctaggctggagtgcagcggtgtgatcatagctcactgcagccttcaccacctgggcttaagcgatcctcctgccttagcctcctgagtagctgggaccacaggcatgtgccaccatacatggcccttaacatttatcttgactgaaaaaggaagactcatctgtgaaattgcctgtttccctgggttctggagatgggtggagagcaggcactgtccctccaggggctgtggtccgtgtctttctgaacctgcaccagggaggtgcccgggagagcacggtgagctggaggctcctccatggggctgtttggaatccacagtactgggtctcagattacatgtgttaccctcagttctttctcagctttcctgaaatggagatcacataaaagttgatttccaggggagggggaaaggacagtgataggaggctgggcaagagccagctgcagcaccggagagccgggaggccccctgaggacggtcacaacctccagggagggacacgtcacgcgccattctctggaagaggatccttccttcttgtaggaaacctgcttgtgaagtgttgagtttagacaacggaaagatcacatcagtatccccttagaaagggttccactaaatatcggtgttcgttcacaattctttcttcctcttttctacttatgaagctagcacgtgctcttgtggagaaacgtgacctcacagaaacacatgagctagagaggggagccctgcccggcccacttcccctttctccctggcagctgagagccatccatgcgtggcgtattcctctgggaagatcttgagtatgtagagtccccagaatccaacttcattcttcttgagtgccacaaggcgtctcacatggtgctttccaggatctcttctgacgtgtcccatcaggagtcctgccccgattgcggctcacagcccggggccaggtggacctggccctgtggcctcctgaaggtcttcctgccagcccccaggaatgtcacgggacaggtttcctctgctccctgctcctcaggccgtccccctgtgggtgtcttaggagacacttgtgtcccacttggtggtggtggggcctccctggcacagctgcctcatgctctctggctaaaccgtgggcccaccaggaatctccagtctggtgcctcagggtgtgccccaggctagtccgagtggagggtctctcccctgtttgggatgcctgccctgctggagtgctctgtctcggaggtggggtttgagtgcagggctcaggggtgctgagaggacagggcaggaggcctgctgcatcccgggcaggtggctccctcttgtgggcacgcagggccatgcattgttggtttagctccctctgtcctttacagccaggctctcttcatggtgcccacaagcaacatcatacaaaatgtatgataacagttatttccaaaaacgaaacttcagggcagcctttgcaatgaatgtatactagaaggacatattgttgtcacagaagcccctgtgccctgccacttgtggtggcgccactgtcttccttctgttggtgaagggcgtggcagtcgaagaggttcctgagtttgtacttgtgttgcaccgttagggctgttagcagctgatccagaagcttctggaaacaacggagagatggatatgttttctcttagctgttagaacacatcaacacgagcattggcttttagctctacttgtcagtacaagacccaaaatatttcactgtagactcaagccttcagtggggacaggaagcgtgcgtgtggggcagagggactcgtcaggcccagtgtcctggttattacattgtgtgtttctttttctccttttctttcccaaccaggttgtcctggctcgagaactggcaacctccagagaatatgcgagtgagtatgggctgcagggagctgtgcgtccgggagcagggcaagcggctccgtgcagggcggctggggtggcagggccggtgtttctgtgctgatttcagggtacaggacactgttggctttagagaccaccaggctgttgtgtacaatgtttgaaagactttaatttgtaccagttacctttgtgagtcatgtctttagtgttttttgttgtttctgatagtaactcacttctctctcacctgaagttaaaattctggagaagcgacatatcataaaagagaacaaggtcccctatgtaaccagagagcgggatgtcatgtcgcgcctggatcaccccttctttgttaagctttacttcacatttcaggacgacgagaagctgtgtatcctttgcgtggttggtgccgtctgaagccacaccagtcacccctctcacttggaatcagaccctgtgtgttcccacaagcagcccccgctccctgccgagtggggtccctcaggccgctgacattcagggaggcagccgaggcagcgccagggtgtggctgggagtctgcacaggacgttacctcccggagaagccaccgatgtggctccagcacagtcctctctgctgcggcttgcttggtcggcgtcccttgctcccctagagctccatcttttctgttattaaaccttggctcaggaatctgggaggcaaggcccggtggaagttggggtgggccccacctctgccccatccagctgacctgtgggcctgccagtggctgggctggccacgccacaccgtcgtcacccccagcaggtgcagtctgcatctgctcttctcctcccccgccaccctccaagctggcccaagtgtcgtggcctccccatcctgcctggggaggggcctgagtcctcccacctgtcctccccgtctctccccagcacccggctcttctgtgttagagcttcgttctggcctgctcccactctcagcaccatcctgcagctccttcggctgccggcggagtgtgtgtgctctctctgtttggaggtgcttgccaagtgcaggttgatgggtgatggggatgcgctgctatgccgggtggcgtctctgcccacgagaagcttcgattttggtggaggagctggacgtgcactgacgatccgtgtcagaggcttcccggcagcaagatgtgctgccaagagtcttagggctgggtaggggctggcggcagtgtggggctctttcagctcctgggcaggagtgtgtgggggggcatgaaaggctgtggtgggctgggcccctgagccgtggcagcctggcactgactctggacttccttctctttgtggcggggaacgtggggtttgctgtggcttctcctaggccaggcgggagaacgggcaggagagcaggggcaggggccgtggtcgaggtctgatgaacagaccggtcaagagaatggagtcaggggcagctcctgggaggtggccctcaagcctagtgcacagcggtgtctgctgctgagctgggagagaccggggcgggtgctgggctggcatttcatgcatccgctggtgccaccattcaggtctgagtgggcacttaggtgctgccagcagagctccaggaggagtcagggccgtgaggactttcacagcgagctggcaggctgcccagaggttggctcctctgt

SEQ ID NO: 1886428 - DNA, 4001 bp, Homo sapiens
ggtgttagcggccggcgccggcctgggccacgggaaacgtccacgcttggtgcccgcggtgcgcggcgctcattgcgcgcgccttcgagccaagcccccgcggaaaacaggctcgggtttctcctcgcagggcccaggaactcggctctgcctggcccgggtgggtcgctgcattgtcccggtcttctgggagtgcggggtcagcttgttagagggaatttctacctgggaaaagggagacgagtttcgaagctgaagttggtaggctgcgagtgtccacgcgggagacgaaagggggaaatagcagagtcacttcacccttttccccaaaccccacaaaactgctcgcagcgacgcggatgatctaccgaattccccgcgaattcggaggattaagttgtcagtcagcacgttgctaccttcccctctatgcactccgctgcctggctcctcggcggggagcgagggaaactcagtttgtagggtttacctctaaaacctcgataggttatccttgacgaccccgagcctggaaactccctgttgatgattaattatttgattaaataagtataacatccaggagaggccctgccattccaatccagcgcgtttgctttgaatccattacacctgggcccccataattaggaaatctaattattcgcttcatcactcattaataagaaaaatgtcccaggatcattgctacttacaaggtctttgggagagatattttactctattaatccattctattttatatttcaaattgattttttttaacagaggaaagtggctatctttttgttttgggcatgtgggcccattcaccaaaatgtgatcataaaataaattttaataagatataactttttaaaaagttttcaagtgaagacggagtcgccgcggaggccggggcggcggggtcttagagccgacggattcctgcgctcctcgccccgattggcgccgactcctctcagctgccgggtgattggctcaaagttccgggagggggcgtggcccgaggaaagtaaaaactcgctttcagcaagaagacttttgaaacttttcccaatccctaaaagggacttggcctctttttctgggctcagcggggcagccgctcggaccccggcgcgctgaccctcggggctgccgattcgctgggggcttggagagcctcctgcgcccctcctcgcgcgggccgagggtccacctgggtccccaggccgcggcgtctccgctgggtccgcggccgcccgcctgcccgcgctgccgccgccgggtcctggagccagcgaggagcggggccggcgctgcgcttgcccggggcgcgccctccaggatgccgatccgcccggtccgctgaaagcgcgcgcccctgctcggcccgagcgccgccgcccgcgcaccctcgccccggaggctgccaggagcccggggccgcccctcccgctcccctcctctccccctctggctctctcgcgctctctcgctctcagggcccccctcgctcccccggccgcagtccgtgcgcgagggcgccggcgagccgtctcggaagcagcatgcaggcgcgctactccgtgtccgaccccaacgccctgggagtggtgccctacctgagcgagcagaattactaccgggctgcgggcagctacggcggcatggccagccccatgggcgtctattccggccacccggagcagtacagcgcggggatgggccgctcctacgcgccctaccaccaccaccagcccgcggcgcctaaggacctggtgaagccgccctacagctacatcgcgctcatcaccatggccatccagaacgcgcccgagaagaagatcaccttgaacggcatctaccagttcatcatggaccgcttccccttctaccgggagaacaagcagggctggcagaacagcatccgccacaacctctcgctcaacgagtgcttcgtcaaggtgccccgcgacgacaagaagcccggcaagggcagttactggaccctggacccggactcctacaacatgttcgagaacggcagcttcctgcggcgccggcggcgcttcaaaaagaaggacgtgtccaaggagaaggaggagcgggcccacctcaaggagccgcccccggcggcgtccaagggcgccccggccaccccccacctagcggacgcccccaaggaggccgagaagaaggtggtgatcaagagcgaggcggcgtccccggcgctgccggtcatcaccaaggtggagacgctgagccccgagagcgcgctgcagggcagcccgcgcagcgcggcctccacgcccgccggctcccccgacggctcgctgccggagcaccacgccgcggcgcccaacgggctgcctggcttcagcgtggagaacatcatgaccctgcgaacgtcgccgccgggcggagagctgagcccgggggccggacgcgcgggcctggtggtgccgccgctggcgctgccctacgccgccgcgccgcccgccgcctacggccagccgtgcgctcagggcctggaggccggggccgccgggggctaccagtgcagcatgcgagcgatgagcctgtacaccggggccgagcggccggcgcacatgtgcgtcccgcccgccctggacgaggccctctcggaccacccgagcggccccacgtcgcccctgagcgctctcaacctcgccgccggccaggagggcgcgctcgccgccacgggccaccaccaccagcaccacggccaccaccacccgcaggcgccgccgcccccgccggctccccagccccagccgacgccgcagcccggggccgccgcggcgcaggcggcctcctggtatctcaaccacagcggggacctgaaccacctccccggccacacgttcgcggcccagcagcaaactttccccaacgtgcgggagatgttcaactcccaccggctggggattgagaactcgaccctcggggagtcccaggtgagtggcaatgccagctgccagctgccctacagatccacgccgcctctctatcgccacgcagccccctactcctacgactgcacgaaatactgacgtgtcccgggacctcccctccccggcccgctccggcttcgcttcccagccccgacccaaccagacaattaaggggctgcagagacgcaaaaaagaaacaaaacatgtccaccaaccttttctcagacccgggagcagagagcgggcacgctagcccccagccgtctgtgaagagcgcaggtaactttaattcgccgccccgtttctgggatcccaggaaacccctccaaagggacgcagcccaacaaaatgagtattgatcttaaaatccccctcccctaccaggacggctgtgctgtgctcgacctgagctttcaaaagttaagttatggaccaaatcccatagcgagcccctagtgactttctgtaggggtccccataggtgtatgggggtctctatagataatatatgtgctgtgtgtaattttaaatttctccaaccgtgctgtacaaatgtgtggatttgtaatcaggctattttgttgttgttgttgttgttcagagccattaatataatatttaaagttgagttcactggataagtttttcatcttgcccaaccatttctaactgccaaattgaattcaagaaaccgatgtgggttttgtttcctgtacaattatgagatataattctttttcccattgtaggtcttttacaaaacaagaaaataatttatttttttgttggtggataaagaagtcaagtatctgatactttttatttacaaagtgtgatggttttgtatagtaggttccaccctgagtattcctaaaagaaaaaaaaaaaaaaagcttaaaaactctaacttcatctgtgtttgtcttacgtggtcttaatcgttgtacttaccttaaaataaacccatgttgttttttctgcccaaagtttggacagtgtgtttgtgttgttgcatttttt

SEQ ID NO: 1886429 - DNA, 4001 bp, Homo sapiens
ggaaaaaggcaaaattctaccagctctgtcttggcagctgtccttggaaccgattttccttttcttggagtttccctcatgtgagctcgactctggttctgttgataaaataagagtttgagtaagtgtctccaaccaaacaccctagaagccttagttcatcctggacacaaaggagctgaagtagctatcaaacccagctctcctctgttctccagaatccatgtctatatggccctggctgccaaagagctcccagtttccttgccaggggagactgtgttgcagccctttctctttttaccttgaaagagtcaaattttacctaatctagcagtgctgtttctagctttgggcttagttttctcagaattcttctcttcatttagattgggctctgatcctagtgcaacatggaatttaggtgactcacctctctcagacacagagtctcatagtctatctctgacaaatatttgtggatcagtcctttaagtgaagctcttctgccagtgtcataagtgaagatgtttctcaaagtctccccagggctctaagccatcttccatccccaatttcaaaataaaaccctacccagagacacacagctcagtatccctgattccaacactccttccagcctccataggaacagcccaaggcattaccctgtctttgcctgtgcttctcactggaatgggaggagggggtctcggctttttgtttgaattgtctcttcttatctgagcccttttctgtaaaggagatctgttggaaagaaggctggtcagtggggcattggatggaggagcagtggagaattagggtattcatttccctttcccttgtttaagctcaagtgaaaggtgctctctcttacacatccagattcagactgtgtgttattctgctggacctgccttttacatgtccttggctggacgtggcatactcctattgactgaacagtttcctttttcttgccactcattagggcctcataagaaaagtttcttgctgtagttttactagggacctagacacagttaaagagggacattttctgggtcttgtcatagtgtaaaaaaaccctaaacaaacaaaaaacaaagccaggggcacaggaatcagaaaataggggaatcatttttctaatttctgtcccaattccacctggaagtatttatgatactgtttatttttcaacatgcagaattaaacatacctatattgaaatgtgtcatacatttggcaaaggaagagaattacacatagtgttaaaatcatgtacatagatattataatttttcaaatgcttggaaatgtcaaattaaaattatggttgattgtattaaatagatacatatatgataacataaaaatatgaagaaaaagtaaataccaaataaaatggctcaaataattagagattagacaattaattagacaataattagatcaaatacaatcaactcgaatttatttaattagagcagatgctaacttaatcagcgcctgattcctgaggtagcaaaaagtctaggtggagagagaaacttaccccttttcttacccttcctcggtcatcctgggagctccactttcctctgtagaatttattcagcctccttagtaaacatggacttggtcccaaacaggtaacccaactgaccacaagaaaagcagcctagatcctgagcattcagctcctgtcttcacacaacagacaccacctcagtcccatcaaagcctgtgaagtttccctacatccaccattgagacatattccagagcagcctctcaaaattgccttaacaggatgggacacgatatggtggagctcctggctcaggacagctgcctcaccccttcctactgagaagtctgtatctgctggttagagctatcaaactgtagaaggcttagtgcctgtcccagcaagtgtcccctcaaaagccttcttgttttctttccttctgagaaaagcatacaagaatgagaccttctatgttagagagaactcagcctccactctcaattgacttggttgactgatgaattgatgccctgaggaggggatagattcagggaagagactgtgctgaatgagtctgtgttttcctagctttgctgtctgtgcaaatagtggaacccagaaaaatatcgggtggtagacacacagacactctaattgtctgaatttaaatattatttaaatggaacttatagtatcattatatattgataccataatatcacataaaatttgtttgatatataaacaaatattgatattttatcataatatcataaagcagttgtgcacacaatagcagataatattctccggttctataaagtttatatgttaatgttcttacaaaatttaactcagttattttataaaattacctaacaaaattttgttactgtgctatcataataatacataaaactatgaaatcataatatattgtaatataatacatatgaattatgatgtcataatgtattatatcacaatacatatgaattatgccataatatattatgtcacaatacatacaaattatgtcataatatagtgtgacatcatgatgcatgtgaattatgatgtcataacatactgtgatgccacaatacatacaaattatatcataatataatgtgatgtcataatatattcatttattatatttatgattttataataacatgaaatcttgtcagttaattttataagaaaattgagttaaattttgtaacaacattaacatatgtagaagcttacaatcatggtgaaagatgaaagatgagcaggcatctcacatggtaggagtgggaacaggaaagttgggataaggatacgcctcatttttaaaccaccggatctcatgaatactcaccatgacaagaacagcacagagccatgaggaatccatccccatgattcaaacacctcccaccaggccccacttgtaacattagggattaaaatacaatatgagatttggaacaaatatctaaactatatcgtatgaccattggaaaaacagatgaaacattcatggtttctactgtccagatactttcattccagagcaaatggctaaatgattgcattcaacattctgaggtcagaagagagaagggaggtgtacaggggactttggctgcatttgttccacttcccatatgctgttgttgtgagttctaacattatcaccagaaaggctattcatggacagaagaattattgctattgttgtgattatttctatttcttttacattagtaaaaataatttttttagcttctcatataattttcctaaaaaagccctaagagttttcgttaaattccttgttattgtgtgtcataaaaattgacagggaaatggctaaaatagattaaaattacacaaactctaggagtcaattctatcaggcaggcttaggaaagacagaactggaaatactccaccagcagaacacgagatgcatagggcccactttctgtccctgctgtccccaggtccaccctcttctaaggcctcctccaggtctggcttcaccctagaatctcctctcacagaactaattaaaggagatcagaaatttgagtggtgactcctgctgcctctcctgcgctggtgcccccaatttcctgcaaataaaaagcagataaatgggagcaaatagttatctatttgtgggccacaatttctttttcattgaagccatagagacatcccatctagcaacctgttttttatttttgcatatccagtagttgctctacaaggcacaagaaagtcaatataaataccaaaaaatccctctgaacagttcatcctttctttctgtatccctttcatctgtctatacagcttttattccatacattttctttttaaggtaaataaatttaaaaagtgaaagaaaaaatagaaatgctgggcccttcttctaaatcctagaaattatggaacacagcaccca

SEQ ID NO: 1886430 - DNA, 4001 bp, Homo sapiens
aagggaggggagtggtgggaggtgattggatcatggaggcggtttcccccatgctgttctcgtgataatgagggagttctcacgagatctgatggtttaaaagtggtggtttccccctgtgctccctctcctgccgtcttgctttcccttcgccttccaccatgatgtaagtttcctgaggcgtccccaccatgaggaactgtgactcagttaaacctctttcctttgtaaattactcagtctcagatagcatctttacagcattgtgagaatggactaacacagcatgattcttctgtgataaagtaatagtacccttagtcattttaaatctttccaggacaatattcttaaatttaaggagaatagtgctttaacattttcaaagcatttttgcaaataatatttcattttactaatagctgtacactcaatgtggaagaataaaatggggagaagcctcggtattttcttcttcggtcccatataaaacacacaccttaggcatatttttcctttgttgatggcttttaaaagtcagtgtttagctttctaaagtattctctgtgcttggaataaaaatcaaaacttcttcctatggccctaccttcctctctgactattctcatctcgcatcactcctccactctcttcctgtttctccacgacattaagcccattccagcctcagggactttgcacttaaccgtttgctttgcatgtaacgctaactccatgtcttcatgtgactgtggcttggtctttcagatctcagctcaaatgtcacctctcagagaagcctccctgatctctctaatattacccattcctctaccctgatttcctagctcacaatctgaaattgtcttctatgtatttgtttaacacgggtttctcccactggaatgtaagctccaagagaacttgaaaaaacatcaactttagggtagatttctctatgtgcttaaaagttgcatatttacatttgtttcaaataatctgtgtgttgattttttctttaattcagcagaaggtctttaatctagttagtgtaactgagattttgccatataaatgattttttcttcatcccatttggatttcaaagccactgataaacctttttttggagtgatcctaatggaattaatcaaatttaaggagatgttgacttaaaatctttattagtggaaagaaaagaatattaataaaaggctaaaccactgcatcttgcatccctaaaaggattattttaaattcaatttttgcactgttattattaaagcagttcactcaaccagtcactaggtttgaactttgatttgaatcgaggtttgcagggcttccatcaaatctctgctaaatccagcttcggagaggagcagttaagtgtaactgcagccaaggttagaaaccttggctcacaacacttggccttgaccagcaggtaccaatggcaattctgtacactgaggactagccagggccagaagaaaggaagttgaaattagaacaggcagatttcaatctaatatagagaacaaattcctacaggaagcaagaggcctaataagtgattagagaaatgatcaaaacctctggagggattacaatcaggataaaccttccctgatccctgaagttcttgaagactgtgtctggttcatctttgtagctccttttagtacctaacgcatactgggtactcaaggtatatgtagcagattgagttagaacaagtgtggagaataggcctaacttgtaatcttcatgagggcggggccatgtctttctagttcttcactgtctgctcaggacttagcatagtcgaagatgcttagtagtagtctgttgaatgaaaaacatcagtggatgaataaactggtcaatgaatgaatgggccacatgggccctataggacttaaatgcttgataactcttcataggtagaaatcctacctccatccctatgtttccttcttgatctctatagcttcttgcagaaagcaaagtatcttggcctccttcttccacccctctatatccactctgaaacagagaagtataggcacctctgaagttgctcttgagaaaatctccctcctcatcaaagttcacaaaacattatatcattaagccactaccacttagtgctctgctagatgctctagaaaatgctagaaagagcagcagcttcctggggtctgggagttaatggtttgaagacatctgacagatgtggcacatgtagtgcccactctctctgatcccttccctgaaattctcattctccttgaaaacccagtttgcctttttcaaggagaaaaagaaagcagtgttaacaggaggccgcccacctctcgggttgctcctgcccctacaagccctgctggctgctcttgtgtccctgtcttgctttacatgtgaacagatgtatttacatgagggcagattcaaagtcagatgatgtattagtttattttgtgttgttataaaggaatacctgagactggatagtttacaaagaaaagaggttaatttggcttatggttctacaggctgtacaaacatggcaccagcatctacttggcttctgatgaggccgcaggaagcttttacttatggcagaaggcgaagagggtacaggcatgtcccatggcgaaagagggaacaagagagagaggggagaggtgccaggctctttaaacaacaagctctctcatgaactaatagagtgagaactcactcattactgcaaggacagtgtgaagccattcatgagggatccacccagatgacccaaacagcctccactaggcctccctccaacaatgggggtcacatttcaacatgcaatttggaggggacacacatccaaaccatagcagatggtatctgagacactgattttctccccagctttggccatcagaggtagacagtgaggctcctgggaaggtgggggaggcactttccaggttgggcataatcacaatgcagctgctatggcagcagaaggaacttcactgagagtcctctctctgtactttagccaagttccacctctaaacactggaaacgttctatgcttccactgccagttctgaagcccacaagggtcaggttacaggaggtaaggttcttcccagctcctagagtctgactctactcatgcttgaaaacatcttatcctctgattattgcctctagtgggtcatcctgtctggggccaagtctctactaagatcataatttaatgcagctttagccacagctatgaggactccattttcaatgtgttcactgccggaataaaggttccagctgtgcccaaaatatatatggcttacattagagaaagttcaccttcctgcacaagaacattaggtatacaggttcaggtagctctaagatgagaagtagtgtagggtgtatttgtattaaatatgttttctaaaattaactgctaaaataatttaatgatggtgttaaggaaaatttaaagttacacgtaatactactattctaacaagcctagttgatatatgcatacgtaatttttacatattttttaacataatgactatatataagcattcatttgctttttccatgtaatggtatatcatatgcatttctccatgtttctatgttgtctttgtaaatactatctatgtttttctaaagtagaagagtctataaaatttaaaccacctattaaatgagagactataaatataaatctcttataattgaaacacgtctaggcaataggaaaaaatgacatctgaaatacgcacaactgtgagatggcagaagaaaactgaataaaagatacactagatgctcttaactaaaagcatgagcactggatgctattaagtagctttaggacctctggaaaactaatctctttcatttgccttagtttcatcaacgtgacaaggagggtagagttgggtgaactttaaatcccttcctgctttaaagttttatgttta

SEQ ID NO: 1886431 - DNA, 4001 bp, Homo sapiens; identical to SEQ ID NO: 1242901

SEQ ID NO: 1886432 - DNA, 4001 bp, Homo sapiens
tcagaaaggtagtgcagcctgtgaaagagctttgtaacagggtggtaggagtgtggaaggacatgcttttctgatctaaaagctgtttttaatttcgtgtattctctttcaatcttaccctttttttgcacctgatgtgtatagacttatcgtagaacacacatgtagcattctcctttattttattcaccattaaacattatgtcaaaaaggaagtttttgaaagaaggatgatttacttcaaatcacatctgaatctgattaatcgttcatttttttttttttttttttttttttttttgagacggagtctcactctgtcgcccaggctggagtgcagtggcgcgatctcggctcactgtgagctccacctcccgggttcacaccattctcctgcctcagcctcccgagtagctgggactacaggcacctgccaccacgcctggctaattttttttttgtatttttagtagagacggggtttcaccgtgttagccaggatggtctcgatctcctgacctcgtgatccactcgcctcggcctcccaaagtgctgggattacaggcatgagccaccacgcctggccagtcattcattgtttttgataaaagtcccaacaaggagtaacagcatcagggctgcctttttcttgttgcttattttggggaggaggtgatgtttttatagtttctttgtaggagttagtttaagtctcttcttcatttggatgtagttaagggctacagaacataattacataattacaattttacctaaaaggctcctggagacggcagtgtgtggcaagcacggtgcaccctctggcctctgccctcatggacgactgcctgtgagcacctgacatgggacatgagggctgtgtcaactctgtgttattgttaataaatcttaccttcttttgatagttgtaagataaaaaatcaatacgaaggagactgaaagagtctcatgacctgaagttggagctaggcagaggtccttgaacaatggtaaagaatggctttattttacatgcaggcaaaccattggcagtttaagccagtggctaagcagagaggtgatggggtcaggtttgtgttctggaaagatgtctggagctgctggatggagaatggattgaacactgcgttgtcccagcatgtgagctgctgcccgtctccctgtccgcttcccattcctgtggagacaggccttgtggggcagtggccatggagcctacggggcagcctacggggcaggctacggggcagcttacggggcaggctatggggcagcctacggggcaggctacggggcaggcccttgcactgcacatcgcacgttgagccacagactcagaaggcttcttcagggtccaggcaggtggggagggatgggggtgacctggagactcctgccccgcagcagaggacagtttcatctgttcactggggagtgccttgtgggcctaggagttcagtgctgtttttttctgattttccaagagaagctggaaatctggatatttataagaaatctgaatattgagtgatggcaaaatctcaacaccatgtgagccaaacagaccagtcaggagccctggttcaggctctgcccaggagcctctaaaggtctgtgacgtgaagacatttgtcgttgtgccgaggcactggttggattcgggggtgcgtgtctccctcatgtctgcccggcatcctcggctcagaacccctcctgctgctccttcttgtttgctcgttgtcttgtcttcttttgaggtgagaaatgtgttttccctgtggggaatgtggtgttgagaaagaaaaaggctcacagtaagtggcctggggctgtgcccgaaaagtaactgattctgacggaatctcgctgtgtggcccaggctggagtgcggtggcgcgacctcggctcactgcaagctccacctcctgggttcacaccatcctgctgcttcaggctgcccagtagctgggactgcaggtgcctgccatcacgcccggctaatttttttgtatttttagtagagacgaggtttcaccgtgttagccaggatggccttgatctcctgacctcatgatctgcctgtctctgcctcccaaagtgctgggattacaggtgtgagccaccgcgcctggcagtaactgattcttaagggaaatgagctcccgagaaagctggaagcctgtcctacatttttttttaacctatttgcagattcgcaattgaaccctcttgagattttagagtctactggttttgtatattttttgcttaacattatatcttcaaaggtgaattttttttcatttagcattatgatatgaatttgtttaaatgctgctacatcatttgcatattttttttgggttaatgtgatatttctcctagttgatatactctaatttttcaaccatttccatatttatttatttattgtttagagacagggtcctgctctgtcacccaggtggagtgcagtggtgtgatcacggctcacggcagccttgacctcccaggtccaaacgatcctcctacctcagtcttctgagtagctgggactataggcatgtgccaccactcctggctaatttttttttttttttttttttgtagagacagggttttgccatgttgcctaggctgttcaactctggggctcaaaagatcctcccaaagtggtgggagccaccatgcctggctgtttgtgtattttttgagacagattctcactctgtcacccaggctggagtgtagtggcatgatcataactaaccgcagcctcaaccccctgagcttgagtgaccctcccacctcagctctcccagtagctgagactataggtgcgtgccatcatgcctagttaatgaaaaaaagtttttgcagagatggggtcttgctatgttgcccaagctggtcttcagctcctgggcgcgagggatccttcaacctcagcctcccagagtgctggggttgcaggcgagagccaccgcgcctcgcttatttccctgtttaaactggtcttaggttatttcctttttgatatttttgctgttgtaataatggtgtgggtaatatctttgagcaagatgctcttatatttcttttgagaaattttttaggcatcaattctcaggaatggatgaaaggatctagttattttatgattattggccaaattgaagagaattctgccacctgctgaatgcattctgtctccggagcttcctagccttatattttaactttttacatttagctgtttatttttaggtgaagttgagtcctccctctttcttccttgcctttcgccggccacacgccccgttgccgtgcatgggcccctgctcagtgcctcacctgacccactgcacctggccaggtggaggagcatgtcagccgcatccgggaggagctggaccgcgagcgggaggaacgaaactacttccagctggagcgggacaagatccacaccttctgggagatcacacggaggcagctggaggagaagaaggctgagctgcggaacaaagaccgggagatggaagaagccgaggagaggcaccaggtggagatcaaggtgagtggggccggcctgcacgtgctaacctggtcaccacagagccccagaggagctggatccagtgagggtgcaggtgggacattttctgttcttggctttgggagtcacagccttaaaggtgttttttataaaagcctgagggagagaccctgcaggtcctgagggtttaaaatgctgcctccacaacatggaaggaatatgggctctgggggcagactggcctgtttgcaactcagctctgccacttaataccccatgagctggggatgcacctcacctcccagccttggtgtcctgctctgtgcctcaagtgtacaggtttgcataggtgaacaggcatgtgtagctgtgtaaaggtgaggcatgcaagtgagcaggtggatgcaagtgagcatgtgtgtgc

SEQ ID NO: 1886433 - DNA, 4001 bp, Homo sapiens; identical to SEQ ID NO: 1242907

SEQ ID NO: 1886434 - DNA, 4001 bp, Homo sapiens; identical to SEQ ID NO: 1242911

SEQ ID NO: 1886435 - DNA, 4001 bp, Homo sapiens; identical to SEQ ID NO: 1242915

SEQ ID NO: 1886436 - DNA, 4001 bp, Homo sapiens
tgctgaccaaaagcgcactcgcaggacactccaaggcaaggggtgttcctcacattgcccttgacaacactgccacgctggtcactcacctgaccccatgctgctgggagcggggcagggatgcagccccatcttacagaggacccgcttccttctgcaaagagaccaagtggttctcagggtgggtgcacacagccccccagtgcaccctgcacctccacaggcttagggcctgccagccaccctcccccaagcaggaaaggaggagctttttttgttgttttttgagacaggccggagtgcagtggtgtgatctcggcttactgcagcctcaaactccccaggctcaggcgatcctcccacctcagcctcccgagtagctgggaccacaggtccctgcttccacgcccagctatttttttttttttttttttttccgagatggagtctcactccgtcgcccaggctggagtgcagtggcgcgatctcagctcactgcaacttctgcctccctggttcaagcgattctcctgcctcagcctcccgggtagctggaattacagacacctgccaccacgcccggctaattttcgtatttttagtagagagagcgtttcgccatgttggccaggctggtctggaactcctgacctcaggtggtccgccctcggcctcccaaagtgctgggattacaggcatgagccaccgtgcccggccaccggctgatttttttacttcaaacgggatttttccatgttgcccaggctggtgtagaactcctgcactcaagggattctcctgcctcggcctcccaatgtgctgggcttacaggcgtcagccaccgcgcctggcctagaaggagctttattcagagcaggactccaaccagctccctattagcctagtgatctcaagcctcagtttccccatctgtgagatcgggaaaatgacagcagctactgccaggcagggttgtagaggggtcattgaatccatggacagatgggcctgacacgtggtcagtacctaatggtcctttaccccctctggtgtatgacccaccccaggccaaggggccctggaagagactgtcttttccgggccttagtttccctgagtgtgctgggtcgccccgtgccttccagtagggagggtggggacagtggccggccccgcctgccagggcgggatccttggctacctggcctggccggggactgcgggcggggggccgggtggctccgccagcgctgcagctgggggccgtctgctcgggctgcggtcgggcacacaatagcagccattgtctcggccagggtggcggggggcccgcccagcccaccctccgggtgacccccgccctgcggtgggtgggaagggcagggcccggtcccccgaagcccccgccgtcccggtggtccccgcggccgcccccgcgcgcttcctccctcgccgcagccgcttcctcccgctcgccccgctctaattagttccttttgcagctggaggagccgcgcagcggccggttccgcggccacccccaccccccaccgacaaccccagccctcgccccaacccctgggcccttgcgtgtgggggcgctgccctgggcgcatcccaggctgagtgctcgagagacgcggccctgggctctgtgcaccctccacgctgcgctgtcccaccggggggaaactgaggaacggaaggctccaccaggaggcgcagaggggcgtggggccggcgggccttgcgctgcgcccggggagcatccacggggtgcccccacctgaccgagagccggctcctgccctcgggaccccgcagtaattagcacccaggcctctggctgagcttgtccagagccaggctgtcggccttacgctggggagagccacggccacccgctcatgggcactcactcagggttccctggttgcaggcccgctgctccccgctctgggcctccgaggctttcaggagagcaggaacctagctctcgcctgcccccttcacccagccgggaacaaaagcacagagcagagcccagaactggctgctgccggtcggggcgggggtggaaggggaggctttaagcctggccaaggtcagaactgaagcagggtcactgaccgtctcccctctggggtggggcctccattggaggaaaaactctgggtggggagggcctggaacagggatgctgggaggtgtagggctgggggcagctccttcctttcccgggggcagggacgcaggccgtgtgccgggctctggcctgcattggaatgaacccctgcctccctggcaggacccagtggcaggaagtgtgtgggggtgcccctggggactggacctgctgatgaagggggtgcattggagtcctccctctggctttgggccgtgtggctggccccacctggggagacaggctcctcctggggaagtgtcccctgcaggccctaagaacaaggtgactcagggcccctggctccccgagtccccatctgtcctgggaaggcagtggggcaggtgccaaaggatgttgcttgggcagcgctgccagtgagtgtccccgtcagctggaattcccagttcccaaaccatcctgcccttgtggtccccttctccggaagggtgggggtgggggtgaggacagaggctgtggggaggcctgtggccccaggccagccaagggaccaggccaccagcccttcctggctcctgaattcttcatcagcataaatatttacttccttcctccccgtccaggcttccagcacagaggagcttcggggaggctggattgcgcctgtgtctaaaaataaacaggtagcaggacgatagacacacagatagacagatggaactggcaggggttcaggcagagggcaactccctgtccagccagagaaacagtggaggggaccctggtccatccatcactgtcacccacccacctgctagcgggggtgtggtccctaccccaccgcatctctgggagcccctggcccatgcatggcctgggaggcaaattcaaacaatctgacagctccaacaggggcgaatcgcagacctaggtcccacggcctagtgcagctgccctggctctgatgatgcagccttgggagaggtgggcagcccccctgtgctgagacccccgtgtcagccatgttggggtggggtctggggatgtgtccctagaagcagaggatctccagtgaaggggggaccattttatgccctacttgcttggagagtcagggcagaaggggaggacgtgggagctgccttcctgtcctgccctgtggacagcatctctccccactcacaggctatgctagcccccagggaaacacacgggggcatatccaaagtatttcaccatgtagtagttatgtccaccatggccgccctttggtattgagtaaagaccccaataccgcgaaagacgggatctcacagcgtgattgtgcggcagttagattttcaagttgtaataatcccaatgaacaaacgcaaggaaatgtcgtgtttaaccgcgtaggaaaagattgctgctctgaatgtgaagtttgggtttagaatgaagtgttgaccttgttcttgggtcggtggatactgttagatcatttgcatgtgaggaaaattacaccaggtggggcgaggtggctcacacctgtaatcacagcactttgggaggccgaggtgggcagatcacctgaggtcaggagtttgagaccagcctggccaacatggtgaaacgctgtcgctactaaaaatagaaaaattagctgggtgtgatggtgtacacctgtaatcccagctacttgggaggctgaggcaggacaatcgcttgaactcgggaggcagaggttgcagtgagcccagatcacaccactgcactccagcctgggtgactgagagactccatttccaaaaagaaaatgaaaattaaaccagtgagaaattctaagaaaaatgatgaaaattacagcatggga

SEQ ID NO: 1886437 - DNA, 4001 bp, Homo sapiens
tacaggaccagcccctggactggagtcagggtaggggttcttagagaaggcttcttactgttcagatctctaaaatgtgtgagtaggaattaattgggtgaacttccaggaaagaaccttccagggagaaaaatacctaaactatgcctgtgtttccaaaaagaatgctgctggagaaagatcaggcattattttcaaaggtatattggaagaggatttgcctacctgggctataagaaagctattgagcgcctagcttgtgtgtgcatttgtagggggttgggggggtccacactcaaccccacaactttccctcaccccatcctgcctttgccctgccaggtgctccagttctaaactcttaagttttcagccaggagcagggccaggactcacccgtgccatgccggctacatccctgctagagctaagctgtctgcaccaccgccccagctctacttagtactattagtagcttgtttttctaagccctaaaattcattttcttttcccgcctcgcttccagaaaaataaataaaagtgaacacatcactcatttaagacgaggaatggaatttaggttgcgtttttctttctatttttatgattagttagaattttcctgggaacgccgccaggagggcattatggtgagataatgtcctgtatttaatcagcgctgtaatggcgaactgtattctgtggggagaggccgagttcactcatccttctccgtgctgtctgtttgcaggagacgaccggttagcccaagatgaagacaaggccgagaaatggctgggctccaggcttgtgtgacagcccgagagtggacagggcgcagctatgactccatctcttcttacaggacctggaagctctgagagccctggaacccccaaaagagctgagcgaaaggggccctcaaacggaccaaagtgatcagctgtggttctgcatctgccagactttttcagggtcgtcccctgtggctttcagacgtctgttggcctgggcacacttctggctttcaatatgcatctttcccctttgcaacccaaacacgatgtgcaaagggtggcacgtggcctttgagtgaacctggaagtcaacgccaggtaggaccggatcattcccttacctctgcatgcgcgtggtcgtccagagtttcccgaaaacctctgctggaggtgagggctcgtggtttgcagctgtcggggttgttcttgttttcagagttctttgatccattgctgaagaatgaagggatctctgggaggggtcaaatagcaaaaggatatgttagagagatgtttgaaaggatggaagaaaacaagggcccgaagaaaaaggagaagggatttcacctccaggaagggcacacagagcataaacgaagggatacaggttggcttttctctgcaactagcatgggtggctgggaaaacaggagcgcgtgggacacacacagcctctcagatttactgttgtccctattaaactccgggtctgcatgagccgtctgttcaggtaagggcagtggagagcacaggatgccccaagcaacccataaatagcagggtgaagacaaagtgtttattacttagcctcatgaagcccatataagcgctctcccagagcgcgagagagcaagagcatgtgtaagccagcccgcgtgtgtgtcccgggagtgggagccccagacacggcgttcgcgctcggcttgattctatgaaggcgtctatttgatggaacgtactggaacagttcatagccagcccagcaaaccttgtgtggagacagagcttgctttttctctttccttttcctgtttgcagtgagaatgaggcctttctctccccggccctttgctctccccacagttgtctcacgaggtcacttcctgctgacaggctcctttcagtgcaaggtttggatggaaacaatactccgttttctgggggactggtgaggctctgggcctcaccaggctgtcttaaacttaaatgggatattgtttcagtagggctgacagtttcttcagacaactggctctatgtgatgcaagactttatccttttttgtgtgtgcatgtgtaaatatatatatggtatcttcataccatcaacacgcagtggcagaaaggtggcttatgatcatgatgtttgctttcaagtctggttcaactacgcactagctgcgtgttcttgggcaagttactaagtgactttccctttttagctgggcattagtgtccttaattcacactagcctgtctataagaaatcttcgagctcaaacattcgttgattctgtgattgcaagacactacatcactatgttcaacaatgaacttaaaagcactttctctgaatagctaatatatcggcagaaccaatttctaagagcagttaaggatatgtgctgaatgttctgttgaatatcctgaatactgaatgtattggtttgctaaggtgaggggaaagtagaagagacctatgtcatcacattctagcgtctcgaaatacccttatagatattctcagggttttcagctacagtgatccttgtggccattggatagtattttgaaaattaagtggcactgtcaaatgctatattttgcgaatttctgaatgaagactcagctcgacaaactctttcatcccatgaagatcgtaaaataaatgaatgcaattcaccacaactaaggttaactatttggggtcataatatcaaatatcagggtcctcagaggaaactgacaggataaagatgggattgagcaaggctcagtctctgagatgctagggaccatttgacatagccaacctcaggctactgctggccagctctgcagaagtgtcgccagcacaggagtgtgtgctggccttcgaggaaggtaagtccctggctgatccaagaaagagggattccctggggttccgccaataggcacagtgggaatcacagccctgcagccactgaaagccattgccaactcctttgttgatctccataaggttgtctctcccaggcttactgccaatgccccttttggaaaagcgtgacactgctggctgcctgattagtggtctttactgcttttttttttttccccgctttctttttttttttttccgagacggagtctcactctgccgcccaggctggagtacagtggcgtgatctccactcactgcaagccccacctcccgggttcatgccattcttttgcctcagcctcccgagtagctgggactacaggcacccgccaccatgcctggttaattttttgtatttttagtagagacggggttttaccgtgttagccaggatggtctttatctcctgaccttgtgatccgctagccacagcctcccaaagtgctgggattacaggtatgagccaccatgccttgccttttttttttttttttttcaatatgggatcttactctgtctcccaggctggagtacagtggtgcaatcatggttcactgcagccttgacctcttgggctcaagtgattctcccacctcagcctctcaagtagctaggactacagatgcacaccagtacacctggctaatgttttgtatgttttttgttttgtttttttttttttctgtagaggccagttttcaccatgttgcccaggctggtctcgaactcctgggctcaagcaatctgcctgccttggcctcccaaagtgctgggattacaggcatgaaccaccacgccccaccctttactgcttctttaacatccagcccgctttccctccctttcttgcttccatagacatttattgagcaaatactatgtgataggcactgtgataagcacgtggcactcatatatttaaacaaatggtccctgagctcagaatactttttgccttatgaaaaagataaccaagtacacaacaacaaatgtactttatttatttatttacttaatttgagacagggtctctgtcacccaggttggagtgcagtgcca

SEQ ID NO: 1886438 - DNA, 4001 bp, Homo sapiens
aaattcatcaaatgtaataaataaaacatatactttggatttttccatgtgcttagcttttcttagagcatcttttagaattattgtttcacaaaaaaacactttgggaaatgttttaatttattaacacatactagggctaggaagagagcttaaaactttttaaaatatacagaatgaattacagatacgtgaaagaaaaaaaaaaaaaaaaagattgctgactcctgtcatggaaggccctatcatatggacattcttagcctcagcatccggaggtccagaaagggacaatttcgagtcagagagaattctatatataccatttatttggaaccttcagcccttaagattccaacatcatgacctcagtttcaacacaattgtccttagaccttgtattgcatacaaatacaaaacaaacacctcgactgaactaactcttgtctctccaaaaacacaaacacaagacctcataaaatgagtgcgtttctattggccataattactgcaacttacttctccaactttcccctgcacagttaactaaacagctcaaaaactatcagtaacaaataacagtcaccatcatatggttaggagtgtggcagatttcttaaccagtaataaaaaaataggaaaaaaattttgcctattcatagatctcaagtttcgtgcacttgcaagaaactaattaaaaggcagccgtgcacgatctacaaaaacagccataaagactgttacattttaagttacaggaaacaaacctgctcctctactatagcaagaaacaactgacttccccttacataccctaaaaaaaaaaagacacgagaaatttaaacatggaagcagaaatacaccaagaaagagacatgtcaaaccccacctgtatatctgttttcaaccatttggagtcaaggcgagcctgggcagccaaacacaaatattcagagggcatcttttctccagcttcctcccagttctcaggcctgcaagtaaacatacatgttgaagacctaacgctttttaatattttacaaagacattcccgaaaagtttaatgcagaaaaaaaagaacagaaagatgggagagaagagctcggggaagggaatgaagaggaaagagagatagagggaagagatggagggagagggaggtggggaagggaaagcctccttcctagataggcaaggtatgccgggtttctgcaccacgctggcgagaccttgagaatggactgtcacaggaggccaaatcacaatgtcatacccctgccctcaaatccaaaaggtacacacacacatgacaggaagcccatcattttttgttttgttttgtttgagatggagtctccctctgtcgcccaggctggagtgcagtggcgggatctcagttcactgcaagctccgcctcccgggttcatgccattctcctgcctcagcctcccgagtagcctggagtaccagcgcccgccaccagcccgactaattttttttttttgtattttcagtagagacggggtttcaccatgttagccaggatgatctcgatctcctgacttcatgatccgcccgcctcggcctcccaaagtgctgggattacaggcttgagccaccgcgccctgccaggaagcccatcgtttgaacgacaaatgacagcagcgtgaatctgccgctttacccaacagcagggcgcctgcatgaaacaaattactcaaaaggctcacctgcagaaaaacccacagccaccaccacttagagatagagagaggcagggggctgcgccgcgggcggtccgcgcagcaacccccccccgcccccccaccccttgtgccgcccgccaaccccgcaccgcctccgacgccggacgccccggtgccccaggccaggacctgaggcgcagggcccggcctcctcgccccgcaggcgtgcgcacacagcctcccagcagccgctggctcagccggcgcccgcgatcccgacgcctctcgctacccgaggggcgtgcccgcgcgggactgccgccccctccaccgacccgcgcttaccgccaatcgcaaggcggctccgcgggcgcagccaatggggaagaggagcccttccctgctcctcctgactctcccgcttcctgcaatcccgtttatcttcctacttggagctcacccactgcagccagggccaaccgccggcgccggaaggcgggatttccgcggcacgcacgcacgcccgcactcccacgggagtcagtttctcaccagctgaattatttgaatttagcaccactaaaagtggagcaatcaggtacggagtgcctccagagctgatgtagcagaaatcactgacaccatcttttttttttttttttttttttgagacagtctcattgcgtcgcggaggctggactgcagtggcatgatatcagctcactgcaacctccacctcccgggtttaggtgcctcagctttccgagtagctgggattacaggcatctgccacccacccggctaatttttgtattttcagtaggaacggagtttcatcacaaactgctgacctctggtgatccgcccgcctcagcctaccaaagttctgggattacaggtgtgagccgccgtgcccggcctatttcagatattttaaatattaaaaagtagaacctggccaggtgtggctcacacctgtagtcccagcactttgggaggctgaagtgggaggatcgtttgagcctaggagttcaagaccagcctggacaacataacaatacactgtctgttcaaaaaataaatttagccaggtgaggtggcacgtgcctgtggtcccagctactcgggaagctgaggcaggagaattgcttgaacccacgaggtggaggttgcagtgaaccaagatcgtgctactgcactccagcctgggagacagagccagactccgtctcaaaataataataataataataagcttgggcggtggagggctcccccaggcattggccacctgtggagtgacctggcttttggctccctggcagccaagttctgggtcgggcatcttcgttggtgactgccccttcagctctcctggtgtggctgtgagtggtatggcactgctgtgacccatcatcttgtcttaaagaggcatcctgacatctccacacttgcacactgaagaacgcaacatcatgattaactttttaaaggaatattacaaaaatcacagcatccgaaaattttttggtcattgcaatgatcttgatcaggcaatgagaaaataaatccttgaagaatgagtacatggaaaagaggaccaagagcagagactatggcaatttgatgcaagagactttttttttttttttttgagacggagtcttgctctgtcaccagagcaagtgcagtggctcaatcttggcttattgcaacctccgcctcctgggttcaagcaattcttctgcctcagcctcccacatagctgggactacaggtgtgtgccaccacacccagctaatttttgtatttttagtagagacaggatttcaccgtgttggctatggccaggatggtctcgatctcctgaccttgtgatctgcccacctcagcctcccaaagtgctgagattacaggtgtgagccaccgtgtccagccgcaaaagagactttttaattctccagaggaatctgaaaaataaattgtattttcactggatgccttggctgagagaagactgaaagactatgggttggcccgggcacggtagctcatgtctgtaatcccagcactctgggaggccgaggcgggtggatcacctgaggtcaggagttcgagaccagcctgaccaatatggtgaaacgctgtctttaccaaaaatacaaaaattagccaggcatggtggcgtgggcctgtaatcccagctactcgggaggctgaagcaggacaatctcttgaacccgggaggcagaggttgcagtaagccaagatggcgccactacactccagcctggg

SEQ ID NO: 1886439 - DNA, 4001 bp, Homo sapiens
tctcacctgcctgcatccaggccttggtcgggtgctgcgggaggggaccggggcaccgccgtcgggggacaggtaggaaccctggaccgtcggccaccaaagctcacattgcctttcaggacaaggggccacaggccccacagacccagccagcaggctcccaagcagcgatgacccaaaacctctactgtatggcccccccatcctcagagagtgtggaattgctgggatggtggcaggggcgaggtggggcccccccgactgcccttctgtcacgatgggttgggagtggcctgagccagctctggagctcagctcaggcttgggggtggccgaagctgcaaggggtcaccccacagagacaatggggtgtgagccaacgtctcctgcctgggccgggcccacaacgcgggccgtgcggggcacttcccgccgctgtgctgggagctgaagggtccggcctgcacctggccctcctcccctgtgccgccgccagcgcccttagggtggaggacgggacagagacccctggtgccaggcacagctgtgtccccctgccaaccccagcagccgcatttccgactgtgggctccccagagtcccccgcagacccccagagctgagccccccagagcttccttgggggctaccccggcctctccccagcgggctcagggtcacagactggccacccctagagtgggtggcggggcactcgggggcctcacctttcctcagggccatcctgcatgcagggcaggctgcaggcaggcagcgagggagggtacgtctgctgtgccggccacccctgccctctggatttccccactgcggggcagcccgcgcctgtcacctggctggcccaacccagctggccctggctctgttaaccccctcgtgccgggcggccggcatcagcccggagccctggggtgcagacagtgcagggggtgagggagcttcagtcggggcccgaggtagccgtaatgcggccctgggggctgacggccagtgcccgggccccctgcagggctgactggggagggctgggcagccaggttggggtggggaccccttgcagcagcctgggaggggctggggcttgaggccggtttggggagcccagggttttaccaggtcctgttgcgggcagggggctcctcgggcagctcctggggtcttgagcccacccctggcctgagtagccagccgtgtggggctaaggggctgccgccccttccccgtgccccacccagccatccacccgccctcccgggggttccctacagcctgggtgggagctgccgtttgggcttcaggcccacggtgctgtccagggcccaagctcaccctgcctctcccgtgaccccaggggcgctggtgtctggccactgccccgcccccagcctcttctaggaatgcctggcagggctgcaggcgcctgtttgcttttgccctgcgccatcctcggggagtgtgtgggggtggcctggccatgggagccaggtcttgtgcctcagacaagcctcacctgccccttgctgtcccccaaggctctggtgagggcctggccgccccacagtcaccgcttgtgtgcagagaggccacaggaatgtgtgcccagccatgtccaaggccacccctgggctccgtctccacctgcctccagaggcccctggttcccctccacctgctcaaaccacttcccaaccagtcgctctctcccccagggcctgagcaggtgcagcccctcccctccaggtccctgcaggcccctcccctggctgtcagtggggcctgcccaccagtccctcggcagtgggaaagtgtgcagggaagcagccggaaggggtgcaggcgggggcacagccagggctcggggagaccacagttttccagggccctaccccatcctcagctccggcctcacctggcaggccccgtgcagagctgtgggaagccgccggcccactgtcatcgtcttccctttatcgagaattgatcattttccaggtggcgtctcggctcctcttctgagaaattatagatccacggggagaaagtccacacccagaaagacccacgatccgtttactcagcagaaaacgcagactcagcaggggcctggggcctgaggccagcagacccgggcggcctcctctcaggagaggtccccgtgggggccccggcctccgtcaggccgcgcaccccacctgggagccccacacattccaggtgggaagggagaatctgtccctgttctcttcctttgggaggggccgggtgtcgcgggcgggcagagcctcaccagggttgcggcagccgcgtaagggggctccaggcctctttgattcctgtggtaacgcagaggcctacacacacattcagcccattgagttccagaggcccccatcactgccgccacccccaatggccccactccccgtggcctctcccagctcaaggccggtggcctcccaggctcctccatgagccgcattctgcctgtcttcaggccgcacagggcctggctttctgtaggacaggacccgagggaggtgaggccatgtctaggtcacgtcctggaatacatctgtccctgtccttctcactgtttccagcaatgccaccgagccctgtggctctgcatcctgtgggtgcatacctgtctacactcaggccagtggcgagtggacggtggccatcacctgggagaccgagcatcttgtccagcacacagccacagggtcatctggcctcagccactgctggtttcggtctcttgccgattttctagttagctggctgatttctgatttgcaagatacaagaaaaaacaaaagcattcagcacgcacactcaggtgtgtggcctttctgtcctctcgttaggattctggtgagttttttttttttttttttttttgagatggagttttgctcgttgcccaggctggagtgtaatggtgcgatctcagctcactgcaacctctgcctcctgggttcaagcagttctcctgcctcagcctcccaagtagctgggattataggcatgaaccaccacacctggctaatttttattttattttatttatttattttttgagatggagtctcagtctgttaccagggctggagtccagtggtgtgatctccgctcactgcaacctccacctcccatgttcaagcgagtcttctgcctcagcctcccaagtagctgggattacaggcatgagccaccacgcctggctaatgttttgtatttttagtagagacagggtttcaccatgttggccaagctggtctcaaactcccgacctcgggtgatttgccggcctcggcctcccaaagtgctgggattacaggtgtgagccaccgtgcccagcccctaattttgtatttttagtagagacagggtttctccatgttagtcaggctggtctcaaactcctgacctcaggtgatttgcctgccttggcctcccaaagctctgggattacaagcgtgagccaccgggccggcgagagttcttaattttaattgagatgatatcccttaaatgttgaggttgattcctcagataccaacaacaaagatgatttggtttggcctcacatccccacccaaatctcaccttgaactgtaataattcccatgtgtcaagggcagggacaggtggaaacaactcaatcagggggcagttttccccatactgttgtggtagtaactctcatgagacctgatggttgtttttgttttttgtgtgtttgtttgagatggagtcttgctctgtctcccaggctggagtgcagtggcacaatctcggctcacggcaagctccaccttccaggttcatgccattctcctgcctcagcctcccaaatagctgggactacaggtgcccaccactacgcccggctaattttttgtattttcagtagagatggggtttcaccgtgttaaccacgatggtctcgatctcctgacctcgtgatccacccg

SEQ ID NO: 1886440 - DNA, 4001 bp, Homo sapiens
tcagcttataaacacagaggagcaaagttggagggccgggcgtagtggctcacacctgtgatctcagcactttgggaggccaaggaaggtggatcacttgaggccaggagttcgagaccagcctgggcaacatagcaaggccccatctctacaaaaattattattttttaaaaaaattagccaggtgtggtggtgcttgcctatagtcccagctactcgggaggctaaggtgggaggatcgctggagcccaggaatttgaggctgcagtgagctgtgattacaccgttgcactccagcctgggtcacagatcaagaccctgtctcttaaaaataaaagttggagacaagagctggctcacctgaaaggagggattagtaggtaggagggtggatggaggatggatggatgtgtgggtggataggaagatggtattaagttggtgcaaaagtctttgatattactcttaatggctttaataaaaagcttgaaggaagaatgattggttggatagacagagataaatgcatactggaaacaaagataaagataaaacacaagttataccaggccagcaactctattttgttcactgcctttagtcccagcctggcacatagtaggcactcaataaagcctgatttgtagcatttgcttatttccatggtgtaatttcatgctcctgatttgagtctaaacacagagttgggaagagatatgcacaatctgccctcctggctggtatgagtgagtcccagctcaccgatggtagcccagagagaacatcaagaggagtagggggcttcagggaggaggtggtgttggttggacttcgaaaaatgaataggaggctgggagtggtggctcatgactgtaatcctagcactttgggaggccgaggcgggcagatcattagaggtcaggagtttgagaccagcctgggcaacgtggtgaaacccagtctctactaaaaatacaaaaattagctgggtgcggtggcgggtgcctgtaaccccagctactcaggaggctgaggcaggagaatctgagagatggaggttgcagcgagcagagatcacaccactgcactccagcctgggtgacagagcgagactacgtctcataaaaaaaaaaaaaaaggaaaaatgaataggcgttgttacatgtaccagctatttggggcagagggaagagcttggacaaaggcctggaggtacgaccaagggtcaggagcaagtgggacaggcgctcctcgccctccaaagaccaggccagaattgctgacaagactcactgaagaggaagggggaccgatagcaacgtcactttcccagctgccgcattcctcaccttgccgtctgcaagctctgaggggcagagtcatccgtctgacagatgaaatgaaggcacagctcaggctggtgacctgcctgaggtcacacactgaatgagtggtcggagctggaaccagaactctgggcttctgatgccactttcagctctttttcaccttgctctgctggaacgtacctagatcaagaggtgaggaaggtttagcagacgccgtgggtgcctgctgcatctgcctgtgcagcagtttggagacgtggctgaccccagctctgggagtggctatgtgaaccaggcctgcccagtaggacatttcttccccctggcaacagtacagtttagggacagacataccctagctggtccatgctctctttctgctgggattactaagctgtaaggagggtactgggaggggcagcaagaaacacacaagaaagcagagctgagagatggtaatagctcttgagatcccggatccagccatgcctgaaaccacgtttctcctggaccgtttagatacatgagtatggaagtcattatgctgttcaccatatgctgggcacatggcaggattgtacatcctgaccctctgtagccagatggggccatgtgactggctgggactgggcagttgtgagcagaagtgataagtctcacttctgggcagagcatttttcagatggctaccacaccccctggggtgtttttcctctgtcacagagacagatgatgatggtgactgctccatctgcctgggcacctgggtccttgagcaaggagatacggactgaagtttcagttcacttgtgatagacgtgtatcgtgagcaaggaatcaatcctttgttgttctaagctgctgagatggggctgtttgttaccacagcataaccctgcctaccctagctgaatcaatgagctgataaatttccttttttgcttaagctggtttgaggtgggtttctgtcccttgcagcagaaagtgttctagcattattctgatattatccccacagtaaggactctccttctatcctaaggaaggaccttgtattagtccttgtgtcactataaagaaataccaggctaggctgggatcacgcctataatcccagcactttgggaggccgaggcaggcggatcccttgaggctaggagttcaagaccagcctggccaacatggcaaaaccctgtctctactataaatacaaaaatgagtctggcatggtggcacatgcctgtaatcccagctactcaggaggctgagacacgaggatcacttgaatccgggaggcagaggttgcagtgagctgagatggcgccactgcactccacgctgagcgacagaaagatcctgtctcaaaaaataaaaaagagaaataccagggtctaggtaatttacaaagaggcttaattggctctcagttctgcaggttgtgcaggaagcatggcaccagcatttattctgggtgaggcctcaggaagcttccaatcacagcagaaggctaagggggagcctgcgtgtcacctggcaagagtaggaggaagagagcaaagtgggaggtcccagactcttttaaacaaccagattggctgggcacggtggctgacgcctgtaatcccagcactttgggaggccgaggtgggtggatcacctgaggtcaggagatcgagaccagcctgagcaatatggtgaaaccccatctctgctaaaaaaaaaaaatacaaaaatcagctgggcttggtggcttgtgcctgtagtcccagctgcttgggaggctgagacaggacaactgcttgaacccaggaggcagaggttgcagagagccgagatcacaccactgtactccagcctgggcaacagagccatactctgtctcaaacaaaacaaaacaaaacaaaaacaaacaaacaaacccaccagatctcccatgaagtgactgagcgagaacccactcatcaccaaggggatagtgctaagctgttcaggagggtctgcccccatgaatcacctccccgcaggtctcacctccaacgttgagaatcacagttcaacatgggatttggaggggacaaagagccaaaccatatcaccccattcaaagggcccagaagaccaggctccaagggcaagtcatttgctgtcgctgcgcctcagttttctcttttataaagtggaggttaggaatcagcctcttggcttgctccaggaatgaaaacagagggtggagcaagcccttattagatgtcagttgtcttagtgtttttgtttgttttttgtttttgttgtttggtttttagacagagtctgacactgtcacccaggctggagtacaatagcgtgatctctgctcattgaaacctccgcctcccaggttcaagcaattctcctgcttcagcctcctgagtagctgggattataggcacgtgccaccacacttggctaatttttgtatttttagtagagacggggtttcaccatgttggcaaggctggtctcgtactcctgacctgaagtgatctgcccgcctcagcctcccaaagtgctgggattgcaggcgtgagccaccacgcccggccagaggtgcgttgtctttctatcatcaccttgagctaggctccaggtcagaggagaagagggctgtggccc

SEQ ID NO: 1886441 - DNA, 4001 bp, Homo sapiens
ccttttattacaacctcaactgccagatgaaatcttcccagaactccattactgcactattaaaagtaatcatttacctaactagcatttgagcacctatctccataatcaaagcccaccatgtccaacctctttataccaaacacaacacttgccccacgttccaggctcatcctgctccctgcctgctgagctcttcttctgcctcctctcctctcgccaccccaagcatttccatggtttgtgtgtcacctccttcaggaagtcttctctgatgacatgacacgcagatttttccttcagtcaacaacttcacattaagaaactattatgttaatttgagagccccttcctctcaaatttttttggttcactgttgtctgtaacctatacttaatattgtcttcttactctcctattctactaatatgctacatcattattattatttgagacggagtctcgctgttgcccaagctggagtgcagttcaagcgattctcctgcctcagcctccctagtagctgggactacaggcgcgtgccaccacgcccagctaatttttgtatttttagtagagatggggtttcaccatgtcggccaggctggtcttaaacctctgacctcgggtgacccgcctgcctcagcctcccaaagttctgggattacatgcgtgagccaccttttcatatccgtgggaaaaagttcttaaatgttttatttcctaattggttctcgtgtgcgatcttaactgtagtaggtggttacctttaggaacccaaacttacccatcttttatgcccccattcacagcacatggcaaagggtgaaacacctcgatattaattggtgttaagtatgtttttcctttgtaaatctcatgaattatttatgcttttgtacctttcttgaaggaatacaaagtgagagagaagagcttaacacctgaaaaatgtttcagttgcctgacattgtctttagctacaattggttagacaaacgtttacagagttcctactacacgcagagacaggcataaatattctattatggtaaggccttgatcacggttgttatctccagcaccaatcattgtcttctgcacataattaacacccaatacgtatgtgtggagtgaaaaaaatgaatgcagtcggcctgcctgcaagcagctgatattttaatggtgtgagggtgagggagatataaaggatgaacaaataaataaatgaggaaggtcatatcagtgtgataaccgctgtggagaaaataaagcaggatcatgaataccaccaacagccaggcagttgttggcagacctggagactcccatcagctggcgaagctgcccagcgtagtggttagctgctaggagggcagccccgggggaggtgcacagccctgccgctcattcgctacgcggctctggacgaagggcttcacctctctggcctcgactttccaatcccctaaaacctacttcatgagggggagtctgaggagttggtactaaagtgcctgtcaacctggcgggcgctagggaaacgccggcagcgccgcgggtcgggaactcaccggcgcgaagggcacggagagcctcgggctccctctgccgatgtccgcgcttccctgcccagggtcgagcaaggctgagctgggcaaagttttgaccttgaatggaggtctgggggactagggaccggcgcccctctctgtctgctagggctggcggagacccggcaggccggcgagggtgcggggccgaggtgggcggcgcttcccgggcgcctccgtcagacgggaggcatcgagggctcggccagctgccccgggcgccctgcgcggcggctgggcacgggccggtcactgccccggcgccggcctctcggacgaggccgccgcgcagccacggcgagaggcaccctcactacccccgcgcccagccggctcccagccctaacggcagccggcggggagcgacgccgtcccacggcgcgaggccgcggcgggcgcgcgaggcgcggcgcggggcggggcggggcgggcacatgcgcacaggcggcgcagccggcacgcggcgctcgcgctccctccttaaatgagcctgggcgccccgcgcccgccacttcagtggatcccgcgccggggccgcgggcggagctgcctgccggtcccgcgccgcgcgtccgcactcctcggccctcgggcggtcgatgggacggggcgccgcggagcaggaggcggcgcccgtcggggtgctcgggccgcgcgggagcccactgtggggctcgggcatggcgggccgcaggacctgagctctcctcaggggagcggggaggcagctgctggccggcgatggggacggagtggggccgtcgccgccgcgccgagccgtgagcgccgagccaccgccgccgctacctcagcccttcgcgaagcgccgggcagctcgggaacatggccctggagcggctctgctcggtcctcaaaggtaaggaccggggctggggccacggacggcgccccctgcgggccgaggctggcgcgccgccctgcccgcgcctctgcgtcccttacccgcgcccgggacccgacgcgcctctttgtctggcggggctcgcggctactcggagcggaccgcggggcgcgagccctgcccggctccgccggctctccgggcgcgccgcttccgacccctgcgagtccggccgacgttcgcggggcgcgtgtgggaagagggatcgggtcgggaaggcggccaggaggcccctgggcccagcagggccctccgggctgcgccctcgcgccgcttccgtagaattccgcgcatccctttgcaaagttgtgagattcctgtcgtggagcggaggccgctctttctccagatgtgatggcaaaaagtaattccacgagaacaataaaagccgcggccgtgacgtcgtgcagtggttttcgaatagccccgcggcgcctgcacctcgcggcggggaacggggcctgctgggccagccgggtcccacctgctgcggccacggaggctgcggcaccactgcgggctccgggggcggcgcgcgggcgccgcggacccggcttgtcccggcccccggggagcgctgctgctcgggtgcttcccgggacgcggcgctcctcgcgctccgccagaggtctcagaattccccgccgctggtgttcggttcttactaatttgttgtactgggaattaaaacagttggcttgtccagagcacagagctctaaaacctactccaccggctttgcatttcccaggaggtggtaatttagatgaaaatttatatacatagataattaggattgggatacaaagttgctcctgaaactcggactgaataaatcgtcttttcaatttccagagggaaaacagcaccaccactcagtaaaggacttccctttttccccctgctgatttaaattgaaagctgacgtgtttgtaatgtcgtaacatgttctttttttaaaaatttcgagggtacggctgaggcattattaacggtgttatgtataactcagcactgtatcttaatatttgtagagtgacttttttcctgctccctaacagcacttttttcaaatttgttttattagaaagttcagtgtaattttgcttttgattttaattggacacattgtctactctccacatattcctaaattcgtaattgagatttcagtaattcgaaacgtttaactaccccactgtaaacgtatctacagcttgtactaaggtaacctaggactttctagctgatgaatatttcacaaaccgtaaatccgtagtgatttctttattacaattgaaaacaactctgaaattcatcctgtggctttcatatctctaactcctaatttttacagtcattcctgggaaaggaatgtttttactctttcgtgataaaccgtatgcacactaggatttctgatcgtgttgcttatctgaattttctgccgttgtcggattgcgccc

SEQ ID NO: 1886442 - DNA, 4001 bp, Homo sapiens; identical to SEQ ID NO: 1242999

SEQ ID NO: 1886443 - DNA, 4001 bp, Homo sapiens; identical to SEQ ID NO: 1243004

SEQ ID NO: 1886444 - DNA, 4001 bp, Homo sapiens
gcctggcccttcccgcaggtctccggcctgctgtgtccgacgcacggaggctctgctgggccccgcctggctctgcccctggaaagcccccaacacccttcagctggcacaggggcactgtccccaccaggcagcggggcaacctgtagccaggagccgccgtggcttccagggaagcccgggaaaggcccctggtgcccacggcccaaccggaggacgcagctcaacttccccagagatccacagaaggggcgcgatcggaagcacgtccctcccgccccggcccggcccggcccgcggcacctacctccgtccgagtaggtctcggtcccgtagccgtcctgcagcccgttgctccaggtcccttcgtatttggccccgttgcccgcgcactcccgcaccccgtagcgccccttgaatccgtgcgtccactcgcccttgtacacccacttccccttgctctccaggccgatgccgtggcgcttgccctgcgcccaggtgccctggtacgtgttgccgctgggccaggtgtagacgcccagcacctcgaagccgtggctccacgagccggtgtattcgccttggcccttggggccggtgcagacgccatggccgtgcgccttgccgtcctcccagcctccacagtaggaccctccgtcgtcaaaattaaacctgcccccactggacatgcatgtaactcggttccagatcccgcaaacggtgaaaacggactcaggcgatcgacacagcagagtcgcggccgccggcggccctgggtcgcgagcgttttccggaggagaggaggacgcggccccggagcgcggtctcgggcgcgggcggccgcggcgccggctccggaggaatttcagtcaatcgggggcgattattccttttcgagctgcgccgcggagcctgaccagcgtctcgcgctcccgctggagacaggaccggaggggagggggaggggaggagggagggagggggcaggagcggcggcggcggggcccgcggctccacctcagcggcgagagggcccctcgccggcagccccgcggggagggcgccgcgccgaggccgggcggggggcagctcaggcccgggccgcggccccccacctgcggctgccgcgctgcgggcgcccgagggcggcggcggggcccgcgggcggcggcggcggcacgggcggcggcgctggcggctgcaccatattgggggccgcgggccgggcgcggggcggcggcggcagcagcagcagcaatgcggcggctcgggcggcggcggcggcggtggcggcggcggcgtgcgctccgggcccggctcgcgcgctcgggccgcgcggcgcgcgcccgcaccccgcccgcccgcgcgcccccgcccgccccccgccccccgccccccgcccccgcccccgcccccgcccccggagcgcggcggtcccaagaggggcgcggcccagcaggctagggcgcggcgcgcgggcggggaccccgggcgccccgccctccgcgcccccagccccgcgctccccgccctgggcttccccggggcccccgccggactggaaaccggggtccagccggggcgcccccgccccctccgggagtgggatttaaaggcacaggaactgcgtcatgggaaggcgcgcagcactcagggcgccctcggccccctcccgggagctgggcggtgaggcctgcagagcaggacctgccagctgagcgcccctaccctcgcccctgcccgcccccgcgcctcgcccctcccgccgggctcggatctgccccgcctgcccctgactcgactgaggccctttgcaaaccacaggtggttttctccggtgacaaacaatgcttccttcttccttccgggcagcttgggtccaagagtggggggaggggggcttaccccagaaaacagggatttggcgagtccctctcccctataaattgagtgagagtcgggacacacgcgtgtatcttggagcaaagtcacccgaattccgtgcgccctgcgccctggccaacaggtagcgcccccccactcggggaacggtcgcgcttttggggagcaaagtgggaccgccattcgggcgtttctaggtctctctccagacatactctcaccctccgcccctcttcccacgcacaagagagagtctgattcttggatccgagcatcctgggatccatttaaaatgcatttcctggaccataaatcctcaggcagaagccggcgtccccagccctcctgaaatgcgtgcgggaaatggcagcagaccggtgcagtgggctgatgggggtgtggaggctgcccagggtcctcgctcctgggagtgtgggccggtgaccgcagcgcggtgagccagaaactgcaagccaggcctggagcctgagattaggacaggagaagaggtgcgattcggagcctccaatcagccaggagccctgctcagatcttcccctgtccgagagaatcaggatggtccccactcttggctcacggggctctcagaaaaatcagcccctcctgggagtcccagagttcaacctcagtctcttgccttgggcaccaaagctccctccccagagtaccagcagccaggaggacagtcacctcctcatacacccactgtcaatgaggaacatttagggcggtcggctttgttttgttttgtgcagttacagtgattcattgagctttctagcgctgtctccctgtgcccctctacagaagttctctaaatgtctgcggtggcatcattggaccagctacgtcttggactttattggaagctgccaaattgctttccaaacacctggagcaactgacctctcacccttcagtgtgcctgggtttgtggttctctatttcctggccagcactggtgtcctcaaacttctgattttctttccatttattttactttgttcatctaaatgggtatgaaataatatctctgggctgtttcatgtccatggaaatttctctgttgtaaatgtgtgggccaaaggaactgcaccttgtcctcaagagattcgggtcgaaaccttggctccggggcccaccagcagtatggctttgggcagtcacctaatgtccctgagctcagttttctcatctgtaaaatggagatggcagagttcccatagggttaccgtgggaattcaaaagctaggcgcccagcactcagtaagcgctcgggaagtgggaagtaatgttattggaagccagccccccagggagggtcatggattcctgcatggagacacccagccctctgcctgttgaaataaacattgccaccactcgtatgttctacttttcatttcttccattttatttccaaccattttgctgctgaatcagcagccctccttcacacaagcagtggattgcaactgagatcctattgaaacacggtggttgcttccaagcagttactggtcagcaccttccacctttggccagtgtacactccgctcccttgcagttccaagacccccacctccaactgaccctctctcatctcctgcagtcagttactccagcggtgacaggctctagtctctgaaatgcagatattacaggcatttgttctgtgcaatttggaaatcaccgccctcccgataaagtagggctggcagtattgatttcactttggaggaaactctccaagcctataaacgtagtaccacccagccgtttaaaaacaaaaaccagggagaagggtaaaaaagctgtaacccacatgtgagccaggcactaggatgaagacagcacattagtcatctcatggactcaggtgatttggaattacactctcctttttaaaagaatcacttttccccaccaacgtaaagtgccttgccagagggaaaataatgactgggcaggattcgagcccaagtctgcctggccttccagcctgcaccctttctggcctccaggcatgggtccttgctgtctcttttgcctggtgcctcttcccatgacagtagagc

SEQ ID NO: 1886445 - DNA, 4001 bp, Homo sapiens; identical to SEQ ID NO: 1243011

SEQ ID NO: 1886446 - DNA, 4001 bp, Homo sapiens
tttgtcaaaagatgcagtctagttggcagtgaactttctctggctgggatatggctcaaagactaccccagcattgtctcttgcattaaggtatcatttagcctgagatggctaagcttgcaatctccagactccacgctgtcataaactttcagatcctcaaccaggaacttacatggaatgagctggccctggaggtcagctggaagatggccaaattcctctgaatcaccagctattttgaatcaaaggctcatccaacaacaaaagtgtataaacccatctgcctccgccttcttccagtcacccccagtctcactgtccagacctgtgggattaacaccgtatagtacttgctgttaacacttactatccactaacacccgtggaatgtggacactgctaagctgggagatgatgcttgtgcaatagtttgtattacccttttggcaaaggaccactccaagaaaatggtgtatttcatcccatcagcattccccctggcaaagctctccacccttagtcattcccctcttgtcatttctactgtggctatcaatgagatcttgtgcctccattagaatactgagctagcatttgatatttgacctcactccaaggtgtgtattctgggtttctgttgttgattttctttttaaaaaaatgagtgcaattcaaagttcttaaagtatatctgtttcctgcttccaacaactgacagataacaaaatggaatatacaaagacatttttaatttataatgtatattaaacattattatacatatacaacttacaagggttgcttctggctggattctctgccaatcgcccgaacactgaggattctgctagttgttctgccctgagttaattatagctataaaatttcatcaccagcaagaaaccaggcgacttccccagtacatcttgaatttatacatatattttgtactagatttagtacaaaataaatccaaaacatcttgaatatgcctcataatgaaacagacacacgtgaacccactcccacgtgagaaactgaggatgtgtctatgtgctccttccctgcctctccctccccctcttgtgtgctaccctcccggctccctaaagatcaccaatatcctgattcttttttatttttttttctcatgtcttgccttctctgtacagtattttaccatatatgtacgtttctctaaacaacattagttttacttggtttgaactttacaaaagtgttgttagacttccttctttcactgaacatcgtgtttctgagattcagccattgatgctgctacctggtagctctagttcatttatgatcgctgctacatggcttcctattgtattacttttccacacactacttccctcactacatttcttttctttctttcttttatttatttgtttatttatttttttgagacggagtctcgctctgtcgctcaggacggaatgcagtggcgccacatgggcttactgcaacctccgcctcccgggttcaagcgattctcctgcctcagcctcctgagtagccaggactaaggcggccgccaccacgcccggctaatttttgtacttttagtaacaacggtgtttcaccatgttggccaggctggtctcgaactcctgacctcaggtgatcggcccgcctcggcttcccacagtggtgggattacaggagtgagccactacgcccgcccccctcactacatttcgaaggcaattttgggggcaaagccctcagcacagtcgctggcagagtcagcacacaacaaaattttgtaaaattgaatgacactgagcccggactgaatgtaacaacttacacatgttgcttctggctggattctctgccctttgcccgaacgctgaggattctgctagctgttccgccctgagttaattatagctataaaatttcgcgaccagcaagcagaaaccgggcgacttctccagacacctaagactacgcttcccagaaaggattgcgatactctcctactgtttagtttctttttcctatcgtcaaatttccgggttatgtgggcggtgccaaaataattatccaatgagcaacttcgtaggctgagcgggcaggagaattgctcaatgagcgactcggaagaggagccaataagcggagaggttgctggggtagccggcgtgggcggcgtcactgagccgcgccagctgagccaggtagggccctaccctcttctgttgctttctccctgtggctcgcgccgtcccccgccgcccgtcgaccccgcttccatgtccctggcggacacagctcccaggaacctccacgcccatggccactaggcagagggaatcctctatcacctcctgctgttccacctcgagctgcgacgcagacgacgagggcgtgcgcggcacctgcgaagatgcttccctgtgcaagaggtgcctgtcgggcgcggggttcggggccggcatctggggcgcgggcctaggtgggaggtgggcctgcatctgaagaatacgctcaaggctggcagggatgcagcccccgcctcgcacgaccctcgcttcccacctgtgaagtgcacggagcagggcttcatttatttaacgaatcgtttctgagcttttgctgtgagccaggcagggggccagcctgggtatcgtcgatgggagcaggcccctgagccagacagacgaggccttgggcttcttggagctaaacgctgctggaaagacagacatgaagcaaatagtagctccagcctcgatgggttacgaggatgagaggtgtaggttctctctcttttgtaggttgcattctttagggggttggtgtgatccctgttgtgcacctgaaactcaggatgacgaggggaaataacccacccagagccaagtaatatctctttgcagagccagtaccgcactaagtctccactgttaagggtgtggtggtggggatgggggcgtagccagcagaggtacgtgtcagagaaagagaaagcttgaggcttgaatgtccaccatttattctttcattcaacaaaattttttgagaccttactttgtgccaggcctttactttgcagtggttagtaggaattcgatggtggaaatacaccaagaacaagacagacatggtgtcagacatactggaactcacagctttgttggaaaagagagacaggaagcaaataattacctatgaaatatataattatgatttttttgtgttgagtgctgacaaatacggcagtgccattagagtttgtaattttgtcagtgatgtttaaggtgagaagagtttgggcgcggtggttcacgcctgtaatcccagcactttgggaggccgaggtgggcagatcacgaggtcaggagttcgagaccatcctggccaacatggtgaaaccccatctctactaaaaatacaaatattagctgggtgtggtggcgggcgcctgtaatcccagctactcgggaggctgaggccggagaatcatttgaacccgggaggcagaggttgcagtgagccaagatcacgctattgcactccaacctggatgagagtgcgagactatgtctcaaaaaaaaaaaaaaaaaaaagtgagaagaaaaggcttgaaaaataggaaagttgtaggagagtgttcagaggagtgtgaactgttagaggaactcaaaaaatgctttaaaggtgggagaaggaggctgaggccacgtagtgattgtagagtggggaaaaccagtgtgttggattaaaccttgcactttttataggttcttggggactaaactttcagagcatggattctggagctagactctgtcaaactgagcgttgccacttactggcagtataaagtcggggaaattactaaacttttctgtggctcagtttcctgatctgtaaaatggggagtataataacgcatcataggtgggtgtggacaaaaatgatatttaatattagtagagcacttggagcagtgtctggcatgt

SEQ ID NO: 1886447 - DNA, 4001 bp, Homo sapiens
tattggcatattccttagcctttccaaatatgtgttgcttttcatcagtactgcaaagtgaccataacatcctgccacgtcaatgaaaaggcaagatttagtttaacaaattcatctctaaacttaccaggatcctctgaaaatctaccaaagtgttttttacatagtcctagatccaccaccaaaaaaaggaacttggatccttgtcactcccccgtttccatccatttctctgaggggaaaacagccctgggccagtggggaagcaaaagagggtgcctgtttggagtccgattggagcgctgttggggacagcacaggggctcccctccccaggaggcctgcttagggtagggagggagtgctcggggcctgaggctgtggaggtccgcttcttcaggttccttcaggaggaacctggaaataggggccacacacacctgacaagaatccagtagctctgggtcctagcataacttcataaaagcttgtagctaggtatctctccccatttctctgtccattcacagaataggtcgggcggtaagatagtgttaaaactaggagatccacttctgcccatggccatttttcttgatctaatgtgtactagggcaggttgtattacagaggaaaatcagtttctttttttttaattaaaaaaaaaatttgattttgaggcagggtctcactccattgcccaggttggagtgctatggtattaccacaactcactgcagcctcaacctcctggacttaagcgatcctcactttagccttctgagtagctgagaccccaggaaggcacccccacacccggctcatttttcctgttttttgtagaggtggagtcttcctatgtttcccaggctggagtttctttttctttaaaccatctgatttggattccttccatttagaaatgatacatcccaggtgtgagtcttggaagatgcctggggcattgcccatgactgtagcccctgtgtctgcttgtcttattaaaggaccaggggcagggtgcaagcacaggtgtcaggcgacgaaaagagagttggctcccagccccacacagcacaacagtacaggtcacacaagagggccggcgtgagcagtgaagagaactccccaaaaccgagtgccagcttggatggtttctttttcttcttcagccttacagcaggtccaggttctactgaccagtgtcctgcatttggtagtaaccgaatgacagtcaataagatgttgaattaaacatacaaaaaggaaaaacagatcagggcatgagctaggcaaactccagccccatgtgccgtcaattctccccgcataaaggcagcacccagagtccgtaggctcaaacactgaacagacagagaaaagctcacaggcttcccttcccaacaggtgtggcaaagggagggaaagcactgaaagacttgaagattgtcaactattgggtctgaagccagggcacccagtagttccttccagccgtgtcagtccgtcctgcacgggtgtctgttcagttcgagccaatgaagttaaaagtgaaggaaggaaagcagaaaggaagaaggaaaaagacaacaaataggggacgcgagggaagggaaaacattgtctggggcaggagtggtgaggagtcttgcagagaccagaggaaaacttaccagtcgcgagactagaggaaaactcgccagtcgcggtggcagcgctgaatcagtggggcctccctccggctcgcaggctcacaagcctcccctgcagggagggaaattactccttgtgctcctacctggctcaccagataatctgttatggcaccaagcagattttccagacaaggcttttagttgggggcttgtgcttgagcgcacggggagacggcagagactctgcggctggctctctggaagagccgggagagacgttttattagcaaagcctggtaactgacatcgggagagggcatgtaggctgagctgggcaaagcatgtgaggggtagggaatgcgggtcagcatatctagtggctgatggttatcttggttaatggaccacctggtgggctggccagaggcaacaaggctgtaatcaagcttgttcaaccccaggcctgcgggcggggcgacatgcagcccaggactgctttgaatgtggcccaacacaaattcgtaacatttcttaaaacatgagattcttttgtgacttattttttttaaagctcatcagctattgttagtgtattttgtgtggcccaagacagttcttcagtgtggtccagggaagccaaaagattggacacccctgctgtaaatcagttgttcagtgttccttcctgggatgagacactccaccaccttggtttgatatttagatttcctaaggctagttcctgggattctttaagtagaaggtctggttaaacatgaagaaggagccgtatcccattcctgttctttttcattatgactctccatccattaatgtagttgcctggaacatttaaaaagtgaccccatattttcataatctgaatttttatgtcttttgtttactactttattccgagggcatgtagaaagttacctggccttgcccaggcacagtggcttatgcctgtaatcccagcactttggaaggccaaggctggtggattgcttgagcccaggagttcgagaccagcccaggcaacatggtgaaacctcgtctctactaaaaatacaaaaattagctaggcatgttgggtgcatctatagtctcagctacttgggaggctgagatagaaggatcacttgagcccaggaggtcgaggctgcagtgagctatgatcacaccactgcagtccagcctgggtgacagagcaagactgtctcaaaaaaaaaaaaaaaaaaaaaaagtaggttacctggtccagaatagatgtgcagtaagtgggtttttgtgtatatgaatgaatgaatggaagactgaagttagttattatagatgacatattatgggggccattccgagtctagtatcaaggagtttacagagttgcagatgacaggtttgctaatgtgtgctgagagctttcatagcctagtaccatgttaagtgcttcacttggattgttttcattcagtccttacagcacactcatgaattaagtgctgctgttatcccctttttgcagataaggaaactgaggcttaaagaagttaatttgcccaaagtcttttatctaggaaagggtggagctgagattcaaactgtgacttcaagctcaagatcaaggcatcttcatagttttctggttttttttttttttttttttttttttttgagacggagttttgctcttgttgcccaggctggagtgcaatggcacgatctcagctcaccgcaacctccgcctcctaggtgcaagcgattctcctgcctcagcctcccaagtagctgggattccagacatgtgccaccatgcctggctaattttgtatttttagtagagacgggttttctccattttggtcgggctggtcttgaactcccgacctcaggtgatctgcctgccttggcctctcaaagtgctgggattacaggcgtgagccactgtgcctggcccgcatcttaatagttttaactacagtccctccccatccccccttttaaattagtcatttaaataaaaccctaattcttatattgaaaaaaatgtgagtaaacattaagtgtttcagctgtcctttagaaaagtctgatccttataaagtggaaataattttcaagctttattttttctagatccatgaaaataatggatcaccctttcctgatatatttaattttatattaaatatgctttttaagtgataaatggcaattctgatgctctgggaactgcaaagtactggctggttagaactctgagtggaataagagtaactggctctaggttaagtccagagatggtttccggggacagaaagtgtgttggtgtttgattatggttgt

SEQ ID NO: 1886448 - DNA, 4001 bp, Homo sapiens
ctgctttgtgcgcgtgaggctttctctgggtgcctgaacagatgcctccagtttcagttctttctgtttggccctccccatcctcttctcctccaggggggattcatggctcgcctcttggctcttctgggcacttggcgagcttctgcgcacttgcgttagctgctcaggtctgtctggatgtgagagtcgtgtcctcaggccaggaagcactggcacggagcagggctcggtcaatggtctggataatccagagtcacttaccttctgctgtgcagtcatttacaattcacgcctgtgtgcctgatgtcttgtgactcagaatcttcaagacaatcacaggctggcctcacggaggcacgagtgactcatttctctcatcgcacccattccctccagcactctccttgtgcggggaaacctcagtcaccttgaagacgcctcctgaggccctcttctgggtgaatgggcttcctccttcaccatgacaggctactggggagagctggggtgctcccaccctctcctcaccccaaatgggcctggcctagcaaaactggccagaactggccactctgcagtgagctggcagggccctcagcatcagatcaacaggttcaactgcagctgcctctctggtggggaggttataaggcctgctggctagaccactggcccctggccagggagccacctaggcagtgccagggaaggactgggaagggaagagaacctgcggtccctgagtgaggccttgactgcaccctctcctgtggttcgaaagccacacttggccagtatcctgccatgcaggtgaggaagctggggaggacagggtcccagagccttgtccaagttgcagagaggagagccagctctcactctgcagccctctgtgcccccagacccccactggcccccggggacacatttcctgcccttgggatgctttggcatggatatagtctgggaacaaacggcacatccagctgccctgcctgtctccacagagggggcagcagacctagggggaggtgtccaagacacaggaatgaagtgtccttaccaaaagcttccgaggacagaaataaacccctcctgccagcttctgcactgactgcagctagaagccgagctccacgtgggacacaggtgtccctgctgcggcatctcagcatgacggaggcccatccttggctttcctggagcatgaatatcctctgaggagcactggccctggccttgtaggtcttgctgagactggcttagattttctggcccaggagcaatcgtcacccaacctcccacttgtaaatctcgccacagaatcggcccacaaccgtctctccggaatctcggcggaccagccctgctcctgtgtctccctctcccgcagagccactgccttctcaggctcctcaagtgcacctaagagcgggagtctggctgccctcagcactcgcgtcccgccctgcagcctgataagcttgacgccaaggcattctcccgagagccggcccagcagctgctggcaggagagtggcctcagggcagcgggaaggggacctccggggagagaatgaggcctgcgcaagggtcctggaaggacccaggagtcgccccggcttccctcccccaggccctggttgggcgccgtgggccgcgtcccagttgagcccggcgtggccgtttaatggcgtccctccgcgaccgaggacgaaggggcctagagaggctgtgcccaagcgacgctgcgaggccaggccgcgtctcgggccagggcggtccccttgccaccgccgctcttggccgccaggaccaagcacagcacgcagcgtcgcgaaaggggcggtcctggaaggcgcgaaggggtctccgggtctcgcgaacacggcggggtcggggcggagtcgtgggtcctcggtcgagcggccgcccagagccccgcgggacacggacggccccagcccggctccccgcgagccccacgcgtctgtgacgccgctgatgcgcagacgccgcggctgcaggccccgcccctccgtgcccctcgcaaggccctctgggagttgtagttccagctcctcctcgggccgccccactccctgataatcctggagcgcggcgcctcccggggaccgaggcctcgggcccggccgtctccagcagcgagggcaggagaagtggcccgggcggtcggcggactgggagggcgccacccgaggactacaactcccggcctgcctcgcgcaggcaccgccccgagcttccgccccgtcggcgccgcgcagccctgtgggagccgtagtccgggcgcgcgattcacagcgccgcgtgcgccccgggcgcgccgtagccgcggggcccgggccgggcgctacgctacgaaggcagcgtaaggcgggcgccggacgcgggcaggggccggggccggagccgggtcggggcgccccgcggctgaggagcgggaggccgtccgggcagcgcggccggcggcgagaggggccccgccgctctccggaggcagaagttgtggatcggccggcgggggcgagcgggcccgggggccggggccgcgctgcccgggccgcgaggacgaggcggcgccgccgggctgtggaggtgagtcccgtcggccgggcccggccgggcgcccagccggggaccccgggcggggagcgcgggcccggagggcggcggggagcgcgggctcggcggggcgcaggaggcctcgggggccgggcgcgccgggctccgagccagggcagggacggcagggcccccggagtggggtcagcccgccgcccgctggcgcctccaggctggtgggggccagggctgggcgatgcttcgcagaggaacccagaggaaggcgggaagtcggcagggacctgggccatgtgggtcacttgaggccagccccgggggccgcgcacaccggaggcggcctcggccctgcctgcccttgagtgcccttatatccgggcccatcgtgcggtcctggccgccttagggatgttgtgcttggtgcgggcatcactcccctcacttggggaacggcctgggggcggccacctggcgtggaggggctggcgggagccccgtctgtgccagccatgccagtgttctcttccgtgttcctctggggctgctgcggcaccagctgggaagttgcaaatctgctgtcctcccgctggctgcagaaggggcccctctagtcctgaccgggggaactcttgtgtggtcagctggccctggccgggcgagctctcggggcccccttactgctctggagtttgttaccggactgcaggtaacaagacccggaaagcaatggtgaggcccagaacctgaggccaggcctgggtgtgtggggccagtggggaagactgggactccgttgggtgctgaagagttgtgtgcttctccttcgggaaacccggatctcttcctctgcccaggtctgaggggtgcggaaacgtgagtcacagttcagtgtgggagtgccccgtaattgcctccgcgtttccagagtctggggctgggcaaggatataggggtgattctcccttccggttctgagtgacttctcaactgtgaagtggggcaagagaaattgtttttctggcctgtctgggggaggcaggtcctgcaggaaaccagcttggcctggccttgggttgggtgtgccttgcctcctccgaggtccttctgcttgcgggaggagcacccctctttttcctgcttctgtctgtgtctgaggctctccagagctccttgattggcagaggagccagtgacctctgagtccccaggagagcccgaggctcagtaactgcataactgcgcagggcctcttgtctgggcctccacagaccgtggtctctgagagcaggaagtggctggtcccctgtaatgctgcatctgtgtgacagcctcaagccctgctggctctctctccgggcacccctcacttgcttcttgccctggccttgggcagc

SEQ ID NO: 1886449 - DNA, 4001 bp, Homo sapiens
catgatcttggctcactgcaacctctgcctcctaggttcaagcaattctcctgcctcagcctcctgagtagctgggattacaggtgcccgccaccacgcccagctaatttttttgtatttttagtagagatagggtttcaccatcttggccaggctggtcttgaactcctgacctcaggtgatctacccgcctcagcctcccaaagtgctgggattacaggcgtgagccaccatgcccagccacctggcctttatttttaaattgtgataaaatatgctaacatgcttgagcccaggagtttgagaccagcctgggaaacattagtgagaccctgtcgctaccaaaaaaaaaaaaaaaagcataacaaaatgtaccactgaaacttttttttttttttttttgagatggaatctcactctgtcacccaggctggagtacagtggcgcgatctcggctcactgcaacctccacctccggggttcaagcgattctcctgcctcaacctcccgagtagctgggattacaggtacataccaccacgcccggctaattttttgtatttttagtatagacgggattttaccatgttggccagcctggtctcgacctcctgacctcaggtgatccacccgcctcggtctcccaaagtgctgggatgacaggcgtgagccaccgcgcccgactggcctaaaccatttttaagggcgtaagtcagtgccactatgtacattaataaggttgtatcaccatcatcattgtctatttccagaatgtttccatcatcccaaatagaattcaatctttaatactcaaatattttaaaattaaaataaagaacactgagacgaagataaactaaatccagctgggcaactttttcttctgaataggcagactctcactatcatatcaaacttatattcgtggacatatattcgtgttgcaaactctggaagcactcaccgaagcagataaaggcttttcagaggttaatggcctgtgatgagtcttgcaactagaccgtgaatccatcattcctgattctcactcctaatgacattttactgggttgtccaatgagttaataaatgaaaaattatattaaaacttataaatgcaacatgtaccctctatcagtatttcccatcataaaataatactttaaaagtgaatttgagccagctgcagtggctcacacctgtaatcccagcactttgggagaccgaggtgggtggatcacctgagatcaggagttggagatcagcctggccaacatggtgaaaccccatctctactaaaaatacaaaaaattagctgggcatggcggcgcatgcctgtaatcccagctactcaggagggtgaggcaggagaatcgcttgaacccgggaggtggaggttacagtgagccaagatcaagccattgcactccagcctgggcaacaagagcaaaactccatctcaagaaaaaagaaaaacaaggtgaatttgggctgaatgcggcggctcatgcctgtaatcccagcactttggaaagccaaggagggaggatcagttgagcccaggagcttgagttccacctgggcaacagagtgagaccccgtctctataaaaaaaatgcaaaaattagcctggtgtgatggagcttgtctgtagtcccagctactcaggaggctgaggtaggaggatcgcttgagcccaggaggtcgaggctacagttagctgaaattgcgccactgcactccagcctgggcaacacaatgagatcctgtctcaaaaaaaaaaaaaaaaaagaaactgaatttatatggaatcactgttgtgacattttaacatcttttctctatagttattgtacaaagaataccttttttttcaaaaaaattttcaagaaaaaaatactttcaggtttttccacggacttacaaatatgagaccgctacaacaaatgtatctagcctagcaaaacatgaatgaaacgttgtatgcagtctctttttctattagtcagtggctgaaagcctttgaaacaacctgatgggcggttggtattgtgtaagacggtgacctaaaaacagcctgtcagttccctgccatcccatttttcaacagcagggtgtgatcataatgggctttattgacatcataaatctgagagcatggatggtatccatttccagttgtttaattgaagaaacgaaagatcttgtaatgtggagttgatatggagagtttgtcgagctacagtaaaattttgcaagagctgtgaccttgggtcagaaaatgactgatcaagacggaaccttttgtcatactgtggaagcgactgtattgacttattttattcttagcgctaatgccaacagagagcacgaattgcttctgactgctttctgtctcaacccagagtgactctgtgggcaaatcaatacaagtatcgtctaaataagctatgactaaataataaaatatgataaacttttattatttattttgagacagagtttcgcgcttgtggcccaggctggattgcaatggcacgatctctgctcactgcaacttctgcctcccgggttcaagcgattttcctgcctcagcctcccgagtagctgggattccagccatgtgctaccacgcccggctaatttttgttttttcagtagagatggaatttcgccatgttggccatgctggtcttgaactcctggtctcaagtgatcctggcctgagcttttcaaagtgctaggattacaggcatgagccactgcacccggcctgttttccatcttcttaatgtgatgggttctcataagggtgaacaggtgggcgtgagcaacctggacccatacaggtgaagccacagcaaatcatagacggtccctgggtttcatgggtttgggaacagcaaatcgcagacagtccctggctttcctgggtttgggaactttatttaggatgtttgacacagttgagtgtaaaagaatgatacattttctcacaacttgtaagatttgagaagtgctgaaagccctagagaggagaaagagaatggtggtgtctattaaaatgcagtgtgagatcatctatgattcatttacataagatttaaaaataagcagaacaaatacatagctttacaaggtccagtcgtggttactcttgctgaggaggggtaggcagaggaaggggagtgaggggggttctggggtgctggttaccttctgttccttggtctgagcaatggtaaatggtcacctttgtgaaaattcattgagttgtacactgatggcttgggcacttctatgtgtataatattcaatacattttttgaaaatgtaaaaatgggccagacacagtggttcacacctgtaatcccagcactttgggaggtggaagcggatggattgcttgagctcaggagtttgagactagcctgggcaacatggtgaaatcccatctctacaaaaaatagccaggggtggtggctcacctgtagtcccagctacttgggagcctgaggtgggacaatcacctgagcccagggaagttgaggctgcagtgagctgtgattgtgccgctgcactccagcctgggtgacagagcgagaccttgtctcaaaaaaaaaaaaaaaaaaaaagggctgggcacggtggcggctcgtgcctgtcatcgcagcactttgggaggctgagccgggtggatcacctgagatcaggagtttgagaccagcctggccaacatggagaaaccccgtctctactaaaaatacaatattagccaggagttgtggtgcatggtgctcacacctgtaatcccagctacccggaggctgaggcaggagaattgcttgaacccaggaggcagaggttgtggtgagccgagatcgtgccattgcactccactgggcaacaagagcaaaactccgtctcaaaaaaaaaaaaaaaaaaaaagtaaaaatgtagtatagaagaatctttgtcagtcctttacagaaagttgatat

SEQ ID NO: 1886450 - DNA, 4001 bp, Homo sapiens
ttttgatatggttaaggtttttaagaatgcaactcctgcagaatagctgaacagacaatacacatttaaaaaagaacaacacaaggatcaaccagacttgggaaaaaatcaaaaacaacacaagtcttatgaaaaactgagttcttaaaatattacggagaacatagctatcggaagagaaggcagtattggtaagttgattgttacatttttcagcaaaagctagcactattttttttggcaatctttcaggcactgcaactactactgcaaaatgagatataatccattaaacaacatattcacaaatcaaaaaatgttttagtaatataatgcttcagatttaaaagcaaatcaagtgttaaaactcaactgctataataattaaccccaaagataaccgtatctgacaaaaaagcttccacagttatgacttcagaattatactttctcttgatatttatttatttatttatttattttatttttttcttgagacggcgtctcgctctgtcgcccaggctggtgtgcaatggcataatcttggctcactgcaacctccacttcctgggttcaatgactgtggctcgcgcctctctggaaacattggaaatctctcttctacgcgcggccaactgaaaccacaggagctcggaacacaagccaccatccacctcactgctttcgggagagaatgatgagtctcttaccgactctctcttgagagagtcctccgcggtggggaccgagggcggctcgtcacctactgtgtggcccgcgcctcccccttccgagtcgggggaggatcccgccgggccgggccggcgtcctagcggttgggaggctgcgcgagcggtggctgtgccaggcgttccgtccggcgcgtgacccgctccgctgcgagccggctctccacccgctcccctgaggagcagcgaccggtgccgacaaccgcgtttgcgtggcacggggttgggatgcctggccatgggaagcatcccaagtggggggcgcgccggtctcccggagcttgacagtgtcggaggatggacaagaaaccagcaacgtggccctggcgttgggtttgtggctgaggtcgcttcggggtcccgatggcgggacccaggctcgtgaggcgggtctcggtgggtgccaggggccgtccggcttcctaggcggggcgccgcgggacctccctcgtatctgtggcggtgggatcccgtggccgtgttttcctggtggcccggctttgcctgaggtttcttcccgagccgcccctctgcgggctcccgggtgcccttgcccttgcggtccctggccttgcctgtctgtgcccccctccccgcccgcgtatcctctctccccgagcggctcaccagcttaggctgtggtggccccctctgggaccaaacccggctccgccttgtgtggcgctgccacgggccactggttggccggttgtccctgtccccgggcgcgcgccttccggaccaggtcggcggcgctccgcatgggcctggtgagagcccggagggtatggggtcggcgtgcagcgcgcgcagggaagagggttccgggggctggccgcgatggcggaggcggtgggggagccgcggggccgccttcatgcttggaggccgctggcggtgagatcccgggcaccgcggtccgcctctggttcgctgcccaaacgtctgggctgccccgcgcccgccacgcccgagtggccgccggtccctcgcagctgccgtgcacgggtcgggcggtctgcctgttcgcacgtgggcgcgaaggttcgggagtggtgagcccatcggggggtgttctgtagtgtgggtgtatgggatgtccggttcgccgccccaccacccccctcccaccgccccgcgctgctccctccctcccacaagccgggtcgcccgccctgccgcgcccatcctcgcgactgggacgccgggctcatcctcgcgaggcctggaggccgctttctacctacttggttgatcctaccagtaccatatgcttgtctcaaagattatgccatacatgtctaagtaggcagggccggtacagtgaaactgcgaatggctcattaaatcagttatggttcttttggtcgctcgctcctctcctacttggaaaactgtggtaattctagagctaatgcatgccgaagggtgctgacccccttcgcggggaagatgcctgcatttatcagatcaaaaccaacccggtcagcccctctccggcccctgcctaggggtcgagtgccaccggctttggtgactctagatagcctcgggccaatcgcatgcccccctgtggcagcaacgacccattcgaacgtctgccctatcaactttcgatggtagtcgctgtgcctaccaaggtgaccacgggtgaaggagaatcagggttcgattctggagagggagcctgagaaatggctaccacattcaaggaaggcagcaggcatgcaaattacccactcctgactcgaggaggtagtgatgaaacataacaatacaggactctttcgaggtcctgtaattggaatgagtccactttaaatcctttaacgaagatccattggagggcaagtttagtgccagcagccgcggtaattccagctccaatagcgtatattaaagttgctgcagttaaaaagctcctagttggatcttgggagcgggcgggcagtccgccatgaggcgagccactgcccgtccccgccccttgcctcttggcgccccctcgatgctcttagctgagtgttccgcggcccaaagcgtttactttgaaaaaattagagtgttcaaagcaggtccaagccgcctggataccgcagctaggaataatggaataggaccgcggttctattttgttggtttatggaactgaggccatgattaagagggacagctgggggcatttgtattgcaccgctagaggtgaaattcttggaccggcgcagtttggaccagagtgaaagcatttgccaagaatgttttcattaatcaagaatgaaagtcggaggttcgaagacgatcagataccgtggtagttctgaccataaacgatgccgactggcaacgtggcggtgttattcccatgacccgctgggcagcttccaagaaaccaaagtctttgggtttttaggttccggggggagtacggttgcaaagctgaaacttaaaggaattggtggaagggcaccaccaggagtggagcctgcggcttaatttgactcaacatgggaaaaatcccccgggccggacagggacaggattgacagattgatagctgtttctctgttccatgggtggtggtgcatggccttagttggtggagtgatttgtctggttaattccaataaccaacgagactctggcatgctaactagttacgtgacccccgagcggtcggcgtcccccaacttcttagagggacaagtggccttcagccacccgaaattgagcaataacagatctgtgatgcccttagatgtccgggactgcacgcgcgctacactgactggctcagcgtgtgcctaccctacgtggcagaggcgggtaacctgttgaacctcattcgtgatggggatgggggattgcaattattccccatgaaggaggaatttccagtaagtgcgggtcataagcttgcctgaagtccctgccctatgtacacactgcccgcctctactactgataggatggtttagtgaggccctctgatcagccccgccgggtcagcccactgccctggtggaacgctgagaagacagtcgaacttgactatctagaggaagtaaaattcgtaacagtttcggtaggtgaacctgtggagggatcattaacggagaagagcctcgaagccgcggcggcgaagccacggcggcgccgccgcgtccttcctccttggcagaccctgttccccgtgtggcgcgtgcgcgggcggggtcgtgccctttgtttgttgcatggccccgcctgccctga

SEQ ID NO: 1886451 - DNA, 4001 bp, Homo sapiens
gaagggcagagctgggccttggggcaaggccagtggcagcgccgggctcctggacacagcagatggccccaggcaactggccctgccctgccctggagacccctccgcctccgagtcctccacgtccttccacctggatgccgccacagcccacctgggcctggcttcacgcccccagctcttgccgggtatgacgggtgggcatggagggtgactcagcccagcccaggaaggaccagccgcgtggcaggaagacggagggagtgcccggagccagcagggcggccaccgaaaccccgcactgacgcagggaccgaggcacccggggccagtttccgggagagccccacgatggcccctccattcctcttaggcttcccgcccagggcgggctggtgcggggaccgggaactggtgtgacccaagacacatcacccgcgtgtcctctcacatcccattccaccaacaccaaggttccttctggaggctcctgggagaatccattttccgcctcttccggcttcgggaggcctctccttggctgggggcccctcacgaagccagtagtggcaggccagtccccctcacgcccgcctccgccatggcctccctcttccactcagcaggacggaggtaccctgtgccctcgcgggtcacccagggcagcctccctgttgagggagctgatgtgccgtccacagtcgcaggtccccgctgctgtgtgaactcacaggtcccagggtgaggaagcggggtcttcggggcaaggaagcggggggtctttgggtgaggaagcggggggtcttcgggtgaggaagcggggggtcttcgggtgaggaagcggggggtcttcgggtgaggaagcggggggtcttcggggccgtcattctgccacccacagatgggagcctcctcatgaggcgtccggcctcagtggcagctggagagccacaggggctgtggggtgcccagcagggcgggctcagtactgcccgcaggaccaccctgcagttagggcgactcagcggctcacagccttctcagttcagttcctatcagctgaccgaggcggccccaccccacctgcccttgccctaggagctggggatctccatccagcaagactgcgaaccaggccacctctgagaccggctgccacagaccacatgctggccctggctgcccgctaaggccaggggacaccctccttgagactcccagggtgatgctcagctcctgaggaccgagcggcctctgcatggcgctccgtccccatccctccgcctctccagatctgcctggctcaacgcacaatcatcctgggccctcccagccttacctggccaaaccgtggccttgcccacctgcctggaccattccctcctgattgggtgcgatctgcagacagcagtgtaagtactgcatggaggagccgcggcccgacgcccacagcacgcgccacgtccgtaagctgcacccagtccagcctggtggctccccgtgtgagcctgagcttgccggccagaggggacgaccttgggctttggccccaagctcgtgattcacaccctcgccctcaactcgcctgcctcagcggctcatgtgcaaagcaggctgagcgcgctgccttcagtgggtgtgagaaccctgggaaggcacctcgaggggtgtcagaacccggcaggtgcctccagtgtggggtgagcgtgcgctgggtatgtggggacctgcggcagcgccctccgcccaccctcagacgggctggtgctcagggggtgcctgttgggcccaggacccaccccttccgtgcacccgcctgtggggacctacgggcttcctgctcagagagaggcagatgagccccacgttgctaccgcggtcgtccatcccgtgctcttgtctgtgccggcagctggcaggagatgctgcggccgtcgtgcgtgatggatcatgaggtgcagtcacggatgtttatcctccagtgacctcgtctctcttgtggctgctgaggagatgcacatggggcgtgatcattcgtattgatcaatttgctgctcatttgccacgtcgtcaatgttttcacacagggtccactttactcttccaggcaggaaagcggctgcaccgacctgcggccaggaagaaggggacagaatcgactcccagggggtctggggggagcaggagtctgctctggctcaggaaggctctagaagggccaccaagagcagccgcaacagtgcacaaggaccttgtgatgagagctacctgagcgagtcccaacctgatcagacgcaccatgtagggggagccggggccccattgcagctgcctcggggaagcagtgaccacaggcccggctgaacctgatggtgacggggaagggagggactggtgtgcacacaggtgtccatgtgcctgtatgtatgcaggtgtgtgtgtgacacacacatacatgtgatatacgcaggcgtgtgagatacacatacatgtgacatatgcaggcgtgtgagatacacatacatgtgatatatgcaggcgtgtgtgagacacatacctgtggtgtatgcagctgtgagacacatacatgtgatatatgcaggtgtgtgagacacacacatgatagatgcaggcgtgtgaggcatatatgtgtatgcaggtgtgtgagacacatacaagtgatatatgcagatgtgtgtgacatacatgtggtgtatgcaggcatgtgtgacacatatacatgtgatatatgcaggcgtgtgtgagacatacatacctgtggtgtatgcaggcgtgtgagatacacatacatgtgacatatgcaggcgtgagacatacatacctgtggtgtatgcaggcgtgtgagatacacatacatgtgacatatgcaggcgtgtgagatacacatacatgtgacatatgcaggcgtgagacatacatacctgtggtgtatgcaggtgtgagacacatacatgtgacttatgcaggcgtgtgagacacatacatgtgacatatgcaggcgtgtgagacacacatacatgtgacatatgcaggcgtgacatacatacctgtggtgtatgcaggtgtgtgatacacatacatgtgacatatgcaggcgtgtgacatatacgtgtgacatgcaggcgtgtgagatacacatacatgtgacatatgcaggcgtgagacatgcatacctgtggtgtatgcaggcgtgtgagacacatacatgtgacatgcaggcatgtgagatacacatacatgtgacatatgcaggcgtgagacatacatccctgtggtgtatgcaggcgtgtgagatacacatacatgtgacacatgtaggcgtgtgagacacatgtgacatgcaggcgtgtgacttacatacctgtggtgtatgcaggcgtgtgagacacacatgcatgtgacttatgcaggcgtgtgagacacacatacatgtgacatatgcaggcgtgagacatacatacctgtggtgtatgcaggcgtgtgagatacacatacatgtgacatatgcaggcatgtgagatacacatacatgtgacatgcaggcgtgtgagatacatacatgtgacatgcaggcgtgagacatacatacctgtggtgtatgcaggcgtgagacacacatgcatgtgacttatgcaggcgtgagacacatacatgtgacatatgcaggcgtgtgacatacatacctgtggtgtatgcaggcgtgtgagatacacatacatgtgacgtatgcaggcatgtgacatacatacctgtggtccacacctgtctgcacacgcctcctgttactgatggttaactcagtggctggcacactcaccaccttctcactgtggctggcaacaagctgctgttctgcaccaggacctcctctcaggctcccagcaaaggaggccggcagctttgacacgagggtccgggagccgtggctcctccaggttagtggtgcacacagcgcttgccacaccgcccactgcctcact

SEQ ID NO: 1886452 - DNA, 4001 bp, Homo sapiens
ttctatttccattgtcccctctaggtttattaatttttaagttcaaattctggtctgtgattacagacctactctaataccaaaaaagaacccagacacccttgagctgacatctcagcaatacctgtcactgactgccaggacggcagcggagcaggcagcttcctcagctgaaggtgagctgtgtgtgccagccccgcccgcacctgacagccttccccttagtattccatgagccaccattttccccacgatccctccagcctgaacgatcacatcctactgtggaccacgactctcccagcagcgggcgtttaatatccagttagcaggttctcaccaccccctcgctggctcgaatacagcatctgcaccgagttcccgagaatcgtcaacccagcaaatcccttaattggtggacatgaaaatccagggctttgtgctgtaataacagagtcctgggggcctggggagtttgtgccgcttggagctcaggtttctgggacagaggctgagcgcagggcagggaggcaggtctcacctggcacctcccagagtcctcgccgagcagatggaagcagaggctctcgcgcccggcccccgccgggagacctctctctctttccctcggcctgctctgccctctcccgccttctccctgtctgatccttctctgctgtcatgttctttgtcctcgcgccacatgctgtgattacacgccaagagtcgccctacagcgacagctaaagcacgacccgccgggcagattctcaattctcccggcctcccgacccgccgggccttctcctgggccgggggcatcttgaaagctgaacaactggcctctgaaggctggcaggcagctgtcctcacgcatgccacagccacgggcatgcatttaattgctgggagggactgtggaggccatgcagcctgcctccctccccgcccccatcttactcacaagaggaaactgaggcccagaaaggcaaagagatgggcctgaggacatgtgggcaggagggagacgtggtggagcggataaaagcatggatgctggagccagacggcctgagattaaagcccagctccagcatttcctagctgtgcagcctcagcttttctgggcctcagtttcctcatccataaaatgggtataataatggtctctaccccttaggggctgtttgagggctgaatgagctaatacacttatgaagcactgagaacaggcccagcagaatcaacagccataaatactgttttaccccacgttcaattcagcgcccttccttgggctgtggctggacaaggttgcagcgtgcatcaaaccccgcctgctggggtccacagcccatcccagggagagcactgaggacgccaccagcccagcccactcgccggcagctgcaggacgatagcctgggtccctctggggccttcgccaactactctgcctgagttaggccatgcctcagggcctgcggctctcacgagcccattcgctccagaacaaggtgcgtgtgcagccccaaagtccaaaaaggggatccagctgcaagccaagcagagccaagatgctcagggcgcagggggttggcacccactctccggagagcccgagtgagcaagccacaggggccccgtggggcgttttcagtctctgccagtccagcatttggttaggacgcagcgaggacacgggaggcacaagggcagcggagaagagggcaggaacctgtgtggccgggcccaatggcagaggcatggctagtacctcccaggttgggccatccaaggggttccagcctctaccctggtcagcagccaccatatcatgaggtcatccaagcagccttgtgcagaggcccactttggagacaggaaaccatgcgcctaccgtgggagggagccgcctctgaagcagagccttggaagcagatccccctgcccgaccccaggccagcctgcaggtgactccagccccagctgatgtccaactccaactccgagagaaaccccaaggcagaagtgcctggtggcgccacccctggaatcctgacccacagaaactgtaaaagatcatcagtgatgactgtggttgtaagccacaaggtttgggagtgattcgttatgcagcactagataattaatacaacacagaattatgcaaatttgtcaagagacaagacttcaaggcaggtgataacattgaatctcgactaaaatcctggtatagcaaaagcacaaaattatggacagaaataaaggaaatcataattcataaaaatcctccaaggaaaaacaagagcctctgagtgtccccagcttttaacgagcagctcctgatcctccgggggctctgtgacctcgtcaccaaacagtccaggatgcctgaacgtttccccgatcctgtgcgactctgactttctgagactggaatttccagccctcaccgggttcggtaaatgccctgggtccccaaaacacacatgagaactctgaaccgggctttcagcaaaaaacaactttcagaaacctggaggagaaaaaagctttgaagtcagtctaccccagtgagaggcaggtcggtggcaaattgatctaaagcagtcatgaaaacacagcaacccagccgggcgcggtggctcacgcctgtaatcccagcactttgggagaccgaggcggctggatcacgaggtcaagagatccagaccctcctggccaacatggtgaaaccccgtctctactgaaaatacaaacattaactgggcatggtggtgcacgcctgtagtcccagctactcgagaggctgaggcaggagaatcacttgaacccaggaggcagaggttgcagtgggctgaaatcgtgccactgcactacagcctgggtgacagagtgagcctctgtctcaaaaaaaaaaaaaagaaaagaaaacatagcaactcacaggataaccccggctgtggcacccggcaccatctgtgccatctaagaccctacacagggctctgcatgtgggtggcaaacctggggactgtgaggtttctggcaaaataatgctggcatgctgtggtgggcgtgtcctgctcagataacgtgaatctattccgctttgcttccagagctcctgaaatcaagagtggcaatgataagcttggaagcaacactaaccccgtgcacatgctctccatcctcccaccccatcactggacaccacctataacctgaagtgggctgacaccctgaaaaccacgtccatgcaccttggttttgcccacggtgaccaggtaggagggaacttgagttttacattcttctagggttttctctttctggagcattgcatatcgtttttagaggaaaataacaaaaatggaatccttgaaagtcactggggcctcttagccccaactaattaagaggcaggttagacggcgctccgatgcaaggtaacttctcatctggcatttaagacactcaccccatccctgtgggcctcggtttagccacctacagaggggatatgagtaataattatctcctttggagagctgctgtgagggttaattaactcgtgcctggaactgcttggagctgctggtggccggggtttggagggtgtgaacgtcaccatccagagtgctgttctcagaggagccgtcacctgcctgctgtcaagagggcctcttgtgtccccagctaattgggacctgggacaagccacagggcttctgcaggcctcggatgtcctccccagtaaaggttcagaactgacagcctggaagatcatgtccagctctaaggctttgtggaggtgatgctgagagaggccgtttgcatcgtgggttcatttgcttcttgacaattttgggtccctgctgaagtgactttagagcagggagagccgttcatctcaaacttccccgcaacccatcagagacatggggcggcagaggcagctctgaccggcccaggcactggagcaaacccagatggga

SEQ ID NO: 1886453 - DNA, 4001 bp, Homo sapiens
ccatatcctggggagacagagccagagggacatgaggagggggaatggggcgtcaagcagagacagagacagagggtgggaagtggacactgggacaggtgtggggcggcctcgcctctggcttctggggcttctcagcccctccaaagcctgggaagagagatgggcagatgaaggggccccacctccccgccctgggctccctgctccacagccacaccgagctgaggcaggggtgaggcccaggtgcccctgtccccttaccaagccagacatcagaactcctcaccgtcccctcctgcccacttcccgtgagacacccacctgttctgccctctctgaggcctgggagcctggagaagaccctggaaacaccgatctggctgcattccctcccccacagtatcaggcaaagattaggcacccccaagcccctcccattccttacccgcttcccccagcctcacctggctgggctgcagcacctgcgaaggtcctgaaccctggggcgagaaggcaggagggagtcaggaggagggaggcaggcaggggctgggcgagcctcacctaggttttggggtttcatgcccccttcagtgtctgggaaagagagggggatcagatgaggggctcaggaatccccatcccagggatacccctagaatcctggcttccagctcccccactcccatctctacctgctccatagccattcttagtggaagggctcgtgggagagagagaggtgagctgaggaggtttggggtcccagctgaggtgggggtacaagacccttgaacccccccttggactaagccagacaccagcaaacctgagaggctctctgcgcctccccccaacaatctctccaatcctgcctcttccgtctgaggcctgggagggagggaaggaggggaccccacggctctcacctggctgggttcccagcccatgcctgaccacgaatcctggagagacagatgaggtgaggtgaggagtgtgagagaaagagggggagacaaagagctggggccggggcagggctcacctggcttctgtggcttcacgcccccatcatagcctggagagacagggaggtgagggacacccctcccccaggatctccccagagccccacacctggcccacagcctatccaagcagtgggcctgtgggaactcagtcccttcccatgatgggggagggctgtggggcacaggtgggtgctatcagcctccttccctccctccttccctctctccttcctttctgctctctttcctttcttccctccccgctccatttcttcctgcctgccttcccctctccccagccagggtgcctgggggacactctggggctatgctctgtccccatgtatttctgagacgactgcttccccctttacctgccccccgcccagctttccctgttcctgtcctgcctcccccctgccccgtgccctgccctcagacgcctcccttccctatgccaggcctcacctgctcccaggccactgtgggggccatagactgtgggagaagtgagatgttgagcccggggtgctggagcagctgggagccggtgtgccaccctccccaagcaccccgccaccagctttaccagatctgtagccatttgggctccctaagcctgtggggttcagggggaagcaggggaacttacaaggggacaaaggggcccaaatctggatgccacctccctttccaggtctcagtttccctgctgtcacaggagggtagagggcagaggaggtgagcagtctggggctagggcagtggaggctagagggcccctgggcctggaggaaggtgtctgagccagggctctgggggactgtggggcagagcccactccaccctcttcctctcctctcccatccattctcagtactgggctcctctcccttcatggaaatctcctcctcttcttctcaccacctctgccccccatctttctctcctgaagctcagatgcatcagggctcaggggcagcccctccttctacccttaggaccccccaggtccctgaagtaaagactcttccatgacactccacctcctgcccctcagcaggctcagttctccttgtcccctccctcctctccccctccggccccctttggcctgccggtgggtccgcccctcctgtcacacctgcccacccttctcagcctgcccaggcccgtcctcagggctgcatgttctgccccgggagactcttctgagagtgcagggtgtctgtgctccccacccttgagtggacacttgatgagactccctgcccggaagacagcaagggccctgagctctcctgggccccgcatcgggagtcccagagagctcccacacccccagggcaggagagatgggagactcttcctgaccccagtgccagagggcccacctacctttccccaggccaggaggcagaaggggcagccctgcggaagcaagacagtgctgactcaaggctggggaccccagaggctgagatggggcagcgcccaggcatctatcctccagcccccaaaaaccctcactgtctgaattctctgcccagaccaggctttccacaccccagccctccttgtctccagaaccccagcatctggccagggccccacttggacccccagccccagtcacagatgcccattctccaacccccagccccaagctgccctcaccaccttgcaggctctcggaagtcaggcagagaaggaaaagggctgcggggaaggcccaggcgcccatgactctaggcagagtgggagggcccacgccctttgggcctttaaacacccctggctgggtggggaccctcgcccaggccccccagctgtgagaggcagaggctctgcctgcagaccctggggggtcacccccacctccccctgtggcaggagtctagctctggcccctcatccatcatgggcgctgacagcaggacaggccccctagacttctccgcccctgtcagcgactcaggccctggcgccaggcccagagggctcagatgtccccccagcaaggggcaggcaggcaccctaggcccagcccaaacacagctggggagagggcgggaaccagggctttggagtgttgcagacagcaggggtgggggtgacagcatctcagaccctgtctgacaggcgggtggtgttcccaacaaaagccaggtgtcatcccgtctagtcctgagaccacacagaccccaccagggggccctttgtcctcatggaggctcagcctgccagagtgggccagagcccccaacttcagagccaccccttcctcctccctcctccttccatgaggggcagggacacaggaggacgggccagctgtgcccagcctctctgagagtccgcggaggccttccagctctgcctcgtctcctgccccagcagtgactctaactttgggtcacagactaggggagccaccacacagtgttggggggcaggaccgcaggagaggctgaggagaggacgtggggggctgcgagcagctctccatgcctggggctgggtggatggacttggagccggggccctgtgctgggggcctggcagggaggcactgggcatgggggtctggacaacaggcatcacgccccaatgagcctgcagaccccaccaggctggctggggacggcagtgactcaacccctagcccctgcaccctggtccagaaggccccacaccctgtctgtctgctggcctgtccctggcccagccagcccctcctggtacctctggctaaggagtccagcctgccaagccagtcagcccagctaggctgggggtctgcagaagggctataatgaggaaggggcagcaggggcttctccgagagaggctactgagcccacacctctgcggccaggtccagccgccaatagactacagggttaattaccaccaggtaccctcactcataggccagcccagcactgaggtccctgtgccccctcc

SEQ ID NO: 1886454 - DNA, 4001 bp, Homo sapiens
atttcattgcataagatccttgttcactcactggctttgttttccaaccaaatgcctttgacttaataaatgctctgggcaattagcagacagggggccccccatgaaatcatcagagctgagatcactcgagagggtatcagacagtcaggacattaattgcattattttatttccagataaaagttattttggtggagccaggcttgccagagaagaagctgataagatcagatgccgtctctcactgccagatatcctattaggggtctcagcagacaggggattgggtgacagtccagatctgcatggacagcaggagtttgtttcaggccagaggaaaagcccagggtgcctgaggagttcccttatgccatggagaagcaaagtgggctatgcaggccctctgggggctttagataaagcgagtacgcttctgatggccctagccacagcaatggctttcacaggaaagaaaaaaaaattctcttctctttctttttcaagagagggactcttggttccttagtaaacatagatgcctggactcggtgcgcagcctaaggtctctctctcttggcagtggcccaaaacgctctcccaagcaaaagggaaaagaagacagaggggggttggggattgtgtcaggtagtgagctgtttcctggagaagcctgcgtctggttccagagggaagtgagtttctaagagaaggcatctgtaggaattttgcccatcagccgtgacaccagcactgctgttggagggatgaacagctcatgacaaagtcctgtctcctctctccccttccccgtgtctgtgcaatatcattagaactggcagacccttattaaaaacagttggccactgagaggctatatcctgtgtgagacagaagcccagatggtaggtggtcttacttttggggtggggtgttccaggtggtaacagcctcgagggcgggaggaccatgccgcctgtttcttggcatccgtaggtggttcctgcctccttccctttggcaggtgtgtgggaaggattgagtgtgaagggatgctcacaagcactgagaagatggcctggcacttgtgaaatgacagaggtggcctgggaggtgtcccggaccctggatttaatgtgcaacacatggttcagtcggtcccaatgttgggactgtagagaacgtaccagaagcctcacagatactcaaggagtcgtgattattaggactgggctgagttagctctatctagtactttgtaattttaaagacctactcaagcaatattacaatataaacgggatcacatggactacctttctacttcaaacaactccagaggcatcctgctgtggataacagaagctgattctctttctctctccgcctcctcctcgtcttccacctccctcataaagcatcccccagcactgacagggtaccgtcataatgatggttatattgaactatgtgagtgcctactctttgctaaccaaactaaattattagttgcatcatttcatctcaacttcacacagttattatattttttcctttttcttttattatggcaaagtctagttaatgtaaaccttgccattttaacttttttaaagtgaatatttcagtggcattgggtccattcgcattatcgcaccaccatcgccaccgtccaatttcaaaactgtttccatcctgcagaactggcacttagtattcattacacgaccccctcctgcagccacgctgggagctgaccctctccacccatgcttcgtgcactcaggcgctcatccagggatcatcctgtacctcagactctgccaagaactgtccggccccagggcctttgcaagcgcaggtcgcacggcctgggatgccctctcccagctcaccacatggctggctctttcccattcattggcctcagcccagtggcctccttctcgtcagagaggccgcccctgcctgccctggctggccggcccctcccccacaatgactctatgacatcatcgtgttccttctcctcggagccctcagaccctctgaaatcctctggtctgtgttttgtttcctccgtctctatctctctccccactagaaggcaggtctcaggagggcaaggacccggcctgtccagcttccagccgtagccccagggccgggtgtgcagtagatactcaacaagccttctttcctcccaccagcctttcctccacaaggggagacaggacttgggggtgtttttgggggtctaaacaacacaaaggaaagagacgctgaagtgggtgagctggcctcgcactgcacttcctgctggagttcaaagtcagccctgcccctggaactgccatggccagtttagattgttccagaatcccgctgcaggctgttcaaaaggctcccagctgctatcaggaaatagctcaggaaggtccctgttaaacaccacccccatccccgtaaccctgagcagccctccgccacctgctattttctatctctgagaatttgctgacattaggcaagtcatgtctgtggaattatacaatgtttgtccttttatgagtggtttgtttcactcggcaccatatcctcaaggctcactcatgtcatagcaggtgtcagaacttccttcctttttaaggctgaataatattccactgtatggatggaccacgttttgtttatccattctcctgtcaatgaacattttcgttgctctcagcatttggctgttaggaatagcgctctgaggacatttgtgcacacgtgtttgcatggatttaattgtttttccttttcttgcctgttcttgggtgtcgtggccaagaagccactgccgagtccaacattgtgaagctttccccctatgttttcttctaagagttttgtagtttttttacatttagttattatggtaatgcctttgatcctttttgagttaattttttgtatctggtgtaagagaagggctcaacttcattcttctgcgtgtggtatttggttttccaaataccattttttgaaaagactgccctttccccactgaagggtcttggctcaagacacttgaatgtcaaataagtcaaagggcttctttctgggctctgtgttctgtcccattggtctatctgtctgtatgtaggtcaggaccacagtgttttgattgtcatagttttctagtaacttttgaaatcagaaagtgtatgacttccaacttcctggtttgtatttttacattttatattttgtccccattttacagatgagacaaaggaagctcagagaggggaactgacttccgaggtcacagaacaagcaagggtgggacaggatttgaacccaggcttgtttgaccccagcccctttcaacaaacatttctgtctcagcttggatcacagagcaagaaagttacagcccttcccagcccccttcctgtcctgctgatgaattcagctggggtggcagcctcgacacatctcaaaggctctgatacggtttggctgtgtccccacccaaatttcaccttgaattgtaataatcccagcatgtcaagggcagggccaagtggagatcattgaatcatggaggtggtttcccccatgctgttctcatggtagtgagtaagtctcacgtgatttgatggttttttaaatgggaattccctgtcacaagctctcctgcctgccaccatgtaagacctgcctttgcctctcctttgtcctctgccatgagtgtgaggcctccccagccatgtggaactgtgagtccattaaacctccttctttataaattccccattctcaggtatgtctttattagtagcgtgagaacagatgaggctcactggactagctggtgggggaggagaaagcagcccatgttccctctctcaagcaggaccattttgttttcctcagtttccctcttccacttccacttggggacccccacagccatggccagagagagggagcttggggtcccagtgcct

SEQ ID NO: 1886455 - DNA, 4001 bp, Homo sapiens
taaaactagaagctaaatacataagagcatctctctggttttgtgcttcaaatatttatacacgtgtttccaaatgctccagcattagcattagggaaatataatttacagaaggaaatatctacatattgctcctgtcaacttctgggtattttccccacaatcgtttgaaatcacttgaaattagtcttgtcagcatccaaccttgaccctaggacagggtttcttctccttagcactatggacattgtggactgcataattctttgttgtggcagtggctgtcctgggcattgtaggatatttagcagcatctttagcctctacccataataagtcactagcatttctataggtgccagtagcatgtctctagatattgccagatgtccccggaagaacaaaaatttctgacacaaaataatgactaaagacatgacatcagagatctatggcacaataaagagagctccaacatgtatagtgactggtagcttatggcgtggggagggatgacagaaaaagaaattaaaatacatgattagaagattcctgaattaaaggaaagaaacacttaattgagaatagaaaggcctgttcacatcctgaagaaacaccaagatgtagtttggtaataaacttcaaggattaaaacaaaacaaaacaaagatacaaaggagaaaaatattctgcctcagacttaaccaaataaatgcgataagattatcaaaaaaaatttctgtttatttgggtgagttaccaaaatgaggcattcttctttgcttaagaagtggggcccatgacacagggggagactctactttgttagatcgctgctcaaattctggaccacaaacttgggcattggtggtcgttttctattcctagtggatacccccagtggattcactcattagaggttgtctgaatgcgtattatttcccaggagcatgtcaattaccccactctcttaccaacaatgcttttatatatggccggaagtgtccatttttatcttcaataaattttaatatttactaagcttgtatcttcactcgttaggaaagagcaggcttttgttgattaattgcgcattccttcttcttatatattgcctcagtgcatgttgcccattttcctaccattttctttattttttaagttggactgcagttgctctttgtgaactgtcagatgcgttgagagaatgggcttctccggagtgtattttatcttttgaatttgtttctggtgttttgctgaaccaaaggttttcatttgaacgcgttcaaatccttcagacttctccttcacagcctccgggtatctcatcttccttggaaaggtctttatatcactctgggattatgatattcttatactttcagtattaacatggctgaaccgcaaccgatgacaggaaatcggatgcttctgacccagtgagcagaagaaccctgggaaaaggatgacatttttttcaaagggctaaaaatataaaacatacagaccaaacagcagaaaactgaaaatccaaggtctaaggcagcgcttcttgcctacttgtaatttgtgaactgatagaaaggacacagaaacataccttaaggtccactatcagttatgctgccttatggtatattatgcatgcgtgtctgcacatgtatatacacaaagttggcaagttaatgatgtaaataggctcttctacatgcctagaaagagaagaaactctgactaagcccataattctttccaatttggcattcttctaagtacccaataccaacatcccatggtattcatcatcaactgggactctcagattaaacttttttgattctgaaattttataaccatctactctattcccccttctttccccaatagtctagtaaaagcccaaaatagagacttttctaaactactgctcctgatctcaaccccctaccctacctccctggattaagttcctcttgattgatggagtttggttgtctggattctgcaagctcagctgtcccaatttatagtctggctccaagccccacccactgctgaatgaccaggggcagtgtgatgttgaacctaaaggtctctattgtgacatacgtagctggtacaaaagaatgtttgcttgccctcttgaaggtcttgaacactgctggaagcctactagatatttaatgtaatcaccatgataatggctaagatttattaagcatctgctatgtgctttatggtgctaagaacttctcatgtatttactcattgaatcttcacaaaaaccttatgaagtaggtaaaattattatattatcattccccaatttagagtataagttaatgaaagtcccaaataaaaataactcaaaaagccttttccaaaaaaagggagaggatccatttgatccattgtaagaaattctgtgatagttatttatgttaaacttggctaccccaagcaatgaatgacacagtgataaaacagactcttgtctggagcttttcaaactgtaaatgattaataatgttcatttcttactaaatgccttgaagaaagcagtgccccttcatgagggagataaggtatacatagaaaggagcagagagtggaataaaaggcagggtaaatcactttaacacttgcaaataagagaattcaccaaggagggcttggaggctgttaagatttcctctaagacaagtctcaccttacatcaccactgggtatttcctaaggcagggatttcacccattccatctttggactagcagtgtctgtctcaggggaatgaagaagagtgggagggatgatcccatctctagtcttcacatggactagaaataagtgttgtgacataagagcttgtgaaatttctttaattcccccaatattatcactgtttggttcatgttcttatactatgctaattttcctataggaaaaaacagtaagacactcaaaagaaaccatttgctggttttgagaggcaatagaaagggtcaggtagataattctgtatctagtgccttcattttctgttactacataatgaatgactacaaacttagtggtttaacaccataaattcattatctcacaggttttgtgggtcaggagcctgacatgttttagctgggtacccacaaagctgaaaacaagatgttggtcatttacataatcatctggagaccaaccagataaatgtccaccaccaagctcccccagattgttggaataatttattttcttgtgactgtatgactgaggtttccattttcttgctagttgttggccagggacttctctcagcagctagaggttgctctcaggctcttgtcacttggccctttgcacaggtagtttagcatgtgactgtttaatccttcaagacaagcagaatttctgtttctttctttataaatgtcctggcctttgaagaactcatttgattagatgagacccatccatgataatctttcttgtgattaactcaaaatcaacttctctgggaccttaattacgtccacagaatcccttcacctttatcatagtatgcaacctaatcatgagagtaaacagcgcgaacactaggggggcaagaattgtgagaggcatctcaaaattctgcctaccatggctgtggacccagaactttattagggattagaggatgcaccatgagaaagcaactcaaatccttgaggaatgcagagagaaggcataaggacataagggaggtggtggcctggaatgagacagacaaaactgtgtttgcctgccaaaggtgtccctgctgtatctggaatgcttcactagaagcagaaggaggagggagctgcaggaaaagttgaatatttataactttcagactaaggttttcttctatatctggccactcatcctaagaagaggaaccacatcactggctgagcccagacctaggagggcaggttatcttatcttgcattgcaactctgatcaactgatagagtctg

SEQ ID NO: 1886456 - DNA, 4001 bp, Homo sapiens
ccaaggtgacaggatgtcacttcagtgattgcattagataagactgcaatgtcctcttgctagtggactctctctctcgcaggctttgatgaagcaggtgagcatgttggggaggccctcagttcaacgggctgcaaggactgaattcattcaactctgtggtcttggaagtgggtccttctctagtcaaggcttgagataagattttgtggatgacactttgattgtagctttcagaggggatcctgaagcagagaacccagcaatgttattcctggacgcccagcccacagaaactatgaagtgataaatgcatatttttctaagctgtgaaatttgttacagagcagtggataaggaatacaccctgctgcatttagccatttagccattcttacataaacccaccgtacatatgattcatttagttccagtataaacttctcactaaagaccctgtattagtccgttctcacactgctataaataactacttgatgctgggtaatttctgaagaaaagaggtttaattgcctcacagttccgcaggctgtgcaggaagcatggctggggaggccacaggaagcttacaatcatggcggaagggtgaagtggaagcaagcaccttcttcacatggcagagcgggagagcaagagtgaagggggaagtgctacacacatttaaacaaccagatctcctgagaactcactcactatcatgagaatagcaagggggaaatccacctccatgatccagtcgcctcctatcaggtccctcccccaacactgggaattacaattcaacatgagatttgggtggggacacagagccaaaccatatccaaaccctattagacccacacttctttccctccctccttcccttcctccctccctccctcccttccttccttctttcttttcttctgttaggaaagattatgaaagactttcaaataggaaaaaaaaaaattactgggttttttgtccggtacacttttccaggttattgcctttcatcgtctttgagctattttacaactctgtaagttgaagaaaacttagattaatgcaaattattcttgcccatgggagtacaaatgattatgtccaatggaatgcagtctatctttaccctgcggatagaccagttttatttctgtatgtaagttgatttcagcattccttattggctttattgtgggattctctgaatactcctttcagtgggttgtaacattggacaggttctatcataaactaacgagttaaataaaacctttgatacatattcattttatatgagtaaagagttatgatttttaccttaaaaaacgatcttttaacattttcttcctccttcccttccctccttcctgttaacattgaataattactatgtgccaaatttggttctattaccttttcaagacttatttcttttgactttcacaaaaacttagagtaggcagtatattaccttattttatttacaaatgagaaaattgtgactcagggaggttaagaaactaactctgcttgtaggagagcactgactcatccaggactgctgactctgaaccacctggcctgggactgaggagtttccaggacacaggacttttagtactaaaacgacgagagtcctgggcaagccaggatgagcctatcaccctgcatagctccagaaagcccaggaaatggactcaccatgtttagcttcagatgtcctgtcttatctcccaagccctgcccagtacatgctgctgttttgcttcagggctgttgtcaccaagttcttagtgctgtgtctgcaaatgccccggatgactttcactcttccctatgctttgcaaaatattggctgctttatgtagtgctctagggagggctgttctagctcctgcccaatgccctgtgtctataggcctttccctgctcagccagcaaaagccaaaggcagagttttgttgcttccttccctgtgaagattcacttcctgcccagagtctgatctgaaagcaaaagactcttgttcagcacagcttcctgcgtaacaacattaaacatccccttggcaaccattatacaggaatattataagataactgtgctttctatgccctaggctacaagaccacattgcaaagttttgtgaagtctccttaagtgttgggggatacacagatttcctaaacatcccaaataacctctggatgggctgagagaaataggccccagctgtttctcttatctttgaggaagaggaatggtggatatttctatgcactgcagaatcctatggaagtcacttggctgaaaaaccgggtttccctcatatcatagactgtaactgctctgatccagaaagtggctggaaatttgctgttaacttcaaaggttaacaggattagactcccaccgatgaaattcaaagaaatgctttcagaagtaagcaaacagacaaaattaatcaaccctttaacaacagattttctggattcaagggtgatgacttcaaaaacaattcagttaattctttttttttttttgacagtctcactccgtcgcccaggctggagagcagtggtgcgatcttggctcactgcaacctctgcctctgaggttcaagcgattctcctgcctcagcctcctgagtagctgggattataggcagctgccaccatgcctggctaatttttgtatttttagtagagacagggtttcgctatgttggtcaggctggtaattcttaaaagtctgttgcattaatagtgaactcaactttttaaaaaaacagaaagttttagtgttaaaaaatgatatttggggataaattttgcttatcaattcactgttttccagtgacaaaaaagtgcttagaaatcaacattaagataactttttttttctgattataaaaataatatatactacttataggaaatttggaaaacacagaatagagaagaaaataaaaatttttcataatttcataacctgaagatggatatctactagaaaaaattgagatctgactgtaaataattcattgggttttgctttttagccttgaccttgaatttagctcaagatcaccacgtcccaacatgacttttaatggttgcccggtagtgttttgtggatttgccataatttacctaaccaatctcttattgttggacatttacattgtttcgaatcttttgcttgtaagtaacactgaatttactgaggcagatacacccagtgcatcttaggtccctaggaggtccttagcaatccctagaagggggattgctgggtggtctgaggttttgattgtgaacatcagagactctaccagtcaccttgaagacagtaggatttattcgaaggattcttgacctgggaggcgccttgaaaccagggcgctcagggactgcagctccgttcctggcccagagtcaaccttccaggattggcttggcgaaaatagggcggagccgagcaggaggacgaggcgtggacactgcggcagggccacccggtgcagggagggatggtgtggtgcactgtgaccctcacaaatccaaagatccggcggccaaggtcagccgctctcggagagccgagattcttggtgctggctgggctgctggagacagcgggtaccccgttccttcgggaaggtgggggactaggtccctggctctctctaccccatcagagcctggtgcgacggaggagcgtagcgagagcccaggcaggttgtagggccagaccaggttctctgtcaaggtccagaacccccagaacctgcggtccattgattgccaggatgcccggccgcggagctcgcagacaccggccctggctgagcatttattgacacagcgcgccccctagtggtcatttcccattaccaacccaacagccgcggacgatgctccttggttcagcctctagccccccaggtctgggaagtctgtagattcgcattgtcctgggacccaggaggc

SEQ ID NO: 1886457 - DNA, 4001 bp, Homo sapiens
ctgaagacagtagtctcgatgggtaggacttaaatccaatgtaggaactagaaaaacagaccatctagctgggtttccaagcttttttgtgggctgcaatacacttggatcaaaggaaatctttcttgaaggttaaatatgtaaaacagttaaaaagtagtggccggtctggcattagttgggagaggggggagggggtaggagggaaggagggaggtctatgcctatgaagctcctgaaataagaaacctgggccgggcgcggtggctcacgcctgtaatcccagcactttgggaggccgaagcgggcggatcacgaggtcaggagagcgagaccatcctggctaacatggtgaaaccccgtctctactaaaaatacaaaaaattagccgggcgtgaaaattagccgggcgtggtggcgggcgcctgtaatcccagctactcggaaggctgaggcaggagactggcgtgaactcgcgaggcggagcttgcagtgagcggagatggcgccactgcactccagcctggacgacagagcgagactccgtctcaaaaaagaagaaagaaaccagatgcatgtgccttctttgagccaaaccattacctctctggctcacagcatgttactagatttgttcaaaaggaaaaaacagaagtttcagcaaccgtactctagggttctgagggggcagagtttgagaatccttgctctagcccgcctctgctgattataagggagaaaacggcagtgctgctgttaggctgatgtatctgttcctttcacagctttggtcataactggtaattaccatttacttgttctcagcctccttggaacagcgatcttgcctgacacgtgcaccctcgcacgtggcacagtaagtgggacacattaggcactcggaaaatatttgctgtaaacatgaaagaagggcgacaggctaataaagtgtggaagggttttggggtcagcacagccccgggacgtcccatccccgtgggccgcgggccgcccggaatacgacgactccacttgccggcgctgctcccgggataccagcgacaacagcggctcagtcccggcaaacggcgcgtggcccctccggcgaaaagcagctataggctgttgcggctgccaatcagaccaacagagccgcgactcggagacctctgggagacgtgggcccccgctaatccgccctccaattggctcgcgtgctcccggggcgctctgggagatgtgtttctgggagtgttccgcgcatgtgcatgcgtgagggcggggcgtcggggtcgggctggagtgtctgtcgcgccttatgtgggcccctcggcagaagacgcactttcggcagaagccgcacttttggcagaagccgccctgggtcctttccctcccgcaggcaggccgggaccccggcgggaattgcgtgcaggtcgggtctcgcttgaccccagcgcctccccgcgtccgggcacactgcggacagttcctttttattctctaccgctacttcctctttatcttctgccgctctttccacacgtctcctcccccaggccgcttccctttggggcgccgggccagggaggggctgccggaccggagaccccggactcgcgccggtctccgctcgggcgtggggtccgtggggcgtcggcgggaggggtcctggaggagacggctgtgccggggcgggaccccctgtcctcttaacagacgcgcccctgacagtcgtgccagtcgccgccctgggctttggggacgtccgaggacgcagctggcggttcctcccgcggttcccggcactgttacttccccgaattcccagaacaacccatttgataggaaatggaaactgagaaaaatcgagtaatttactcacgtcacacggccaccagatatttgaatctcgtatttcccaccacttcgtggcttccaggctcataaacaagaagttgcaaaacagggtgaggcgtgggaatgacagcagcacggggcggggagtggaagggcggagcaccttagagggcaggattcagcaaacggaacctcaaaggaaacagtgtcagtgctgctgcttagttggtaagaaaacaaagggccgggcgcggtggctcacgcctgtaatcccaccactttgggaggccgaggcggtcggatcgcgaggtcaggagttcgagaccagcctgaccaatatggtgaaaccctgtctctactaaaaaatacaaaaattagccgggcgtggtggcgcgcgcctgtagtcccagctactcaggaggctgaggcaggagaatcgcttgaaccccggaggcacatgtagtgagctaagatcgcgccactgcactccagcatgggcgacagagtgagactgcgtctcaaaaaacaaacaaacaaaaaaagggagtagctgccttccagacacagttttgttatttttctgcccctttcactagcctgtcagccctttggtggccggggattgcgtgtccaaagcctggctgctagtcaggttcctataaatattggtaggacagagcgtattaaagtttttattttaagatttttaagcacaagaaagttgagagagtaacatgaatactcacgtactctccacctagatttaataatcagaaaaaattatgtgtgtaggcctttattttttacaaaccctcttgtttaacgttaccgccttccaaatgaagctcattggtgagtggtgtggggatctattcagagccccatgactgcagcccttcagcagggttaaggccacctgccacaccccactttgggaagctggcttcctctcctctccctccgtttccaagctgctcaggaggtgccctcagaaagatcagttacaattagtgttatctgcgtaggggactgggcagcagatctcattgatctgggctgggatcggcaggtgggttggtccaagttgagagggagatcctgcagaagctcttagctgctgcaggattcaacactaactccttaaggtagcaacaagggccctttgtaaaatctggccagaaacaggtatcttagatgcatcttcacacccgccagtatccagtctacccttatcatgtcagccctgctttcagaatcacccagaatctgacccttctgcctccacagtggttcagggccctgcagtcgctttcctgcattgtgacaatagattgctttctcctctctgtttccacctttctcatctcttgtctcttatggaagccagagtgttctcttttcttttctttctttttttgaaacagtctcactctttcacccaggccagagtacagtggtgcgatcacaggtcactgcaacctccgcctcccaggttcaggtgattcacctcagcctccagagtagctgggactacgcgcacatcaccaccacactcagcaaatttttgtattttcagtagagacgggctttcaccatgttggccaggcttatctcgaacttctgacctcaggtgatccaccttccttggcttcccaaagtgctggattatatgtgtgagccaccgcgcccggcccagaatgtttcttttaaagcgtaactccaattatgtcactgctctgctcaaactttccagtgtcccctcatctcagagtaagagccaagtccttgctgtgtcctgggagccctgctacttgataggggactccagctccctctctaacccctccatccactcctcctccgtgcctctgctccagccaccactcttcctcaaacactaagcacaaagttaccccttttgcactctgtaaataggcaaagactgctcatcctcaaaatgaatacctggcttactcctcttcctttgggtctctgttcaagcacaaaagccttcttcaagtgccctattaaaatatgaaaccagggggcacggtggctcatgcctgtaatcacagcactttgggaggccaaggcggttggatcacttgaggtcagttgtttgagactggcctggccaacat

SEQ ID NO: 1886458 - DNA, 4001 bp, Homo sapiens
cagaagaaatttaacacattatataaataccccaatacgcaaatggtggtagtaataattagttttctcccctttcatctccgttgtttctgcccacacgcatttcctatttcgagctttggtgtaacaaatgcatcttttaaactggaagcccacgccttgtttttgcacaaacacaggtctctttatcgccacgtgcagtctctccagctcagggagccgaacaatgaggcattttcttctctccctggctgcagagctctgacagaattcatttaatttccatgtaaagtgtaatcggcggataataataggtcactcacagcaatatcattctgctcgccctgatcacccatcattgtgctaattgcgggataatgtaatatacagccaaggcacacacatagaattagactgagcatttgtttttgtgatgctatgaacaggatataagagagagtgtcatgtcagcaaatatcatagacatagccccagtcttcctaaaatgactcaggaaataaaagtaaagattcttgtatacagaggatctttggtattcttgatgtcacctgcaaaatccacaggacttaggtgatttttctgggcacagctagaccacgtaaatgctctgtcatccctgatgtcccagttttttggctccttgggacagaagcttagagcagccaaatgattgcttgggcaggtgacaatcacctgctaattggctgtgctcattttaaaatatttcaaaaatattgatcataaaccttagattcttctttctaagcccaaagaccctcaaagcagcagaggccttttctgtatagaattgctatcctggccaggcacggtggctcacgcctataatcccagcactttgggaggccgaggcaggcggatcacgaggtcaggagatccagaccatcctggctaacaaggtgaaaccccgtctctactaaaaatacaaaaaattagctgggcaaggtggcgggcgcctgtagtcccagttagtcgggaggctgaggcaggagaatggcgtgaacccgggggcggagcctgcagtgagccgagaccgcgccactgcactccagcctgggcgacagagtgagactccatctaaaaaaaaaaaaattgctttccttcctgtagaaacctaaattttcccatgcatgctgtttcttttttgtctctgtgttggcaaagtcaggagctatcatagcacatgggcgccaaaaaggtgggtcctaaagatggcctagcccaacacgttcatttaatttatttcatgattttttattcttgttacaaagacaattcatgtctattgtaagttatctggaaagagggaagaaaacagaagtgaacccaaccctccagagagccctgcagtgcagagaatgaaggtgaagccacagagaaaaataatttttctttctcagagagggacactaggaggggtggaaggatgtgtttgcaagaggtttgaaaactcatatctgagaatagtgtatgtccgtcttagcagtcagcatccctcatggatgttgtctaatcctcatgcgctgggtggggcctcccagcaactctcctgccaagaagcaaggcagcctactggtcagcacaaagcttggccagctccagcgcttcaagccagattttcaggctttggaagaagagaagagccagcccattccctgctctccttctctggtttttttggggtatgtgtgaagatggaaattatgctcatgacctgacagagacagaaagatagagaacttcacagacgctaggagatggaatcagatgagaaacagcctgtattaatctgttttcacactgctataaagataccacctgagactgggtaatttataaagaaaggaggtttaactgactcactgttccgcatggctgggaaagcctcaggaaacttacattcatggtggaagacgaaggggaagcaacacacttcttacgtggcagcagcagcgagcaagggatcgaaggggaagtgccacatttttaaaccatcagttctcgtgagaactcattcactatcacgagaacagcgtggcggaaaccacttccatattaaaatcacctcccaccaggtgcctccctcgacacgtgaggattacaacttgagatgagttttgggtggagacacagagccaaaccataccaaggtccaagggagaaagaaccagagaaagcagatggagctgagagacaagtgtaggggagaaacaaatacagcaccaggagtgagagagtgaggaagggataaaggaacaagacagaggcccagaatggtagggaacagagaaacagagggagagaggtacagagggagaggataatggaagggaagagagagagatgggcaatgagggatgaaaagagaaagagaaacccagagtgagacagaactaaatgaaactgacatgagtggcgtctatacaacaggctgagcccaacgttgtggcaggggtctggagggaggtgagtgtgaatgtgtgcatgtgcatgtgtttgtgcatgagggggcgctgttggtgctagaaggagccttagacaatgcacaggatttaaaagcttcctctggctgggcgccgtggctcacgcctgtaatcccagcactttgcggggcccaggcgggcggatcacctgaggtcaggagttccagaccagcctggccaatatggtgaaaccccgtctctaccaaaaatacaaaaattagctgggcgtggtgtcaggtgcctgtaatcccagctactcaggaggctgaggcaggagaattgcttgaacctgggaggctgagtttgcagtgagccgagatagcaccactgcactaaggtctgggtgacagagcaagactctgtctcaaaaaaaaagcttcctctgacttttgattcatacactcatgtctacccctagatactcagagcaccttgataagcctgaagaggagattgtgttctttattctttctctcttacctgaaaagcattacttcttcccatatttcaaccatttcgtcaacaatttggtgattccctggttcatgactctgcacactgagaagcatgaggtcattttggagggggctccaaccagaccaaatgtgatatgagctgagcagagggagtggggtttggtgagcgggaaagcagtgaacaccctctgttggttcagttcaggggtcaggcccagcttccccagggcactgagagctaactcagatttccagcactgaggtcacagatccaggaatggggacaaagagtgccaagcctgaggcttcaggtgagtggtcaatgactctccatccagggcgtcagcctataggtccataagtagaaactagcaggcatcagactgaagggacactggaccctgggctcaaagcccaggaccgaattctagaagccaacatagcagggggtggaggtgaagagaaagctctgttcatgagcaaagtggccctagggacactggattctgagaataaatggcagtggagggtccctaagatggaacaacagagttactcagtaaacgtagctaggcttccccatcctagatcacagtggccgacttgattcaaagcatcagaaggtggacagaggaagcagctgctaccctcctgcctgtgaaagttgtcttgagctctggtcaatggaagactcatttgtgaagaatggagagagagagaggagacattgtccctgtcctataggtgtgcccagtcacaagggagacatgagaaaacaccccccgacacacacacacacacacgcaaacacatctccaaacatgcttatgactaccattatgataatggagatacacaaaaaaaaggaataacaaattctacatccttgctactcaaagcatggtccacggacctgaagcatcagcatcacccggatgcttattcaaaatgcagtagcccaggccctgccacagctatagaagtaggatctgtgttttatcaa

SEQ ID NO: 1886459 - DNA, 4001 bp, Homo sapiens
atcagctacataatgctgatttcactgactttaaatgttcttgtgttgggtttttcccaaggagctaattaacacacatcaactaatttggcatcctagggtctccaggtactatttacaaactgctatttaactctcttaacaaaggagagcaagatacgaaacagttcttgtaagaggagaaggcggaatcctcttctgtctcctctccccatctttaaatggccccattttaaaatttttaactcttcccattaaaaaatttttttaaatctccccatttaaaaatatctgggtaagaggctgtggaggaaattaaagagtaggagccagaggtcccaggtgcagaaactctggggtatggcgagacccctgaggcaggcatgactagctttgagatctgggtaccagatgcccatctgctaccctgtctcatgaaagttggccaactagaactcagctggtcatgggggaggcagggtaagatgccaagaggagaacctggacatctgctggaagcaccggcatagactcttaaagagccagcgcaagaaatgtcctccaggtggagcctcagtttccccctctgtgaaacagggagactaagagtacttcataggattgtcatgacaatttaatgagataaaaatgcaaagttgccagcacagttcttggcatttcggaggaatctgataaatgtcataccgctgctgttttagtgttagggtggtgatccatagcggacacctccggctttcggaccattccattcaactcacaaccttggaaggaggcaagctccaggccatcggctccctgttcaacctctttgggcctcagttcccccatcggtgagatggaggttctctgctgctgcattatgggggtgggggtggtgtgggaagggtgccagggattgggcacaggaaagcacccccagcccaactgctgagctgccagaaacctggagagtatatgaggtgccactttagggcattccctgtttcgtttcagggttcctgtatggaacctgagaccaccaaaggcacgctgtggtgccgagacccagtgcctgcctctctcagtagcactgttccaaagccatcagctctttcctccccttcccatcccccacctctggacttagttcatgaatctccctcccctattcccttctcctctattgggcccacccagctccacatagttttagctcctggtaccctccagcacattctacagagaccccaggtctgtgctccacactcctgcctttcatctgggttcccagaagctgcagggacaacagagaccaccttgtgccccacccaccttcctgggtggacacccagatgctaggctctgagaccccttcctatggaagcacaaagtcccccctccgggctgggccgcccaccactgtgctgtccacaccttccggagggaggcaggtacctgtgggtagagctggggagccccagcgcaccatttcaggacttggagaaaataaaataacctggtcgcacctcagtttgcatatcagtgaagtgcgatgataaatagtaccttcctcccaaggtcaattgtgaggattaaaacagaatattcacaaaagtccgtagctctctagactataagcgcctgcttcattcgtagcaggtgctgtgactattatcatgattatttcaccctaaaacactttgaataggacagcggaaagacccttgacccctccggggacaatccaagagccccttggctaaaacagagccatgaagccccactaggctgggctttgagactaacctcaccaccaccctcaacctggtgacccagcacaggttcgctgtctcgctgtgtagccccgggtgtaatccatgtctggagatagaacactggagctcagtggggcctgagctttctggagtgagggtcaccgcagggcatgcactggaaatccagatccctgggccgctccctgggaagttctgatctaatatgtccaggctccttctgggatctgtttattaagcatcaggatgattcatatgactccgccgttggaacactggagcctgcgcgggtgtcaacgcttgttcacttgttacaggtgaggtcacccctttgtcacgcacctcgggccctgcgccctggtggtccagggctggtgcgggggcttaggtgcagcctctcccacgtgcacctgcgaggcctaccctttctcccgtctcagggccttgatgcccgtgcctgtgaagctggcatcagcgaagacctcagacgggaagggatgagtgagcaggtgtgcccccagggaccccacgcgccccccgccccttcgcgcaccgaggtcgtcctgcgtctccgggatcccaggccagcgggaggaggggccgcaggggcgctgcgggcaaggggagcccagtgcgcagggctccagaaaccccgaccctcgcaggggagagccagccgaaccagacgtgtgggggcagcagccgccgcggcggtctgggacgcgggtgtcgccttccacgggacttgggtccagggacccaagacggggatctgggaggagggggatgcccttggggcctgagacccgggcggtttccgaagcgaagtagttacccagaaccgctccctaccttctccccgcctccctgtctttctgcccctctgtcccctgcagctgctcggccctccctcctctgaaacccaccgcccgcccaaggctcactccttcctgctgttcccgcccgcgaagctgttgcagggacggtgcgcccttgggctgcactcaccaccgcccctcgcccgcgacgtcctggccccctaaccccagctttcccgccgccgctcactcccgcgctccgctgcagctcagcccggtctgcaactctccctctgttttctgccccgctcctcagttctgcgctctcctcttctccaggcttccctctcctcctccttctgcctctcccctgtccccgttccattctcctgcgcccctcgccagcgcgctcgcagcccatcggctcctgccggggcccctctggtgccagccgccttcaggctgtgggtccgtccgctggtggaggggaaggtcggggctggccccgggccccgcgctgctgggccccatggtcagtggagacgcctcctggtctcccttcagagctcctcgtcgtcgtcggagtcatcggaggaccaggaaggaggaccccccaccagctgccgcagcctctgctgcgaatccccccacaccacacctctcaccccagaagcacaattatcattgcccagcccctttcagacaaaaggaagagcgcggtggggatgatcagagggaaccctgactcaattcatggtgtgcgtgcgtgcgtgcgtgcgtgtgtgtgtgtgtgtgtgtgtgtgtgtgattgattgattgatttttaactagaggggaaaaattcctaagaaaatgggcaaaaattacagattgtcccatttttgtccagtattatcattggaaagggaggaagatgaagaaagagccagtgtttgtggagtttgtttcaggctagaaatagaaaaaggctgcagttgattaaggaggtggccagagaagcaaagtttgttgaacgctgaagatcaccttgtaaaggtggagttcctcaggctttactccgggagccctccctggggagcaagagaaggcagggtcagtgctgagccatcccgggtgtgtggacctgctacgctaggtctggtctggacggtgctgatgggaccggggatgacagagccaggaggggccagaatgaaagtcgcagaaaaccagaaacaggctacaaacttctccagtctgcccaccctccccttccgtttgtttcatgaaaacccatttccaatcagaggaccacaggccagggaacatggtgagcccagccaaagacactttcaggacagatggtatagaaacgtggtactttggtaaagaaatcaaactttaaagagat

SEQ ID NO: 1886460 - DNA, 4001 bp, Homo sapiens
tctgccgggtgcttccatgttaagggagacatttttcaggagccgctttctcgagataaccactctattatttttgctcacatttcaacgcaggtgatggtgttattgttttgtcactgggtttccacggggagtccctgacacctatgcctggcataatttgaatgccgaattaaaacatgcccctatacactaaaaatggcctttttgtttgattaaaaaaacaaaacaaaaacatatattttaaaatttgttttatcatatccatctcacctccatttaaaggagtttggacatttattaacatatccatttttacacttgtactaatcttttctccagccgcttctggtactctgatgaaaaagcaagaaaatgtatcttgtgcctcatagaactctctctctacacacacacacacacacacacacacacacgagggtgaggggaggattcttatagtgaagtaaaagatgattctttgtctatgtttaattttcgcaaataactttttaatgatcctgaaagtaacttttttactgatcctgaaaatactgatgctgaaattttaagagctcctttcaacttagctggttttctctccctgacgaaattcttcaagaatagttcttttgcacccttgcaagatcggtaaacataaagcgtttggtcaagcagaggtgggttaaaaagggggaaccatttgatccagttttaggaaataatattattccttctgctttgaactctatgtttaaaatagtcttttacgccaatgatttgaatactaacaaattcacttaaaaagcatccacaattcccgtttgttgtgctcttttctccctggactatgaatatgtaaacctccccaacagggtaaaaatgcattgatttgccacactaaacagggaaacgtttgcaccagtgacaactgtttaaaattactggtcctgggatgaggaaaaaaatggcagaaataaaacaaaattttttatttccaagcatcaagttgaagccctttcaagcgatcatcggctccctgggaaatgccttttctctgttacctggcacagccgaacatcaagaagaaacgtggaaaacatcacactgaccccccagaaaaatgaaagaaaagtacggaagagaccaattcccacccttgctatagacggaataagtatgtgcgtttgtgaaccttaagtgttcatctaaatatgttgcttcaacggagatccgcttgtggatacagacacacgaaaatacacgagaccacgctctattttaaggaattgctgaagagtgttgaacactcaaacccaccgcacagcaccctcgcagctaagagcacaattgaatgaaaccagcggattcatttattttaacctccactggagctgtcccaaaaaagcaggtggctattgaaagtgtttttctgtttttgtcttttttttttaattctaaataacaagagggataaaaattaatgtcgttctatggggtctgaacatgaaaaggtacgagagagtgagccagggcctgtgaaatggctaaacggattagtagccttacttttcaacatataaacatctgaaacccgtttcctgtttaagaaaaaaaaagtctaggtggatgacctcgggcactttttttttattaacaaatgtgaattgtacatcatggtgggaaaaaaaaaaaatggtccgctcttggtggtctttctacagtctgtatatgggagacagagaaaaaaatacaaaaataaacgttaccttctcacttgcagggtgggcaatgccatttctgcagccgtccagggctctggcaaatgttaaggctgtcactgtagacagaatccccatggtctgtctgtgtgcctcgatagagtccgaagaaaaacattcctcgcattcctgacggttggtcctatctccgggccttggactcggccctgcaggctcgtgtcaccccgtcaaacggcctaggccacggctaatctaaaccgctgccctccccagccagccctgcggcagggtgaaaactgggaccaatttgctgcctaaaccctgaggatacagcaagtttgattctcgacctttaaggacaccagctgcaatttgttccgccgaaaagagcttagcggttctggcacattctgacaagatacattttatagggtttgtgctcaaatttgatattggaagttaggattccaattttatgcctccagtgataacaatagcagctgggacctttaagaaatgtgtgtgtatgccttctattgaagagttacataacaaaagctatttatgtcaaacaccttataagggaaagatttagcctaaatgtcaacataacatataatactttttcatatttagataggacgaaaacatctgctatcagtgctgcatataatttttggtttggagtattagatctgtgggggctttcaacatttcaagtaagcatctccttgccttaatttacgaattcatcgaggggcctttttttcaatattgtttctgtataaaaaacaaataccgatacatcatgatttggttttccaagtccttctaatgaacgcacacaaaagaagggcacaatttcatgttgtttgatttgacatttgtaattcccaagcatgccatgaagccattcagtggtgccttataaaccgaggctgcttttgtctcctgaaaatggctgtggttttggagaggacctggctgaccagaaccttggtaattctgatgaaggaagagatcagccgctcaaggaagaaaacctttcccagcaaaggaacagcagcgcccagttcaagacaacatctgcagctcgattttggaggggcttaaattccctccagcttccctagtgacaccacagcaagctttctgagaaggaatcccaccaccaaatagacaatgactcttgtttacaccagacgcttaggagtgaccacacgtgggcctgtgaggcaggcttggctggaaaatcccagcttccctcttagcttttctgctcagacggcagaacctaactgagatgggaagagaaccccaattagcaaagccagggattcgcctgcacccatgcatgtgccggttccgtccgtccccttgcttcaggtttctttgacgaattggacggtgtgaccacgggttaatgagaaagcccagtggacggcggcacgcacggtcatctggatgttctctgctcctgccccagcccctgagcctcccactgtggaccacagcccccgttggggaacacagaggtcacgggggccaaatgcaaataccacttctccttgggacctgttggaaccaggcgacaccaacttaaacttggcaaaacgcaagttcaatttcttttgttctgaagtcacaacttggatgtaacagctcctaagccaatatgatctgaaaaagaactcactactgagctgcccccttcccacggtccgaaaattgcttcagcctaaacggaaggcaatttccttttcttttataacaagagaaccgctaagcttctcttagtatttccacccagtgtcaccactaaataccagcacttacaaaaagatccctcgttgtgtcaactgccaggctgtctaatacgctgaattttaaatatgttggctacatgattattgtcagagagaatcatgctccagataaggaccaggaagtgcatctagagacagcatgaatatttagaataaaaatgcgctgctccagaggtttctgcagagacttagatttgaaacaatggctttctgtgtgctgtgtcccatccactcagtgacattgatgctgactgtcattatctacatttcacatcagaggagatggaaggaaaggaagattcagtttcacaaggggagaacataacagatgaggctcgaaggtaaataataataattgtatgaataaccacctttacggagttattaccagatgccaggagttttctactcctgttataccatcatacgtgga

SEQ ID NO: 1886461 - DNA, 4001 bp, Homo sapiens
taaagaccgactttttattcatattttatctaatcctcacagcaacccaagagggaaatgctatgattatgccctgtgtgtttacagatgatgatctgaggctcaaagaaatgaggtaactaatggaaatgcagcactaggaaatgatggagcccagtttgtcccgaggtctatctgactctaaagaccttggtccctgcacctcaacacaaggacggggctttcacaactgggtgaggaaggagaggagggaagcagggagcccagaagagctgcagacgagtcaagcagaggcagctcctgtagctacaccctcgtgtcagcaaggaggacctcaactgctctgggaaactgcctgatctatgatatttaaaatgccttcttcattttgggaggctgaggctagaggatcacctgagtccaggagttcaagaccagcttgggcaacatagggagaccccccccatctctacaaaagaaattaaaaaattaaccaggcatggtggcacatgcctgtaggcccagctattcaggaagctgaagagggaggatcgcttaaggtgggtaggttgacgctgcagtgagctatgattttgccacttcactccagtctgggcaacagagcgagaccctgtctctaaaaaaataataaaatagcctgtaatcgcagcaatttgggagtccaaggtgggcagatcgcaaggtcaggagttcaagaccaacctggccaatatggcgaaactgtctctactaaaaataccaaaaaattagctgggcgtggtggcacatgcctgtaatcccaggtactcgggaggctgaggcaggagaattgcttgaacccgggaggtggaggttgcagtgagcggagatcgcaccatggcactccaggaaaaaaaaaaaaagctttctttcttttagagtctataaagattttttgcaatttcttgacctttggtggggtctacagactcttaggagcatagcatgtagaggaagtacctggcttccaaggctcagctggaatcaggaagaaggtgttcgttggtgggctggcccctgtggagatgtctttcttcagtgagcacctgcccaatccccttcctcattcccttcacacacctggctttgtggtcacctttccctgcatgttggtccggcttgtcctgtctttccaacatttgaatatgaagagcagggacaagtgaagggttgagttcacggctttgtgtgctttctttacagtctctctataaatgaatccattcagagagttctggcaacactgtgagctctctttgaagttcccttgctcaaaaggtctaatcactgtctcactacgtctatgcactatgcacttggttatgtaggggaaaagggcttaatgacacacatgggacctcttcttcataccaggtctttggttagcatatttaatcctcacagcaacactatggaaggagggctttataatccccagttaacggtaaggcaattgggttttggagaagcaaagtgacatgtcctaggtcacacagctggtaaagaaaagatgcatgactagaacctaggtatatatgattcctgaccctgtgccctggctaccgtgccagcctgggaaattatggggctttgagatgaaaataattgaccagacagccaaaagaacatgggggtagatgtcacagctgtcatgaccagtggcctctggtgaatagcattatacaaatgtagaaatggtttgctctgaggctgagatgagtcaagatctggagaaacagtcttgatctacagtggtcagttgcctgtgctgggtactactgaggacagctgcccaggaatggaggcactgagtggtgcaaaatccgaggatacgggacaccaggggaatccacctttcggagcctgccctttcacaaaggagcggctgcgtgctcccagcccacttaccaggctgtgtcatgctgaagtataagcagctccggaaataccccattgtgtcttgtctccgctgggccttggcacaagctggtcttccttgctggaggacgcctctctgcctggctgattctcattcacccaagacgaaggctggagatatttagtatctcctttgattggtaactggttctagaacctgtgattgaggaacaggtaggggaaggggtagagattcactgctttcctgagagttctataaatcctgagtaacttgggatctgatgtaggaggcaaacattgtggagactcagagttgggagacgaaagtatggaagtagctggggcagctgggggcttaggtggctccactggaggtgattgtatattatcatgtgttttaagaataagacaaagttttgaattgtagcttaaagatacaaatctcaatctctgcttttgctattgatttgaatttaaaaaagtaggatgttgggttttggtcagaggactgagtctgcatagggaaacattttgagataattcttctctgtgggccagaggtcctccataaaacttttgtagaggttcccatagtgctgtgggtaagtagactccgaggtcagaagactagggctggaatccctgcttctctgctcatcagccataagtccttggaccagatacttagctgttctggacctcagtgacctcttctctaaaatgggcatattgatgcctacctcgtgggatcattacaggaaagaatagaaggcatgttaaatgcttagcttagcgcctagcattcggtaatgtgatcattaaatgtcagcttttgttatttttaatacttttaaaagctcaggttttggaatcaacacagatacgtgtttcaaaaaagcattgtcatttgcctgacaatggaagggtaaattaattaaacactctgagcctcagtctttctccttgcaaaataatagcagcaacaatgaggaggacaacaaccacataacgcatcaggatcttgtaaatttcaatgaaaggtaaggcctgtgaagtgattagaaaactggtaaacattcaatacataacttgtattattttttcttattctcttggtcttactggtgaagggccattgtctgcttctgtgaaagtacagagagtccagtaaatctttagaaaatatgcaagcttgactggtctgtgttctcaacactgtctgaagaacctggctgagtcctactcacccaagacaaaggctggagatatttggtatcttcctttgattggtaactggttccggaacctgtgattgagtaatacgtagagaaagggggagtgattcactgctttcctgagagtcctataaatcctgagtaacttgggatctgatgtgggatgctgagaggaggaggcaagcatcgttgagactcagagttgggaggtggaagtatggaaacagctggggcttttgggggcttaaatagctctgtcggagggtactgtgagacctgggccctgaggggttatgatggcagcaaccaagacaacgtctgtaaaatacagagcatgatccatttgcagcaggcacctcagcaggggtccaggggagctgggagcgggatcatggttctgagtgcacaaaagggaaggctgattagaggaagttctgcccattttcctgctatttcccagacattccaggaccaagagtcacttttatttttatttatttatttatttatttatttatttatttatttatttattttgaagcagaatctcgctctgttacgcaggctggagtgcagtggtgcaatctcagctcactaaaacctctgcctcccaagttcaagcgattctgctgcctcagctaccagagtagagtagctgggattacaggtgtgcacctccacacccaggtaatttttgtatttttagtagagaaggggtttcatcattttggccaggctggtcttgagctcctgacctctggtgatctgccccccttggcctcccaaagtagtgtgagattacaggcatgagtcaccatgctcagccaa

SEQ ID NO: 1886462 - DNA, 4001 bp, Homo sapiens
gagctatgcattctgactaggaagactccatagcctcaggtattatttttgagctggagagtttcctccttttgtacctccagtctcaatttttcttttgagtgccacactcaaatgatgccgtatctcctctgggatatctcccagggaactcagactcactctgcctcacgttgagtgcacagccttctcctgaaacccaaacttcatttggcatccactatctcatgatccattaggtgctcaagccagagtcttcctcaccttcccagccagttattcattgtgtcctgctgttttaaactatccacttcgtctgtttccactgcatccccatccttctggttgagatgtctccaatagcctcctaattggtctccctgctgccatgtttgctcacccccacttcatcacccagcgggagtgatgctttcacagtgttggtcagaccatgcaactcccctgcctaaatcactgcaataaattccccttattccgagaataaaatctcaattccttcctttggcgcagtggatgttgtggtgtgctgccctgaccttcctacaagactaagacatttatttccccagtgcctgggagtgtaggtgaagccgtccctgtgaactttatagaattaatcagggaagaaagaaagggagaaacatagtagatgaagtttgcagcacactcagctttaatcatgaggttagtttgccctctgacctgcttcctcatagtttggtgcttattgtcctggaatcatgtagaccctgttacaagattatagctctccttaactactctgcaggtaacaacttgaacattataaaatgttatgttttccctttgagatattctttcaggtcctacataccagtgaaactactgttttcagctggtctggaggaacccatgagaagctgattcaccaaggaatgcagttgccatgtcctgatgatttccttctatttgccccaaccaatcaatgaccccaaatttccagcccctcagcctccataatccccttaaaacctccagcccagaattccttggggagatggatttgagagtctccttccatctcctttcttggcaccctgtgatcattgaactctttctctgctgcaaaccctggtgtctcagtgcgttggtctgttactatgcagcaggcatatataccttttggtccattgactgctgataactcatagctgactgcctccctagaaagagtgttgccccatccaaggtcatgtctcttcattctgtgcaacaactggtcagagttgaggcacacaagactgcctcccttgcttccatttggaacatctttgagggtccaccccagttccagtgcccccacataagaccacctgcagcttctattgtcactgcagttttccctacttcctccctttgtccagcttgcttccttcccatccttatatctgttgttctcaaaaccactccccaacaaaatccctgcatgtgaatctctgctcagaatcttttcccctgggagcctgactcacaacataagtcttacaaggttctccatgacctggctccagctcaatgcccagtacaaagtggatgctcagtgagtaccttggattgattggctcattggctggttgcttggttggttggggtaaaatgcatagaacatgagaattcaggtgaagaatatctctttcacgtggtcagcactgggcatttgttcagggggcttcaggggcatgatcagtggacatccagggtagcaaatgggcaatgcagaccccaggcagctgctggtatcagtaatgaagggtatctgtaatccaggtagcacaggggtgagtagaaaggccctgccagtgacctacttttatcgttaatgcttttctattagcagagcatttacctctgaatcgattttcgtgtattctctctctgccaaaccaggaacaaaaagaaaaggcaaaatttccgaatgtctttcctcttgcaactgatgtagctgtggctgaatttcacctttttaaatgatttcctgtggaaacagcaagggaagatttctggcgggatttattatgcaatttggttctaacctgatcccgtcaagcaaagagaaatggtaaaaagcaaacagaaccccaagctttgctcacaagcttggggcctgctatgctctaccttgtctctaggcctttgagtatgctataaagttcacctatattacccacccctgccttattgatgtgcatagctcctgcttgtactttgagattcatctcagacatgaccttgtataggatgtcttccccgactctcctcttccttccctactgactataccaaattgtcctgtaacttctttctcttttcacattggcaactaggaagctcagtgctcaatttacaggctacgagtaacctgttaaacatgtatgttgtgaacactaattttttgatttcctcttattttgcttacacttatttttcttttccttaatttccttattagcataaatttgcaatcctgtactgacttcattgtttttcatacaagaaagaaaaaacattagaaagtgaagctttaaaaaatgaccacgatgtattataattgaccacctacttatctattttccccattgctttgtgagtttataaggagaagacagtaatatcttttcatccatctaactcaaatgcctggcacttagtaggttctcagaaatatttactgagtgaatggagcagacctaaggggagatgaggtgagaatggtgattttgggactttttactttgaaccgattacagtatataagacaaagaagatagaagaactcaaatattttctacatttctatgcttaaaagatcatggatgatttcttaaccagagacactgagaaagaaagaaggagcaagacaactagagggaaattgtctcatttgggcatcggcccttcagaattaacagtgaataggccatttattgaattggtggggccttgtctaaatttctaaaatacataaaatactgaacatgatccagtaactttttttttttttttttttttaggattagaatacacactttgtgaggctgaggcggaggctgaggcaggagaatcacttgagtccaggagtttgagactagcctgggcaatatagcaagaccctatctctaccaaaaagaaattaactgggcatagtggcatgtgcctgttgtcccagctacttgggaggctgaggtgggaggatcaattgaacataggaggttgaggctgcagtgagctgtgatcacaccattgcactcttgcctgggcaaaagggcgagaccttgtctcaaaaaagaaaatcagggtgaatttttatctttctcataaaataataattatttctgtttatttagcagaactgtataatgctgtgatatttagattcctgacattatcacagttaatatgaaaaatatccctgggaggagggtttcataatcctcattttacaggggaaacatttgaaactcagagaagtgaggtattttgcttcaagcaattcatctgagggtgaaccagaatttgaatccttgtcagctgatcccaaaacccactctctgtattttttttttcctgaagtttttttacagaatgctcttatacttctggttgttttctcttaattttattacagggagggttccagaatcagggatatccccaaggagtagcagggaagggatggatttagagtaggggtcctcagtgggacaagtttgtctccacaggacatttgtcaatatctggagatagttttgatggccagaactggtgtgtagcgggggcaggggcagtgtatgcactactggtatttagtgagtggaagtaaaaaaatgctcctgaacatcttacaacacacaggacagcccccacaataacaagttctctggccccatgtcaacaatgctgaggttgagtgctgaactctgacttagagatatttcttacct

SEQ ID NO: 1886463 - DNA, 4001 bp, Homo sapiens
caagtctgctgtggaaacaaaggtcttgtgtacacagatttgtttttgtttttgtttttgtttttttctgttgtttttgctgatgttgttttggcaggaggtgattgattggttaataaaagaagataagtttcacatttgtatccaggctggcagaaataaaggaacagagatgagatttagagatgggaacttcctaaaagaagccagaagtcagatctaaaggtgaacttgaggtggtgaaactaccttggaattcacaggaattgcagctactcataactagatcttaaggggcggggagaccccatcgttatatggattctacatttcttacctcccatattgggctttgagcctttccaggccaggatccaaatttggattcatcttcaaagtcccactagcacattgtaaggactccataactgtttactgaattaatacattcaagagaggcttcttgtgcatacatcattacgtaggtcagaaattatatttgcctacaaggaaaagaccagatttcagtgtttaaataggtaagaaatcaaaaggtgggcataaagtctgctgtatgtcacaatgtcacaaacgtgcttctatcattctattcttcatgtctttcaaatatcctcatggtcccaaagtggctgctgtatctccaggccacaccccaccactgccaccctccccagtcaaccacatccccacctctcccaccctcctcactcaaccacatccccacgtctcccactctccccactcaaccacacccccacctctcccattctccccactcaaccacatccccacctctcccaccctccctactcaaccacacccccacctctcccattctccccactcaaccacactcccacctctcccaccctcctcactcaaccacacccccacctctcccattctccccactcacccacacccccacctctcccaccctccccactcaaccgcacccccacctctcccaccctccccactcagccacatccccaccactcccacccttcccactcaaccacacccccacctctcccaccctccccactcaaccacacccccacctctcccaccctcctcactcaacaacacccccacctctcccaccctccccactcaaacacacccccacctctcccaccctccccactcaaccacactcccacctctcccaccttcctcaccccctccacaaccagttctcatggctccagccacaccatttccttctgagagccttgttcttgtcttctccatgctccttcctgccccatgttcatgtcaggaggaagaaaaggaaagagaccagtggttttctctgagccaggctttacttgagaaggaaagcctttccaggaacctctggctacatttcaccaactagaactcgctccaagtggagggaggcaaggtagaagggagttgatacataggtcataagaaaggaagggtcttgacgttcctttcaacccagctggggatctatctgaaatgtaagcattgttgatatcattgcaacagtgacaatggctatgaaggagaaagacaggtgccagcaaatgaggaaactgaggctgtgagagatgaactcgccttaaattacacagctgggactctaggggacttagaagcccattgtctttatatctgctgctgggagggcagacagcagcagcctctcctctcccgttctccaggttccttccagtgaggtctgtgtttgttctttctcagaggccaggccaagccagacctcacaggcaaagcactttgtctggtggcaaagtcctatatcaaacaaattcaaggcctctcaggtctgcaactctgctcctgcctcacagccagggatggagggatgatgctggggccacaggaactctgagtcatcgccggggatggcagctctggataaggcagcagtagacctcaggcatccccgcactcctggggaccaggggcctggcctggaaaggacctgcattactggggattcacaccaccctcccctcaccctggacaccctaccatgatggctcaggtcacagactagactgggcccctctgccagccttcccccgacttcacaatgctgtattatcagaaaccatgaggtgtacagcagagtcagggttgggtcggggggagtggtaatgactctctatgactcattttgaagggcccagagtcagcgtgagagggggtggagggcaaacccaatagcagctcagaggagccacaaccagccataaaaataggtttcatatcacagcccggtacatccatctgcagataagcatacagcacagaaacacatttgcacgcagcaacccttccttcactccgtgaaataaactgtgattttattctattctatttccttccttccttccttccttccttctttccttccttccttccttcttttcattctctctctctccatctctctttgacaaatgctagttggttgagacccaaaaaaataatgtcatgataccttgaggggaaacctgttgttaaattatggtgacttagcatattggcttcgcagcacaactgaactcggtttgaacttgctgatgtgtgaaccaagccaagtaacttagcctctggcatcggaccacttttctaaaccactaacaccatgattccatttcctgacctttcttccagaccacaccatgacctccaacccgtcctctctaaaatgcaccctggacctcatggctgcacgttcccactgcatgcactttccacctgcagcccgccagcccttgtccacacccctcatgcattccttttgatcttaataaaaagacaaagttcctgccttggctggaaaaatcaacaaaggctaagtggtttcccgctctccccactcaagtccacccccactagtccaccctctcaccctcccaactcaacaccacccccaccactcccaccctccccactcaaccccactcccaccactcccaccctccccgctcaacctcacccccaccactccatcctccacactcaactccacccccaccactcccaccctccccactcaaccccacccccacctctccaccctccccactcaaccccacccccaccactccaccctccccactcaaccccacccccaccactcccaccttccccactcaaccccacccccaccactccaccctccacactcaaccccacccccaccactcccaccctccccactcaatcacaccctcaccacttccaccctccacactcaaccccaccctcaccactcccactctccccattcaagcccaccccactctccctccatccacactcaaccccacccccatcactcccaccctccacagtcaacctacttccatcactcccacgcttcccccaaaatggggaaggaggaagggaaaaaagggggtctgaaatgcaataatgtatgtaaggaatttagcactatttttggcatagagtgagcaatcactcaaggtggggaccatctctatccccaagtgctgatgttgaaactaactgctgagaggagagaagtgtctaggcattgggtgatgaggtcagatctgtgttttaggagtggtgtatacttttgctggcttctgctctttggttccatctttgaaaccccatgaccttctgttcttcctgatatcatgggtgctctcgtcctgtcctgtggctacatcctgcctctgggctggagacccccacactcacatcactagtccagcttctgtccttgactccaggctcgttcatccagctgcctcctggacatgtcccctcaactctccagtgggccacaaaataatcatggccacaaaaccccttgatcagcctctcctccccactcaagcctgccctccctccccatctcagtaaagggcatcttctccattttgggctttccttcacagccccacatcctccatcagcaagtctttgtggttctgcctcaaaat

SEQ ID NO: 1886464 - DNA, 4001 bp, Homo sapiens
tccaccctccacactcaaccccacccccaccactcccaccctccccactcaatcacaccctcaccacttccaccctccacactcaaccccaccctcaccactcccactctccccattcaagcccaccccactctccctccatccacactcaaccccacccccatcactcccaccctccacagtcaacctacttccatcactcccacgcttcccccaaaatggggaaggaggaagggaaaaaagggggtctgaaatgcaataatgtatgtaaggaatttagcactatttttggcatagagtgagcaatcactcaaggtggggaccatctctatccccaagtgctgatgttgaaactaactgctgagaggagagaagtgtctaggcattgggtgatgaggtcagatctgtgttttaggagtggtgtatacttttgctggcttctgctctttggttccatctttgaaaccccatgaccttctgttcttcctgatatcatgggtgctctcgtcctgtcctgtggctacatcctgcctctgggctggagacccccacactcacatcactagtccagcttctgtccttgactccaggctcgttcatccagctgcctcctggacatgtcccctcaactctccagtgggccacaaaataatcatggccacaaaaccccttgatcagcctctcctccccactcaagcctgccctccctccccatctcagtaaagggcatcttctccattttgggctttccttcacagccccacatcctccatcagcaagtctttgtggttctgcctcaaaataaatccccagtggacgctctccagtcccactggcaccatccaagcctccatcatggctcatttcctgggatcggcagaataataggccccaaaggtgcccactacccaaaatctccaaaacctgtgactgggtgacctcacatggcaacagggactgtcaagatgtgattaagctaaggaccttgagatagtgagattatcctggttgtctagatgagcccggtggtagtccattcttgaaatgctataaagaaacatctgagactgggtcatttgtaaaaaaagaggtttaatcggctcacagttctgcaggctgtacatgaagcatgctagcatctctttctggggaggcttctggaagcttctcttcatggtggaaggcaaatcgagagcaggcgccccacatggcgaaagcaggagcaagagagccagagggagacgctccctatttttaaatgaactgatctcatgagaattcactcactatcgagaggacagtaccaagggggatggtactgtccccattcatgagaaatccacccccatgatccagtcacttcccaccaggccccacctccaacactcaggactacatttcaatatgagatttgggcaggctcacagatccaaactatatcaagtccaatgtaatcagaggggtccttaggaaagggaggcaggagggtcagagttactgtagaggtgatgatgagggagagacagagagagacaggaggagggagatttgaaaatgctatatttctgtttttcaagatgagcgagaagtcacaacctgcatctgcaggcagcctctagaagctgggaaaggcaaggaatggattctcccttggagcttccagaaggaacacaatcctgctgacaccttgattttaacccagtgagacccatgtcagatttctgacctacaaaaccatgggataataaatatgcgtgtgtgtgttttttaagccacatgagatttgtggtaagcttgttacagcagcaatgggaaactcacccacctcttcactgtctctgcctcttaactggtctccctacggttcctcttggcctgttactccattctctgcacagtagacaacgtgggcttcataaaaccttctatcagatcacatcactttggcaaagaaaaccttccaatggcttccatcatccttagaacaaaattccaactgttcaacatggctgaagaagtccagttcctagtctctctgagtacaccctccctccgatgtccccctcttgcccccacttctctagactctaaacaccctggacgtctttcttttccttgagcaattcacccatgttgccacctccaggcatttttctgggctgtttctcttccaggaattttcttgtcatttgcccttaagggcttggtctgaggtcttctctgatgacatctgcatgttaaaaaaaaaaaaaaaaaaaaaagcccctctgtccttggcaaatctctatcacgttcccctggtttatttcatctctaccatttatcagtaactgaaattaccttattcatttatttatttctttgcctacaattgtgtggttgatgcggggagtgaggcagttgtttctcagtcccccagcactcgaatgatggctgggctatggcagcactcaatatttatcagtttggatgaaggaatgcatgcatgcatgaatgaatgaaaggaggaacgcagccctatatagtggctggcgcagagtcagtgttgaataaagatgacttatttaatatccttatcatgatgatgaccaatgagaaagtggcttgttcaccatgaagtcctacacacaagtgtgtcttcctcattaactgcgttagctcccctgctgggggagagccagctgggactgccttgggtctcagcaccccaagaatcaagttgaaagatgcaggggcctggcatggggtgtaggaagtctgagctggcagagacccagtctagtggccagacaagaagaaagaaagttccttgggggagacgcttgtgttattacaagtgcaaacttagagaggcaacaaatgcctatttctcagtgtacacacacacacacacatatgcacatacacacacacacaccccacctcagacccaccagggccctgccagcagatccagcggatgagaaacctctggaggatgaatttgcagacgcctccccaggcgctatctggagcgacccaccagtcattaacactctatgcagctgagcacatgctttttattgggatgagtataaataaacaacaacaggagacttgaaaaaaatgacccccagaggaaacccgatcctcaggcaattagagcacttctgttcagataattgctggctgaaatggtgagctgggtgccaatcctccaaaggcaacaacactggccaccacaggctgattgcagccccccagccacgtgagcctccctgcctttgtctgctactcagtgaagggaaacccagagtgtgaatagtgcatgcaccatgttcagtgaatctggcagtgagtgtggccaaggcaggggttctcacaggggtgggtgattttagcccccagggtaagtttggcaatgtctggaaataattttggttgctccagccggcatttaatgggtggaggccaaagatgctgctaaacgccctgcaatgcccaggataagctcccacaatagagaattgtacagcccaaagttatctgcagtgctgcagttgagaagccctggtttagagagaggagctccctaaacatctacaaaggcagaagctgctaatggactcagaacactcaccatgggccaaacactgtcaaacataaggctccatcgccgaatcctcataacagcattatgaggtttaattaccaccttagtttcacagataatgaatgaaactgagagcaaaggagcttctagaagatgttaagcaacttgttcaagatcccactgctagtccacacacggccagccttcgaagccgaattgaccccaaagcctggcttttggccccaggcacaaccagtgctcacagttataaagctcttactttgtgccagtcactctcacacataccaccttctagactccatgggaaatgtggaatggtcgggaaaacacagcctttggcttcctatggacctgaattctatgacctgctctgccatttttatttgcc

SEQ ID NO: 1886465 - DNA, 4001 bp, Homo sapiens
acctcactcacagtccagtgtttacaggcactcgaaaacctcctaagagtgtatttcataaaagcagggcctgtccaaatcccctgtaatgtctccaaagtgaaaggatagagtcaataatcaggactgtatctgtgtgttgtaaatgccccaaacctctattccctctctgagttctcacaggcacgtgtgcatgcacacacacacataaacacagccataaatatatacactcccatttaatagactggagattcaaattacagttatagtgtcataaaactatctgtagggtgtgtgcagaagtctaagtgtgtgtgtgatgtgggttggggtggcaagcttacaaccttcctccttcccttgaggttcgacattctcaaaacgtgagattcctctgggacatttaaataagctgtattcataggggcggctacataatttgcagacccagtgcaaaatgaaaacacgggacctcttcttcaaatcgtattaataacttcaaaacagcaacagcagagcagtaaaccaagtgtaagaccttctaagtacagaatctgtgcatttgggctggtcacacacccacaaagcaagctggggtttgaggataacacatagagagagtctggattcgatttttgcaatatacaccatttctttaggaaagttcaaactttccctctgaaggctctaatctaagtctgctgaatgaattgacaagaaattaacaggagaaaagccataacaaagctattcaatcatagttttatgtgacatgggagccctcaaaatgaagaccgcaagtcccagataaaaatagataccccgggtatctgtttttacccgggcttaagtttgatgaagcatggatagccaggtagaaatagggttagacaaagaagagtctgatctaatagcaagagactgaggcagaaaacccagcacggcctgtctgttcaaatttttcttagcttctctatgtagcacgtcttcctctccagtatggggcaggacctacaacccacaaggtaggtcagagaatttctttatggccatttctgaaaagtgcttgcagaggttcctggcatcatgaaaccagagtgtcttgggaatcagactggcttgggtttgaatcctgtgtaaccatgtactaacagaatttctctgacacttccactcaccattttgaacttcaatttcccatctattaaatggagacagggcaacccactctccgaattacaattaattagaggattaaatgcaataaggcatagaaagcaaacaaaattcgaggtcaaagcccggtacataataaatgttccaaattgcccttcattttgggcacagatcttgcagatcagttcaaacaaaaacacactatatattaaaagtgaggctattgtaattgaagaccaagagagattcggaaacctgacaaatcgttttcaacctgtccgttcttttgcctctaatgagacttctcctttgggtgggaagagatgaccttctgaaaaggccctccgtccgcgtcagaatttggcgactaaagcatgcatgagctgggaatggtgacaagttgcaaagggaaagggggagggtaggcagggtaagaaagaaaacttagggctggggtgtgaagggtctcttggtttgttttcctggctgggacagcgaacttctccgcagccaagtttctggagcggggccggccgcttcgcggctcccattggtccggccgcggctgttgctaggcggatggaccaatggcgcgcgaagggcgtctgggctcctcctcttctgggccgcggctggagcccgggaagcggcggcgtccgcgcttctcccggcggctctttctcttcttcttttttttttttttttttaaggcggggcggggctgggggcgcggcgtcgcggagctcgggccggtggaaggtttacctgctaggctcgtcccacctgtgtggagctcccatcgccctccagcgttgcgcagcctgaagggacaggacggacaagcgggtattttttccccctcacgcaaatgtgtattttgtgttttaataattttatcaactcggtgaactctcgcgagagcactcgctgcgtgtcttgcctctgtcgtccttcccagtctctaaccggcccctgggccacctctcacaattgagcccccagcccttgaacacacgcacacacgcacacacgctgagctaccgccaatgcttgagcccccagcccttacacacacccatacacgtgcacaaacacacacacacgctgaaccaacttcaacacttgagcccccagcccctagagagagacacacacacacacgctgatgcgggagcatttagcacagtttccttgctgaaaaagcaggacctcggtttagaaaatggaaattgcccaggaggaaaagagagctgagatatatgcagccccaggtacttagggttagtaataatattgttaataatactatcgtttctgaggggtttctaccagatactgtgttgagtagttgccatgcttaatcctatttagagcttggtgtgcccatgggtaaacagaggcactgagcaggggaggcagaagcaggactggaaactgtctgtgtaactttggagctcttggttctatccacttactggtgtggttgcatggctgtacaactgcccatgtggttatggcccccatctggggataggtctcagtagaacctacatcgccagggctatgccagccttatgcagtcctatgcataactaccaattctcagaatgagcatgtttatcacccttggcccatcctgccccatcactgtatttaacacttgcatcttaggtggatcttcctcaataatcctggaatgagtagaaaagacccatgttctgtgtgtttggggaacatcttatcttcatcctgcaacacacatccacctcggcagcttcccctcaactaatgtgggaaccacaactcagagaggaaagtgactggatcaaggctactctgatcaaagctggtcacttcccacatctgtgagacagcagagccagttctctgcttggtgaagcaattccgtaaaagcatttctctaacaagtgactgcagacttcacgtgaactcagctgcatactggaagtcactgtgattctaattttatgaagaattatcaagttgagcatatttaaaactgtgtggggctttttttcttatacagtttccttttttctttttttcaaggtgcctccttctaattcatcttcaccattgtggttgtcaatatggcatgcagaattatccctctttccaggtgaggacgcggagacatggagacacatgtagcccagacacataacaacacagtaggcaggcccagtcttggagcacagattcttcctccccctccccacaccttagctagcttctttgctctccctgagtgcctatggcttacaagttatccatttacaacaaaaggttgtttattcagaatgtagggactgggaatacagaagccaaaaaaaaaaaaatgaagtgagaaatgaaatcccttctgttttgttgtttggaaactgcctgggaagtggcctgccagctaggaacagggttggctggtgaagaagcccctggcatgacatttttctgcttagcagatgcctgtgtgccaccctcgcccttgctctgagcctggcagtcaagggaaacgtgtctgtactcactgtgctattgtctaaaaggctcagcagaaaggccccagctagcttccttcttcccttcgcagcaggagaagacctaggcatgcccacctcctaccctaacagacagcacctaagagatggttcttttgataacttaaaggagatatttttgaacgtcaacacaagacagtatcgcccagcaagggagaggttttcgactccacccatccccagagactcacttggtctcagagagagagtactgtctcctttccttaaatccccctagcttaa

SEQ ID NO: 1886466 - DNA, 4001 bp, Homo sapiens
gaggatttggaatcactggtatggagtggagcctgagaatgttcattttagcaaggaaggtgatcttggcgtgattcttaagaattacactctgtacagaaagttacactgcatgctaagctcacgcccaaagtagggcgaccagctgtcttagtttgcacacagaaagtctctcatgccagggaaactgggatagctggtcaccccgcaggcctcacttgaacctacacaaaacacttttagcacaatgcctggcacatggtggacccttgaaaaatatttggggaatgaatgaaggaaggaaggaatatagctcccagtggaagcctagggttgactggcttggcttccctgcagcaagagatttgaggaaaacttcaaaggctaactcagagggacagcttcgcctgctgccctgaggagctggtcacagccttggaaaaagtggtacctcatcatgttcccatttgtgctgacgtgtgcaggcgacgcttgtccttaatgcaaaaagaaaggagaagaaggctgcagtaaatctcttctgtcatgattactcttcctgccttttcactgtctaaaccctctaaaccctcaaccctcccttttcccttctgcagagagacctgtctactgagcagtgggaggtgagggagggaccctggcatcgggagaatgaattccgttcacgctcagcctctgacccattggtgcttcttcttggcaaatcagtgaacctgttgggacctgagaaatggcactgaaaagctatggggattgaactcctttcttttttttttttttttttttttttttttttgagacggagtctcgctctgtcgcccaggctggagtgcagtggcgggatctcggctcactgcaagctccgcctcccgggttcaccccattctcctgcctcagcctcccaagtagctgggactacaggcgcccgccactacgcccggctaattttttgtatttttagtagagacggggtttcaccgttttagccaggatggtctcgatctcctgaacttgtgatccacccgcctcggcctcccaaagtgctgggattacaggcgtgagccaccgcgcccggcctgaactcctttcttatgtcacaaggttggcctgtggtatgtgcgtgtggacaggactatgctaaaccagcaaggctcagataataaaatgcagttctcttaaacatccattcattcatcattcccttatgcaatgggtggcttgaaggccgtgttcagagctaaggccagcacagggcttttggaatcttactagttcagaacttctgttccttgaggaagactagcatgtaacagataatcatatagaccagatacataattataatcattacatcatgacgtgtactagaaaaaaaaaaagacagattcatcagaccacctaatatggggacctgacccagtcttgtggcttatggaagatttccctgaggaaataacattaagatgaggtcacaggttgagttggaattcgccaggtgaagaaagggtggaatggcattctaagacaaggaaacagcaggagcaaacacgttgttacaaaggatagcacagtttttcaatccatccatttttttatgtttcccctcttgctccctctctccctccttgtcttgttctctccttctcctccatgtcattctaacatctttctcgttttacttctaacgtggtcaatatacattcatctgcttactattggtgttgttaaacagatattattgctggatccccaattggcacaaatgctgtgatggactttccttccaaatttccatctctaagcatgccccagcataaacactggcattcagtggtgtgaaagaaaatacaaggccacaaaaaaaactcctcattccattgagttttgcattacattgcaaatcactcaaaaacactatttctggtactgaccttgaaacagcttccgaggtgtcttgggctgctggtggatcctgaggtcttcaggtgggcaaggcagccacagttgagttggttcagcttgcagatttggtaaagagcttggaagacatttcccctggagtagaaacaagtggcatccttccaggagaaacagaactcttttcacgtcgttcgctctgatttgtgctacattaaaataaaccttcagtgtcagcttctggtgcgagccttaggactcttctaaatgcatcatcttcacaaagacattttcggtgttaatcaacagagcgccatggatttgacgctctggtattggagtacaggttttgcagttatttatttactgagagggaaacagaacagtggttccatttgccactcctaaatttattgtcagtccttctgcgtggggtaaaattgttagccgtcttcaacagctctcagaaataagcattccaaatatattcgcctactgtacaaagatgtgctgatgccactccttgcaattttgccagagaggatgggaaatagtagacgtaactggtaggaaatcaatcttgggaagaaaacaaaaacctaggacttttgcaaaggctatgaaatagcaggaattgcaaaggtgcttcctggcacagcctacttaaaaatgcccgggttaatcactacaggcataaaacagaagagaaggagtgttcccatattaacacagtgggaaagggcaataggatgaactttctgtgtaagatggtcccaaccaatgatcaaccaatgggcccaccagcgcttccatctgcatccactacctggcaactcatacccttctctcttctctgccaaatgaaagaaaaatggtctgataccggccagaaaattagaattgtgtaaactgaagcaatctggaagtccccaaacctttctgcccgagggagaaacttcccaaaaacaaacaggaagtggaacagggatttgcaactattttaccacccaagtcaaaggtgtgctggagtagaattgccccaggtcacgggagctgattggaaagatctcttcccaactcagcattcagtaacctcttatcggcagcgtgaaatcggccatgattaccaatcaggactaagctaatttatcagcacacttctgcctaacatctacggttatccacttcctacccctagattatataactatttattcattcatttaattcatatatattgagcccttattaggtgccagccctctggaataggaaatccagtccccattttacacatgtaaaagctgcaattcagagaagtgagttgacttgtccagaaacacttagtgccagccctctcccaggcactaggaatacaggatgaaaaagacagattaggtcgctgcctacgtggattttagataccatcccctttaaaatctgcatttattatataattattcatttatttttcatttttaagaaatggcatgaaagcatgtaaaactgcccagtggaacttccgatcagttgaaagacgcaatgtggtcacaatgaactaaagtcctgtcacaaaaagtaaaggcattttatatggctttgtgggtgttgaagatgtctaagtgtgtgtctgattttcgttcatattgccagtcaccaaaaagagtcatagataagccctcggggtaggactccgagtttccattttatacatgtgaaatgggagcggttacacctttaagaagtgggaagtgccaatatcacatctttaggaagtggaatgggaatagtgattgacaccagagacccccaaaatgaggctacatattcccaggtaatttgtaaattaaaaagtgctttaaattgtcaccaccgattgccataattattagcggctggcattgttattactaccacctaaaagcataaggtcttctaataccaaacctgatcctgagcttagctttctagaagaaagaaccaatgttaaatttttaggtgttgctgcctccatagcagccctccatagaatttcctggagtggtagggaggcgatgggggag

SEQ ID NO: 1886467 - DNA, 4001 bp, Homo sapiens
tcacataggtgaaaatgtggcagttgtatgcacacccagccacaagtaaggattgtcaccctccgacatgaacaaagcccactgttgaggttctgaatcacatgtcaagaggccataaagttggaaatgtgaacctcataaatcaatccaatccacagatgggatgataactccaagaccaggatttagaacacctggggactgtaatttccctattaaaacatagtcttcaggtgagatttgggcttttgtgtactgatttactccactgttgtgattaacttgcatacttggactcaacccacaagacgggttgactctaatacctttagctggaaaatgtccaggattgtgaatttctcttgttgactgggcccaggtataagctttattgctgtgcctgtgagatgggttcaaaaatgagtcactatctcacctgtggctgcatctatgtatgacagtcacaattccaaatctgtattgcgtttgcacatgagatttaggacctcaccactgagtactggccatgtgtgaggatgacaattctgtcagctggatgtacatatgagagtcacagcctcacctttgtgtgggtcctgttatgacacactctgtaccacctgagggctttatacaatgtgctttggtgtcataatacactatgacctttgttaaagtaagagaccaaggaccatgactgttgccctaaccctagctatgagggtcaaaatctcttctcttagctggatcccacgtatgacagtcatcatttcacttttaacctgtgactatatatatgtcacaattttacctgtgagcagggaccagtcacaaaagtttaatcacctgggtgctgggtcagctatatgtcacaattcttactttggccagagcccaggcaacagagcagaaacacatcacccacatgattggcccagtgatgggtcacaatcctctctgggagcagggcccattcaggagagtcatatcacccagctgcttggccaagaaatatgtcacaatcccccctgtgcacagagccaaggcaggatagttacatcacctgggagctgggcccaacaatatgtcccaattactcttggggaaagtgtccaggcagaagagcagaaccacatcacctaggtgatgggcccagagatatgccacaatttcttctgtgggctgggccctgggataagaataacatcacctggtgctggacccagcaatatgttacaatcccaactgtaaaaagtttccaggcaatagaggagagtcacatcacctatgtgactggcccaaagatatgtaataatattccctttggggagtgccaaggaaggagtgtctcaactcctccgtgctcagcccaaagatatgacacaaaacacactgcagggagggcccaagtaggagataagagtcctattaactaggggtttagccaagcaatatgtaaaaattattcctgttggcagatcccagccccccatccaaaagaatcaaatcacttgggtggtgcttcccatgaaaatcacaagcccttttgagtgcaaagcccatgaagcagaggcgattcacattacctaggtgatgatcccaaagatatttcacaatgctgtctgtggggagagtccagggagacaagtcacctcacttgagtgctgggctcagaaaatgtcacaatcttctctgatggaagagcccagaaaagaaggaagagccgcatcacctaggtgttgaacccactgatgtgtcgaaatctctattctgagcagagtccaggcaagtgaggagagtcacatcttttaggtgattggtccagagatatttctcaatgccccctgtgcacatggcctagacagaagacacacataagcaagattaccttgttgcttagcccagtgatgtcacaatgcttcttgagggcagggcacaaacaggatcagagagtcacatcattaagtaccaggcttagtgatatgttataaccttacctgtgagcagggtctaagtaggggaaaagatttatatcacctaggtgcaaagtagagagatacatcacaattcctttgaaggaagtgtctaggcaaaatagtcacatcacctaggtgtttattccaggtataagtcacaagatatatctgtgctgagcccagaagcactgtgaaatcactaaggttctagttgtatgtcacaattatacctgtgggaaggcccagtaatgagacctccaaatccaaacatttctccactccaggtagaactcctgttgcgttgggtccaagtacttgagtcacaatctcaacagtggactgcatcctcacatgagagccccaatcccttctccaagctatgtcctggtaagggagtcacagcctcaatgctgtgctgaatcttggtgagagagtcaccatttcgcctgtggactggatccacctgtgagagtcacaactccaacttccccctgcccatgggtgtgagcttagaacctcagttgtgggttatgtacatgtgggcatgtgacaatttctacttttggttctgtggccatacagatctctatatctcacctgtgaactgggtcctgttatgacactctctgtaccactcaaggggtatattcaacacacatgggttttataatcctttgaccttcataaaagtagaagatccaggactttacccattgcttgaagcctagctatgagagtcaaaatctctccttttggcttggctcatgtataagatttatcatagtgcctgtgagctgggccaaaatgtatatcaccttctcaactgtggagatccacaggcagatacagtgtcatgtgagataggaggacgactgagatgttctctgtgagggtgtaattgttattgtcctggggctgtttctagatattttcaaataaaataaattcagagactttaacctaaagaagtattgcaatggtggaagcatcaagcataatatctgcaaacatctaaaatactaggcagaaaagagctgtctttgaaatggaggagcaaggtatattagaaagaagggtgggagaggaagggccccatggagagtgacaaaatccttcaagattagagatggtttcaccctgaaatcagcctgttcttgggaggggcataaaaggggttgtatggttatatgtttactcagactgaagacggagcagaggccagggtcccgggggaaaaaagaaacaagcaacctgtgcctaacaagtattttcttctgaactctgaagacaaaagtatttaattgtttatgaggagcaaatgggaatgtggagaatctatgaatctgtgatatctaaaacaggatgtaccatctaggtaacaatggtaaaggtgtttctctgcagtaagttttctcacagaacacaaagaattagagagttttcttaaatgtcactatttaccaggactcactacccaccctgtctttcttttatgcttttctttgctgtatccattttttgcatttggctttttctgaactgtatttattataataacctggcaagcataggtgaaatgttttgccaagttctgtgagtagttttattaattattaaacttcatgaaaagggttatgggagcttatgatttatagatagatgctcagaagcatagacgtgcccatgttcgttgtgacaggcatgtgcagtggggatggtgctgtgggactgagtcctgaacttgtggagtctatgccaactctgggtggtgtcagaattaagatgttaaactcccagttggtgttgatgaattggttggtgttcaacaaactccatgtatttggtgttagaacaaagacatcacagcagcctcggctggaggtatactgtgggtcttttggggaataaagactctattcttttacacacatgctgtcacagtgtgaattgtcttgtgacaataggtcccatctaggggtcagagggaactgaggattaaaagggatggagttctgaaggaagact

SEQ ID NO: 1886468 - DNA, 4001 bp, Homo sapiens
ggcaaaaatgaaggtcctgggtcttcaacttgtagggtggtcatggagtgttttgaccttcgtgcacattgtataaagccatcaagtgctacaaaaaatgccataatgtagttcatcacataggtgaaaatgtggcagttgtatgcacacccagccacaagtaaggattgtcaccctccgacatgaacaaagcccactgttgaggttctgaatcacatgtcaagaggccataaagttggaaatgtgaacctcataaatcaatccaatccacagatgggatgataactccaagaccaggatttagaacacctggggactgtaatttccctattaaaacatagtcttcaggtgagatttgggcttttgtgtactgatttactccactgttgtgattaacttgcatacttggactcaacccacaagacgggttgactctaatacctttagctggaaaatgtccaggattgtgaatttctcttgttgactgggcccaggtataagctttattgctgtgcctgtgagatgggttcaaaaatgagtcactatctcacctgtggctgcatctatgtatgacagtcacaattccaaatctgtattgcgtttgcacatgagatttaggacctcaccactgagtactggccatgtgtgaggatgacaattctgtcagctggatgtacatatgagagtcacagcctcacctttgtgtgggtcctgttatgacacactctgtaccacctgagggctttatacaatgtgctttggtgtcataatacactatgacctttgttaaagtaagagaccaaggaccatgactgttgccctaaccctagctatgagggtcaaaatctcttctcttagctggatcccacgtatgacagtcatcatttcacttttaacctgtgactatatatatgtcacaattttacctgtgagcagggaccagtcacaaaagtttaatcacctgggtgctgggtcagctatatgtcacaattcttactttggccagagcccaggcaacagagcagaaacacatcacccacatgattggcccagtgatgggtcacaatcctctctgggagcagggcccattcaggagagtcatatcacccagctgcttggccaagaaatatgtcacaatcccccctgtgcacagagccaaggcaggatagttacatcacctgggagctgggcccaacaatatgtcccaattactcttggggaaagtgtccaggcagaagagcagaaccacatcacctaggtgatgggcccagagatatgccacaatttcttctgtgggctgggccctgggataagaataacatcacctggtgctggacccagcaatatgttacaatcccaactgtaaaaagtttccaggcaatagaggagagtcacatcacctatgtgactggcccaaagatatgtaataatattccctttggggagtgccaaggaaggagtgtctcaactcctccgtgctcagcccaaagatatgacacaaaacacactgcagggagggcccaagtaggagataagagtcctattaactaggggtttagccaagcaatatgtaaaaattattcctgttggcagatcccagccccccatccaaaagaatcaaatcacttgggtggtgcttcccatgaaaatcacaagcccttttgagtgcaaagcccatgaagcagaggcgattcacattacctaggtgatgatcccaaagatatttcacaatgctgtctgtggggagagtccagggagacaagtcacctcacttgagtgctgggctcagaaaatgtcacaatcttctctgatggaagagcccagaaaagaaggaagagccgcatcacctaggtgttgaacccactgatgtgtcgaaatctctattctgagcagagtccaggcaagtgaggagagtcacatcttttaggtgattggtccagagatatttctcaatgccccctgtgcacatggcctagacagaagacacacataagcaagattaccttgttgcttagcccagtgatgtcacaatgcttcttgagggcagggcacaaacaggatcagagagtcacatcattaagtaccaggcttagtgatatgttataaccttacctgtgagcagggtctaagtaggggaaaagatttatatcacctaggtgcaaagtagagagatacatcacaattcctttgaaggaagtgtctaggcaaaatagtcacatcacctaggtgtttattccaggtataagtcacaagatatatctgtgctgagcccagaagcactgtgaaatcactaaggttctagttgtatgtcacaattatacctgtgggaaggcccagtaatgagacctccaaatccaaacatttctccactccaggtagaactcctgttgcgttgggtccaagtacttgagtcacaatctcaacagtggactgcatcctcacatgagagccccaatcccttctccaagctatgtcctggtaagggagtcacagcctcaatgctgtgctgaatcttggtgagagagtcaccatttcgcctgtggactggatccacctgtgagagtcacaactccaacttccccctgcccatgggtgtgagcttagaacctcagttgtgggttatgtacatgtgggcatgtgacaatttctacttttggttctgtggccatacagatctctatatctcacctgtgaactgggtcctgttatgacactctctgtaccactcaaggggtatattcaacacacatgggttttataatcctttgaccttcataaaagtagaagatccaggactttacccattgcttgaagcctagctatgagagtcaaaatctctccttttggcttggctcatgtataagatttatcatagtgcctgtgagctgggccaaaatgtatatcaccttctcaactgtggagatccacaggcagatacagtgtcatgtgagataggaggacgactgagatgttctctgtgagggtgtaattgttattgtcctggggctgtttctagatattttcaaataaaataaattcagagactttaacctaaagaagtattgcaatggtggaagcatcaagcataatatctgcaaacatctaaaatactaggcagaaaagagctgtctttgaaatggaggagcaaggtatattagaaagaagggtgggagaggaagggccccatggagagtgacaaaatccttcaagattagagatggtttcaccctgaaatcagcctgttcttgggaggggcataaaaggggttgtatggttatatgtttactcagactgaagacggagcagaggccagggtcccgggggaaaaaagaaacaagcaacctgtgcctaacaagtattttcttctgaactctgaagacaaaagtatttaattgtttatgaggagcaaatgggaatgtggagaatctatgaatctgtgatatctaaaacaggatgtaccatctaggtaacaatggtaaaggtgtttctctgcagtaagttttctcacagaacacaaagaattagagagttttcttaaatgtcactatttaccaggactcactacccaccctgtctttcttttatgcttttctttgctgtatccattttttgcatttggctttttctgaactgtatttattataataacctggcaagcataggtgaaatgttttgccaagttctgtgagtagttttattaattattaaacttcatgaaaagggttatgggagcttatgatttatagatagatgctcagaagcatagacgtgcccatgttcgttgtgacaggcatgtgcagtggggatggtgctgtgggactgagtcctgaacttgtggagtctatgccaactctgggtggtgtcagaattaagatgttaaactcccagttggtgttgatgaattggttggtgttcaacaaactccatgtatttggtgttagaacaaagacatcacagcagcctcggctggaggtatactgtgggtcttttggggaataaag

SEQ ID NO: 1886469 - DNA, 4001 bp, Homo sapiens
tgaccaatgaaagggggatcaatttaaagagaaataaagccttaaataaataacaatgtgagtggtactcaggactaaaatagagaggggaaacttgagggatgagtttgggaaaatcctgaaatagatcatctgtacaatctcttctaataaaaatcctggcggggcattcacacttataatcccagcagtttgggagactgagttgggtggactgcttcagcccaggaattcgagaccagcctgagcaacatagtctctacaaaaaatttaaatattagctgagtgtggcagcgtgcccctgtagtcccagctactcaggaggctgaggtgggaggatcacttgagcccaggaggcagaggctgcagtgagctcagattgcaacactgcactccagcctgggcaacaagcaagactctgtctcaaaaaaaaaaaaatcctatagctcccataggattccctggttgtttgttgagtcatgcctttgttggacactagattcacagtctatgagggcagtgactgtgtctgggcagtgactgtgtcttctcagcctttgctcccagctccttacaaaagtgctggcaaattcaagcactccagtaccattcgtgggagaggactgagtcgccagtgattcatcatcctgtcctcagctgaattgtgtaatccccatggtgctggcaggaggaggaataacagtacttgttttagtagtaagagtagtaatagtaatagtagcaccaacagtaatagaagtagttgttatagtaataatagcaaccatttactgggttcattatatgagccaagtattaggcttaatgctatatgcatccactcattttgttctcgttatgaccctatgaggcagctactttttttttttttttttttttttttttagacagagtctcactctgtcacccaggctggagtgcaatggcgtgatcttggctcactgcaacctctacctcccaggctcaagcaattcccatgccttagcctccctagtagctgagactacaggtgcatgccaccatgcccagctaatttttgtattttaagaagggacggggtttcaccgtgttgcccaggctggtcttgaactcctgagctcaagcaatccacccacctcggcctcccaaagtgctgggattacaggcgtgagccaccacacccagccagctgttcttattatctccattttacagatgaggacattgaggcttaatgtgggaaaatagtttgcccaaagccacttagctgggaagtggcagagctgggagtctaaggtcagtctcactcccaggttggtgcccttcaggactgcagaaacaacccttcccgcaagggtctcccagatgcaatgcgttgcacctttctggaggctacggggctgctgtttcagcaattcatgtataatttaagggaatttggaagcagtctggatatttaaatgatgtcttagtaatgtaaaaatctgcttctcttcaatctgtattcttttcaaattcagtagactatctgagaactctcctgtctgtactccctctccaaatacctgcttggccccacctgtgccctgcccagcctccgatctctctcatttcactgaagaaatgagattcggatggaaaaatactggtacaagcttgaccgagcttctctaacagacactgtgcatcacgcatcagctgctgctgttgctatggtgacagccacaatttctcccagacagcttgggtctgaagggagggtggacccttggggaacaagtggatctctccaacctgtcagtccctctcaccttgcccgtttctctcacctcccccactcccgccagcccccacacttccttacatgatgctgacagggggtaccagcacccccaggccatcgtaattagcatctggccgtgatcccagtctcctggcagcacattcctcatcttcctcgccagccaatctcctttccccagcaaccctccgacagcactgcagcagctgccgcaccgacagcctccgcgccaaggtcacccaccaccagcaccagcaatgacgaagcacccgcctgctccctgggtggacatgacaccgttaatgcctcactgtgtctaaaccatttggggtcagaaaattgtgattctaaaaaaaagagaggttgtccttaggaagatgggtgaggctaaactccagttgctggaggggctaagagattcatacggcttaagtttcatcgcttaaggtctccaggagagagggaactgagcaggaggggcataagacattccagaagggtgaggaaagaatgagacaagtttgcgcattgacgcggcttggactctggggtgctgaagatgctggtggtgatgaggtggaggatgctggttggaatgatggtgatggcaatggctcatttattcagcatccgtgatgtgccagacactgcactaggcgctgtgcaggcactatgccctgcagttctcgcactgcctggggagtagaatgtggtacccatgtggtggctactgtcactgcgcccatttcacagatggggaaatcgagcctagaaaacaccccgaggaaacaatcacacgaatccaaaatgtgagatgtttccatgacaactagcctggatgagctcttaaaaatatcaatgtcaggccaggtgcagtggctcacgcctgtaatcccagcgctttgggaggccgaggtgggaggattgcttgagccaaggacttcaagaccagcctgggcaacatagtgagaccctgtcttaataaaattaaaaaataaaaatcagtgtcacttacaaaagggtagaaatcttttctagaaaaaaagagtaaagagacaaaaaccaaatgcaatttctgatcctacattggatcctgaccagaaaaattaaaacagtcataaaaagacatttgagggacagttggtgaaattttaatatggacagcatgtgagattgtgttaggaaatcatttttaattctcttcaagagtgattcgggagttgtgtttgtgtaggaaagtgttctttgtttattttattttatttatttattttttgagacggagtcttgctatgtcacccaggctagagtgcagtggcgtgatctcggctcactgcaagctccgcctcccgggttcacgccattctgctgcctcagcctccccagcagctgggactacaggcgcacgccgccacgcctggctaatttttttttctttgtatttttagtagagatggggtttcaccgtgttagccaggatggtctcaatttcctgacctcgtgatccgccctcctcggcctcccaaagtgctgggattacaggcgtgagccaccgcgcctggccctttgtttattttttacttgtttattttttttgagacagggtctcacgaagtcacccaggctggagtgcagtggtgtgatcacggctcactgcaacctcaacctcctgggctcaggcgattttcccatctcagcctcctgagtagctgggactacaagcatgcaccaccatgcctggctaatttttgctattttttgtagagacaggagacttgccatatagctgaagctggtctccaactcctgggctcaagtgatccttccacttcaacctcccaaagtgctaggattacaggcatcatgagccgctgtgcctggcctgttcttcttagatgatacaggctgaagtatttagagaagtgtcatgatgcctgtaacttacttgtagatatacttacatacatatgcatgtatttacatataaatacagcaaaatattaacaatttttgaacctagatagttcatcattgtgtcatcaatagtactattctggctgggcacagtggctcatacctgtaatcccagcactttgggaggccaaggcaggaggattgcttgagcccaggagttcaagatcagcctggacaacatagtgagaccctcatctctacaaaaaatattttaaaacttagccag

SEQ ID NO: 1886470 - DNA, 4001 bp, Homo sapiens
cgaactaaatgtaaccatgtcctgaaggagggaaaacagttactcagattggtgcatcggattggctggttgtcacagaggccttctaatagggaagttgggccagattggtgtctgatgcaaccaggaacatcaggaagtcttcgactctcaggaggaaaggagctagcagggggaggttggggagggcagaaacttgcctgcctgcctggcaggttggcttagggatagccctccatggagcctccaatcccctggcaacttacccgtggtggtgagggggtcattttaaacaggatatttcaaaagcggctagtgcagggactaggatatttttggttacttgagctggcatggttatatagtttcaaggtggctaaaatactgtaaattctaagtttcttggggtcaacgtactttcttggaaccttggattttcccagatcattaccctttggtgctgtctgaccactttctttgtcaattgtccattccttctaaatgcctcccttttcttcaccctgactttaaaaacctgctaccctaggaatactccacacaggcctggatacacatagacacttcctcaagcatccaagaagacctgtggcagccatttgctgctgcttcctgtttccatggtggccattttgtcacatccaaggagagggcaagaatagcctgccgcattgcttctcaagtgcactgtgtggcactgattttttccaatcatctctaaatagaggtttctctccccctcctcccagctcagcatccgagggcacaatgagcgtgccctgcatttgaaatctgacatctccctctctcactcattctctccatcttcagcttggcagagcgtttaaaaattggtatccctttaactaggcgagctattcttctgctgggagatgaccttttacacagaagataggactgtcatacatgatctctgacatatggaagtttcctgggtgttccaacaaggaacagtaagtaccacaccaaaagcagtgggtgtttatgtgcgacttgtgtataaagatatattatattactatacatggttctaaataaattattaccagttcttaaaagtactgccagccctcttgaggcacatctgttcaattttttgttttaattgaaaagaaaaattttctcagatttaaagactcttggggaaaaagatggggggaagattattgaaaagaggctatttttccgtgggttttacagaaattaattgtagtctcaaagttatgaaaataacctttaaaacaaaaaacaaaaaaacaaaaaaaccctgccacagacttggggagtgaaccactgaatggctttttcttctccaagatatgttatcctgaagtcttcaacatgaccccttgtttcttataagaagcctaatgtctgattttccctcaagcagaacattatttgttattttttttgcaaaatgttaatctatcttgtcatgaagttgtgggattcacaaagcagaatgaaatgtgaaatttccacaatgggagatgagaaggatctgctcacctgccacaaatccactgggtgctgctctcagcgttcgcgaacctgaacttcagaagcttgtcagttgctcaaataatgcagggaccatgggtttttagtgtagcgtggaagcagcactcacacagtctcatacaatatgctgtgagagagaatggactgtgccagggatgtactgagtccttgcagttctctctagtttgtcagttaagcaagatggctgctcttggaatggaagaactactctctttgctgttgttggtcgctttctcaaaactactggaaaaatggatcctgagagaattcctaggttatgcgagggagatcactaacagatttactcactggatgatgccacccctgacaaaatagaaggaaatccgatgtggcaggaggcgtatgtaatcccaccctaagccagttccaggtagcccatcagaattcagtgatgacagcctgattgtcactcagcaactcctccaatctctagaatcttttttttttttgcttccacatatatggcctgagtttctgattctcagggtcattgcctaaggactgtgtagggctcttgaaccccttctttaagtagccacctgtcagatataaacctagcaataggtctgtcgctgaggctgaaattctgactttacagttcctaatgttgggttaagaaaggaattgctccctatgaaaatgcaaacacctccaggaggctaaaacaatattaatgttatgtccgtaatattatttttatggtttgataatagtcttacacgtaaccactatatgccttatctcatctccctatgataactcagcaaagcatatatttaaaaaaataagcaaacggggattcagagcatttaagttgcttattcatatatgcacatctagtaaggggtgaacctggaattcaaatccagatctatctggttaaaaaactggtgaacctgagtcctgtgggttttttaataaggtcctttcctatctgcttactagttgaaagttgttttggtaagagagttaaacagagagagaaagagagagagagagacagagacggtgggagagaaacagagagagaaagagagcgagagtgagcattggttactttagggtcaagaagatgctaagagaacatggaatggtgctaaagaaaacattacctggtatagtttcgcctgagatgacctacccttcggtagtttctttagtgcttctttgtgttagaccaaaccgcatcattttgtaaccccccaccccccaccatttcacacatcttggtcaagtgaaacattccactggggttcggggcatgagacacatcctgcccagccacctgaccacaaggcacaggaacatccttatcataccctgctgggagaaagtgcaaggaacatcaccttccgtgggaacaaaggccaaactgcctcatcatggcaatgtcttagcaatatcatcccaggcagcaagccatcctgcccaggcccctcctgcccatacctgtgagtaccccagcctgtaagcagtggggggcactggcattaggctggtcctccacctctggaggtcttatgctggacataaagcctgcatttgctgtatagctgccacttcctctctgtgtgtgtctttctttaaccctcaccttcccttcaaaacctaacacgttgctcagttgactcgtagcaggattcctgaaccctttcccaggatcctttttcttgaaactgcgggactgttttgacatgagctggttgcagttggagagattggagctgccagggcctataagtgatagcagccttggtgatggtcaaggcagcaagtgcctcagctccaagacaggcagccgtttattcatgctcctcctgcagatgtgccaaaatgtgtccaaacatgcaggagtgttcatggccctaattgctcagccacagtcagacggaaagttttagtaatttttcctatctgaatttttttttcaattgcaaagcacaaaaattggaactctaaatggcagaagcaaaaagggatgtgtgggctcatataactgaaaaacccatgggaacatcctgtggctaggggtagcatttgatcaggagcctaaacaaagtcaccaagtttcttctcctttgtgttgcttggaactgtcccctccatgcttgttcttttccttcttagtgtgccttcttagcgtcatgaaatgcgtacagcagctcagattctatgttgtctcactacagatgctctaggaaagagagaacattgttttcacagaagtccccgcaaaagtcccatgggaacccagtgggtcaggtgttcacccctgaaccaatcagggtaacgtaggagggatgcaagatgctgattgggctgagcctggagtcagccctgcccaaagcacattaatggaaatgggaagagagaaatatttcaaaattgctgccttc

SEQ ID NO: 1886471 - DNA, 4001 bp, Homo sapiens
gaggtggaggttgcagtgagctgggatcatgcccctgcactccagcctgggcaacagagcgagaccctgtctcaatcaatcaatacacaacagcgaaaactaatatactgtgacaggaattaaaaccaaggccaggtgtggtggctcatgcctgtaatctcagatctttgggaggccgaggtgggaggactgcctgaggacaagagttttcagaccagcttgggcagcatggtgagaccttgttcctattttttaaaaaaagagaagaaattaaaactatggtgagattccaccatacacctaccagaatacctaaataatgataaatctgacaatactaagtgctggtgggaatgcaaggcaactggaactctcataaaaatggtagagaatagagaactacatacacataaaacattaaaaaacgtgtaaatctgagtaagtcccatgtacagtaccaatgtcaattacctggcttctatgctaactgtagctatgcaagatgttaacactgagggatactgggtgatctccctatacatctctttcttttaaaaaaaaaaaaaaaaaaaaagataggccaagagcagtggctgacgtcgtaatcccagcactttgggaggccgagacgggcagatcaccttaagtcagaagtttaagaccagcctggccaacatggtgaaacccgtctctactaaaaatacaaaaaaattagctgggcgtggtggcgcacacctgtaatcccaaataactcgggaggctgagaaagaagaatcacttgaacccgggaggcggaggtccactgcgctccagcatgggtgacagaccgaggctctgtctcaaaaacaaatagagatgaggtcttgctatgttgtccaggctagtctagaaatccagggctaaagccatcttcccccttcagcctctctagtagctgagactacaggttagaaccaccaacccagacttctccctgtacatttcaataattatttcaaaacttaaaaatctgaaagaaagcaaactgcttgatagtggcagaaagcaagcatgaggggattctggggcttgctgggggtgttggctacctgggtgtatgttcagtttgtgaaaattcacggagcgcctaagctatgcaccctcttctgaatgtgttacccagtactccaataaaaggcttttggccctggagaggtggctcacgcctgtaatcccagcactttgggaggccaaggcgggcggagcacctgaggtcgggagttcgagaccagcctgaccaacatggagaaaccccgtctctactataagtacaaaattagccgggcgtggtggcgcatgcctgcaaccccagctactcaggaggctgaggcggaaaatcgcttgaacccgggaggcgggggttgcggtgagcccagatcgcgccactgcactccagcctggtcaacatgagctaaattacgtctcaaaaaaaaaataaataaataaaacagccgagctggaggtgtgtgcctgtaatcccagctactcaggaggctgaggcgggaggctcgcttgagcccggaaggtggaggctgcagtgagccgagatcgcgtcactgcactccagcctgggcgacacagcacgactcttttaaaaacaggttttgttgagtgccgcattgatccggtccctcccacgccccctgtgcttcacaaaaacgtcaggtccgagctccggcgcggcggtctcctcctccgcgggtccgggccggaactcggcagaaggacgagcagctccttggggccggcagtctcccatcgcactgagattgacacggcaatgtttcggatactctgggtaaaaattaaatgtcttacgaaaagtcctgtcacccgtttcttgattactttttacggcggcttccagaacctttcgtcagcgcgagctccatgcccggaggccgccgtcacctgctctccgggaaggccctgggcaggcaggcagcgcgctgaaggagtccgggagcagatcgtgcgagagagcgcgcgggcgccaggcgcgggggcggggccagacgtgcgtgctggcgggagcgcgcgcgccatggcctgaggcgtctgggaacatgcgcggcgaggggacgggcggggcgagtccgggaaggggcggggccgcagccgcgcccctgacttccaccgcctgcgggtgagaccgcctaccatcgcccggcgcgcttgagcatgcaaggggaggtgggattcccctggcccgcccccaagccacgcctctggcctatgagaactgagctgtcccgcagggaccgagagaggagcctccgctttcgcaggggctgggcgttccgggcgcactgcgccctctgttgatcctcttaggagctgcgtggggaccgtcgggcctgccgtttcgcacctggccgaaaggggtcgctgtgccgggccagatcctatgtaaatttagctggataatctcagcaagagaaaattggctgcagtgcaaagaagccaggctcaaaaggcagggttatcccatttctatgacatgtcacaggtaagactatggcaacatagatcagtggctcctaggggctgggttgaccaccaagaggcatggggggcattggaaatgaaggaactaattcatatcttttttattttgctttggttttatttattatttatctatttatttatttttgagacagtttcgctcttgttgcccaggctggagtgcaatggcgcgatctcggcccaccgcaacctccgccgcctgggttcaagcgattctcgtgtcttagcctcccgagtagctgggattacaggcatgcgccaccacgcccggttaattttgtatttttagtagagacaaggtttctccatgttggtcaggctgctgtcgaactcccgacttcaggtgatccgcccaccttggcctcccaaagtgctggaattacaggcgtgagccaccgtacccggcctgttttattttttctttaaatcatatcttgatcatagtggtgggtaggaaactatgcatttgcgtgtaggaaacacgcaaaaccaaaaatcagaaagtgtgacttctactaaatgtaactactttcatttttaaaaattatttatttatttatttattttttaagatggagtgtcgccctgtcacccaggctggagtgcagtggcacaatctcagctcactgcaacctccacctccccggtgcaagtgattctcctgcctcagcctcaccagtagctgggaccacagttactggcattcgccaccatgccaggctaatttttgtatttttagtagagacggggttccaccatgttggccaggctggtctcaaactcctgacctcaagtgatccgcccacctcggcctctcaaactgctgggattacaggcgtgaaccactactgtgcccagcctaatttttgtattttagtagagttggggtttcaccatgttggccaggctggtcttgaactcctgacctcatgtgatccacccgcctcggcctcccaaagtgctgggattacaggtgtgagccaccacgcccagccaactactttaattttttaaaaaagatattaaaaccagaaagcaggtggttgctggagactgggaggagggggaaggagtgactgcttcatggagtcattttggagtgacggacatgttttggaaccaggtaggctgtgtaacactgtgaatgtatgaagtgccattgaattgttcactgtaaaattccaagaaaacctgcagactcctgcctttctgtgaagagttcgtgtccactgtcatcgtggggtgagctgtgattctgccttctgctctggcctcagtccccaagcacccagcactgtgagcatgaggcataggaggggaccacggtgtaaatcgatctctggtcacggaagagtgaaggatttaaaggaccatggcctagcctgggcaacatggcaaaaccctgcctctacaataaaatataaaaaagtcag

SEQ ID NO: 1886472 - DNA, 4001 bp, Homo sapiens
aaaacaaatttgcacatggactaaacagaaacttcatttccccctaggtctctcctggggactacgcaggagggctctgggccagtggggagaatcttcaatgcaactttcatctctggttatcctccctgagtccatggggatttcataaacattatgttgctcaatttcagttcactggcacagagtcgttccaatgtgttctaattactcagacataaatgatttctggtgcactttaaatgacttcggatgcacttttgtctatcaggctcctgatttgtcactccctgggactttgatgttgtgcttcattgatttcttttaaggctcttcagaggtatatttattatagacgatacatctccctgttcatttgctccataattctgaaacactttcattttccagttgtcaacattccacccctaccccctgtacatatcttgtactagcaggaagaagacacatttattgagtgcttactgaatgcaaatctagatgcgagatgctatgggtgagtgaaggtgcacaaattaaaaacaaaaacatccgacattcattcctggccaagataatatgcttatcgtttagagaaaaggacagtgcacacccgttgacttacatgacatgacagaggaggaagaacacagggagggtgggggtttggtccatgagctgtgagaggtacttggaagagaagagtgatgagagatgggtggggtcagagctttgcacccagatttccatgatgatgggcaacagaaagtgtgtagcattcagctcagttttgtttgtttttgagatggggtttcactctgttacccaggctggcatgcagtggtgccgtcatagctcactgcagccttgaactcctgggcttaagtgatatttccatcccagcctcccaagtagctggaactacaggtgcatgctcccacatctggctatcttcatttttgtacagatggagtctcactatgttgcccaggcttgtctctaattcctggactcaattgatcctcctgccttggcctcccaaagcactgggattacagaaaggagccactgcacccagcagctgagtttttttgacaagctaagaggcaaagctgccactttttgatgtgtgcttgatagaccctagagcttcgaagagtgagtggtgtgtactgctcaagtctacttgctctgaagacagctacgtttatctgaacaggcaccttattagcctttagcctctccccatagacatgaggacaggagggacattggagtggtattttgacaaggcagctggctgccaatctgaagatgtggtgggagtcccagctccgtcctgttcccataggtccttgaacctcagtcttgtcatctgcaaaatggaggccatcctatcttgctggtcagccactttggatcgagccgtttctatgtgtcaagaagggggcagatccacattttgtgggacctgagcctggatcaacttgggggaccccgttaggaaaaaggaccccagatgatgagtgcctatctgggtttctgccccatgatgggagcccaccagtgttagcaatggggtcttcaatgcttttttaagctgtggacttttttttctccccaattatttgtggcaccgctgttcagtgcttaaaacgggtcacagtggagcttctgttaatgggaacgcttctttcccctctgaagttgggctgagaggcgtctccaggaagcatggtttgaacctgaaccgtctgttgtggtcaagatcagatctgaacccagagctcttctccactcccctccctgctccggggtctctctgggagcacctgtaagctaagccctgacctgcaagggacagtgtggacctacttcgcgggcagaccgtggtgacagttcttgctccctcaggctgctctgccgtcccctgggctggcttaacggtccatctgtgaaaggaccttcggcttcctggaaccccagcaccaccctctgcctcccgcggctggaaacctgggaaggaagtaaggcgcacacgccacctggtggccgcttcctggagctgtcactccggacaccgcccctgggagggagctcatctctgggcccagcttgtctgcggtgctggccagcgaggtccaggcgctgctcctgagagccttggctcagaggagcatctggcttgttagagcaggaggttcttgtgtcacagtgcccttgattttcccactgaactgctgccaccgtgaatacgagctcttggagatgccgctgtctgccctcttccctttcctctccctcctcctcctcctcttccctctcccttctccctctccctcctcctcctcctcttccctctctcttctctctctccctcctcctcctcacccctcctcctctgcttcctccccctcatcctcccctttatcttccgccccctgattgctattgtcctccccacctctttctgtccctctcctcctcctgtcccttctccctctcctgtccccccttctcccctattttcctcctctttctccttctcctctcttccccctcctccatcctcttctttctctttcttctcctcctttgctcctcatcctcccttccccacccctccccttcctcctttctcccctgcctctttttccaccccctcactttggctcagccagctttcttttaattaaatagatacttattggcagtacccttatttgttccaagtgaaactggccggagggcagttcctgagttagagactagatcatgagtcccagctgcggttgctgaggggttgaaatttccctcagatctagccatccattccctccctcactccctccttccctccctccgtccgtccctccctccctcattcattcatgaatgcacgcacagatttaacaaatgcattttgaggctctgtgccaacatcccctcacttccgactttgaccccagaatctttagcacatggcattcctctaacttccctacctggaaagctcccattcactttgaagactcaggttcaatgctgcccttcggactagcctgtgagcacttattcctgctacccatggtcctgaggtcttcacgagttttctggctcagtcttctctggttcccatcccgggtgctcagcagtcaaagccagccttgcactgagtcaaaaaccccagaagctgtttctgtctgcctgggactctgtgttctccaatcatcaggcttgttcccctcctttaagggtgtcctgtacacagtagcgtccattgaagtccagaaatgctagcacagcattgtggaaaaagacaggtgcatatgtcttctgcattctttgggttttgccaatcttactgtaatcaagctgtctttattctcaggtattcagtgaaaatgagttgtttctgaggactataccctggaaagctagtgttttttctgtcttgtctttatttctgtctctccatattcctaagctaatgctgtgaacgggaaaaacaaggtttgctctttgatttgttgcagagcccaggtcaggtagccatttatatttaatagaagaatagatgatgagagtgtctctccttcccctaggcagcatttccgaagcttatctgtgacattatgaaaggtaacactcttacctggtatctactaggagggtattgttcaagccatcagtcttttgttcaagctctggcatgcagaaggtacccaggaaatggttggcaattttaaacattgaggtataacttacataacataaattatacaaatctggagtacacaacattatgaatttttacatctgtgtatctctggattactaccactcagatcatgatgtaaagtatttttatctcctggaagtcttcccactgcccgtccaccaacagctctccctactctgtcgtctctttcctttggtaaattttgttcgtttctgagagtcatagagatggaatcctgacctgatgcatacatctgttt

SEQ ID NO: 1886473 - DNA, 4001 bp, Homo sapiens
tttttatccagataagatgaaatggctttagaacttttgctttaataggaagaggaggctaattggcacactctttgcttgtatctaactgtgtgcttaagagtgtgaaatcacttggtagaacaaagtccttaaaacaatcatgaacaatggtgatagaaaaggaagctgtgggactcctcagccagaaaagggtctctaggtaaagattcactttgccaggaaacctcacaaattataaactagtggcatttccagatgaatggtattttactttatggttctttgaagcacgcgtgaatcattctgaaatgattatatgaagaactggttttatgacgtgagcttatgtggtacgttagctcccagttggctatcctggggaagcaaagacagtgtggttaatcgagagaatcaaaactaaatttctagacctgatttctgaccctagctgtgcctcgaaccagctgtgtaactgggcaaattactttgcctctgccaattttggtttcctggctaaagatttttactagagggtctctaataggttgccaggttgagaaggaaaaaaaaaagtaaggaagaaaggaaagaaggaagggagaaggaagggaggaaaaaaaaaaaacaaaaacaacacacaggcatccacttaaatctgaatgtcagataaacaaagaatatcttttagtgtaagtatgccccacgtaatatctgggacatacttacactaaaatcaaaccactattcattctttttctgaaattcaaatgtaactgggtattctgtaatttatctggcaaccctaggcctccaattctataattaatgattctgactgtatttgtttctaaaagtgtatgaaggagagagagagagagagaagcaatcccctgaaagcactcaccagccggttgctagtctgcaaaaggacagctcatggcattagagtaaaagtctctttaggctgagaggcagccctggagaaaacaacgccctttcctgatgacataggcccctcccatggctgtcctgagagccagacctctttgtgggcctagagagctctgtgccctgaaccgtctcagtggcaggcagtgctgtgctgagcgccctaagaaaaagcctagtcccttccatacacaaagacaattgcaattaatccctgttgtgagccaccaggcaccaaggatcacagaatcctcacaacaggggcctaaacaaatcatccttaggtggaaaccaggaatggatccagcctcccctttctccctaagtaatgtggacatagagggcatccaccccaacctgtttgttatgggactgggtaagagtgggaagatagagcaagatagagagaggaagaggatgtgagatgctggaagtcagtgttgcagtcagttagcaaaaggccgggtagttagaattgggataccgagatttcccccacaaccttaaaaaataattgcaggtaacactttattctgtgttacagtgaggtccctcccttaagcataatgactgcttctttggtccatttagtttgggtcttttgcaatttatcagagatgagttccctggagtctgggatcccattcaaagcagtgtgggcgcacgcataagtgtgttgattgcatttccacaatcctcagattctgcccttgagaggggctgtccctccactgattcctggaatggatgggcaaacagagccccagtgtctccaaaagcacttcagaatccccctcaccaccaccgccacgccgccaggaaatgaattaacctggacacccagacagctgccattaactcgacctcccctccataaagaagcacgcagagccggagtgtaaagaggatatggttaggatacgatgtttaacagagagaaagaaaggaggagaaacaactgtttgctttagatgcaaataaactcaacttcacctttaaagctgaaaacctgtgcccttggcaagacgtttggggactgttccagagatattaatcttcctccgtttacatgttaaatagatctttggaaacggtttctccagcactgttttttctctccggcacaatctccttctctctttctttttttagtacagtcaggactccccagcagcgagaagccccgggggacgaaggtggaggcaccaagccgtgtggatttcagagccatccgcggctgccggctgttggggcggccaggagtggcctgccagcagatggcgctgcgccgcacgttatggaccctcgtgtgcccgaccggctcagggaaggagacagacggctcaaagtttctagtgccattcctggactgaaacaaatgtttgtggaattaagtagtgatttcctttagtgtgcgccactcttactggctgtgttttcaggcctagatgttaacatatgccacatattacttttttttttttttttttcctggtgaagtcaggggtttccaagcactcagcctcatcctaagtgttcatgtcaactagcaaaggtctgcattttctgataaaataacttataaaacttccatattaagagctaaaatggtttggaagacaaagaagtgctgagaaatgtaagtaaacagagcacctaacattttgtctttctaaataaacaaacggggagggaggtgttcctttattaggctcaaaaattactcatgagagcggccaggaggagattcaaggcattcgggaaaaagtgtctctggctactggggggaagggggttgcattatgtgattgctggaaacactgaggtgcaatgatcataaatgtagaatcgtggagaaaatttaggatatgctcggaacacccaaggcacagccagaagtccctgggttttcagaacccagttaaacaacaatgggttaagggtgataggaattgccagtgcaattgcttcaccatgccaagtggctccattagttagggttcagtatgtatttaatgttgccataaaatctgtcttctcaaagtaaacaaggcaagtctgtgagcatctccgacaagatgtatgaagctttgtttgggataatggatttgacatgagtaaaaacactggggattaaatggacccagcacggataaatatgactaattgtcatctcctcgtatcagcgtaaacatctctagcaccgcatactagggagagatggtggagcaagggggtttgggggcgattagtcactgcagaattgattcacaactgattgattaagcagggatggaggggaacattgaggcctttccttccacatggaggtgaatgtcgcgttttagaatttccaagcatttcttgctcagattgaactgtgagtcacagccctaaagagtgagtacacagctgttctgttgtgtgtgtacacggtaactttgggcttctttttcttaaatgttcattaatcttttaaaactggcagaatggcccgagcatcttttacacaaaagaacaagatctgaagtcttgtcatggactttttagaagttttcagcaagcgactcaattcctgtttctcttaatgtacatagagataatatttaactttcctcacctatgttactgctttattttgtaaatatcgctatgtggatttctttttcttagatgatgaatacatatatctaatactaaaatacattttttcaaagtaagcaatattctcaggctttgaaactttctcatttggagcagtaattatatttaaggtcattaaataatctgaaagagaatattcatttactaacatatggtttttaacatttgattctgttttttctttttacctgttttcattttttaagctaaagttcaaagacattttctaaccaaatgtcatttatcatatcaacatatgctgtttataccgtgaatatagttaacgtagtgaaatgaaactttagttgtgtgaaaaatagcaacttttaaggctcaccaaatattacaaacactgcaaattctttctgtaatatccagaagttgat

SEQ ID NO: 1886474 - DNA, 4001 bp, Homo sapiens
gatgcaataccttgtgaacttattttttggtatgcccctgtgctcatatactaccttactacctttatctctctgttttttgtttgtttgttttggagataggcacgatcattggccactgcagcctggaattccccggcccaagtgatcctcccacctcagcctcctgagtagctgggagcaaggcgaacaccaccacggctggctaattttaaaatttttttgtagagatggggtccgactatcgtcttgaactcctgggttggtctcgaactcctgggctgaagcagtctttccacctcagcctcccaaagtgttggttgggattacaggcgtggaccgccacacttagaaatgacttttctaatatccttaaatcagagctcatgtaaaattttcagccttctcattccacctccctccgaactacaagtcttaaaactaagaaatgacagccattcggtagaagttaaaacactgtttcgctgcttatttctacttaaaaaaattatatacatagatatatattatgtaaatatatataattatatatatagacatacgtgtgtgtatatatataaataaacgtgtagaattggactggggtcccactaatatccacatttcaaaacagaatctaaaactccctaaaacagggttgggctcggcggctcacgcttgtaatcccaaccctttgggaggctgacactggagatcagtctgagcaacaaagtcagatctcttttctactaaaacaaaatacaactctctaaaactaatacaaaattttgtgtgtatgtgtcatattctggagaaaagctccaaggttttcctctgggtcttaaacaggactaagaccccccacccccaaaagaatctctgttctagaggctaagcatatagaagctcatactgcattatcaaactggaaagttaatagaggattttcatggtcatatacaggagaggtggggaaagctgtctatttagactgtaaactcctaaaatgttcataaatctcaatggaaattaaatccaccggggtgggagaagtatcacaatagacaaagaagctaaaggttaatgaagagaaggttttaatcagtggttacttttgtgcttgggatcaatcctcagtttgtcctccaacgtaacttttggcattattcatttcaaagtctgaacagtatccataaacccaatacgaaacctatggatccagagggtccgaccgaaaacaaaacaattatgtttccgatgtgaacgcatcaatagcttacttttgtagcgctttataaaacgctgtcacttgctgctttccacgtcatgatattcccggtcgggaagagtaggacagcagcatcttttatgaataaggaattttttggattcaatttgtgaggtgtgggacgctcaccaggttgcgcgaaaaccatttttctacatcgtcaagtgcacgcaccccgtgtctcatagtattagtgatgaagacgaggatgaaactaccaaagacatcagtggggagtgaattatacttgggggaggtgtaagcacgtcgaaataaggaagctgagagacattttgtgaaagagggaaggtagcgttaagaggagccttccatcaggggcaacagaacgggggcaggcgtggcgtctctgggactgccggaaaacgacgtgagggaaaaactcagaggctacgaaaaggcgaacagacggagggcctgcctcaggggagctaagcagctcgcctgaagccccccatctggaaatgacgtgtttaactcggcgcccctgcagctccggccgcccttttttgtttaactccgcgcccctccagctccggccgcccttttcgtcgctctcccctcgcggtcgctcacccctgagatccctggttccactgagacgctcagcttcattcggcaactcgcggacaccaagcgccacaaattcaaatacgagatctagagacgctgggtctcaaacgtctcccagagtgaaagacagaggaaccaatcgaggctcggctgacctcagacgtctaaggcgataggcgttgctaagaaaagggggtgggacgatacccagttgccaagacgacggcttccgggtgggcggcttgaggtggcttccggccgccaggcgagactccgcgggaaaactccctgctagagagactaggagatttggggctgcggccgtttcctccggagcacccacgggactgtgtgctggggtccctccaccggctgtgtcctttattcttctttctcacccaacgatttacctgaacggttataaagtgcacgttatttccctaaggtaagcgtgtggtagcgcctcctcctcctccaacaggggggtaacagaaacctgctgtcaactttgttacccaacataactgtacttaaccacaaaaagttgaaattttggatctttaaacattcaataacctcttgctgtgtgaggttttttaactgcactacatacattttgtagtctttaaccattgaatgcgatttaagtttacaatgaaatttaacgttctggttgtttctgaccccaaatttcatctgaaccagttaatggacgaagaactgaaattttattttctgtgacagtctcataggttctcagacttaagttcttaatcgcccataaatctgaaggcaggtgttaaagatgagcaggtgatttgagcccagtccatgccaacactcaaactaattcagctgagactcctttcgttaggagcattattttaattttaaaaattttaaaccgaatggtaagcatggctgctttagtttcagttgtgtctcatttgatgatgatagtcccacacaagacgatctcatttgtcaatgaaagtaaacattagtgaccacacagctttctgcagataactctttaaacgaacatcttttatcagaccacagaaatcattgttattgtcactaaaatgtaaaaactaaagcaaaacttatctgcttatcaacaatttcttcctccatagctaaggtagggaagcatttatgaaagcttagatctatatgtgtttgggatcctgccaacccctttcttaaaattccatcttcaaaactccctgctaatgagcacttttccaacagcttggatgaaacattctgaataattcgtcagcctgaaggttagaaatttcattaaataaaaaattaaatacacagaatacttaagtatgaaacattaatgaactgagtaatacattcttaagaagaggaggcacttaggaaaacacaggccacctgcattgtggagccatttaatgtgatgagatttgataaatgggtaagagatcaaaaaatgcccagggtttcaaaagagaatgttccatgagcagcttactgcctacatagaccatttgaaaatcaaaccaactcagcagaagcccaagaggccttcagatgaacccgagtatcctttggatgtcagtgttgtactgaacaaagtcagttgaactgttatttatctgacaagaaaaaaaaatgcctaaattttgtaaggacttacaccattcatttaaaaatatatagtgatcttagaggttagaaagcacagaaaagaaacttgaacatagaggtacttaaaaggagaaaaataaatttcctccggtagtagacatgtatttggcattgttcactgttatctccttgatgtcctctctcctcagcttggctgaatcctacttacgcttttaagacccaggtcaaattgtgaatcttttgtgacctagtccatagtcacctctctccctcctgaatgcctataatagtctttatttggcatttttttgtattctttataatgtttcttatttatgtttatgaatatatcttacatataacttgcatcatctaaaccctaaactactcagaattgtgttcaccatgtacctggcagacagacttgaacaaataagttttgatgtaaaactgccaagattaatactaaatatagttg

SEQ ID NO: 1886475 - DNA, 4001 bp, Homo sapiens
gaaagccaagtgcaatatgggtgttactctatgccaggtaaagcaagtcacacgccatctagatcctgctccaactgataaaaccaaaacactggtggaattccagataccagcctgcacttctctctgtaggcatctgggttagtcctaaataggaagtcctaaaaagagtcactctgagaaggcagggggtgagagggcagatgaagcagccaagcacacattaaggcaaatcatggctttcctaaagaggaccccaagctgggcttcagacagtctttgaaccagcaccagtgcaccaggccaaggggagggaggcatcctctttgggaagactggtaggagcttggaagaccccgtggcttccacaaactgtagatttcccagtgaccactgctcagtccaacagccagtgacatcagctccactgtcgggaagtagaaaaccagtgaaggtccaactagcctggtccctgaagcatgactggcccttccagaacatacacctttcccctatcacctcctctccctgaccccgaagagcttcgggcacaccaccaactgaccacctatccacagtgacctgcaaaccagagcggggagggtatttgcctagcttggcagggaggggcgagatccacttctgccaccagtcaccagctggtcccaccagcacctacccagcaccggcggtggacggtgagcggcgtctgggcccagagctgggtgccatcagcagtaagaggacccctgcgctcgcggggtgcccgccttaccccgcggggaggggtcaggcctaggggccacggcccgcttcgctctctgattttcacctccccagggtctcccaggggcctcgggtgtccttcccggatcttgcgcgaagtcgcgggggcagggagagaaacgcgggtacccgcgcccctagaagtcaaatgtttggcaaatagcatttgggaattcgttggggtttttttgtttgttttggttttgtttctgaacccccgggggatatttctggaaatctcaacctgagtcactagagagaatcgcgcctttttctaaaaagcccaggggccgtcctctccggggagggggacgcggcgggccgcgaagggcgctcgttcgggtgggggccggacgaccccgccacgcgcgatcgggccactctgggacgcaggagctgaacccaaccggagacgcggccgggaccagcgctgggaggccggaccccgccccggccgggcccccacgccctccgccgcgcctcgatgcccgcgacccgacccgcgccccctggcatcccaggaggccccagccaagggctcagtgcccggggcccccagcaggtgctggcgccaccggccccccgctgtctcccgctggtccccgcgccccggcgtccccgcgccgcactcaccgccgcccgcgccgcctgtcgagccgggaggtctgagctggcctctcgggcgccccgagaaaagggccgggcggcggggacgggggcgggggctggacccgccggggcggagcgcggccggcttgggcttccggcttctcccgcccccgcggcccgcacctgggccccaggcgagaccaccgccggttccccgcctcactctgatcgcccccaggctccatcccacacccggctcgctcgccaccccagagcttcccaggcttacccccgagacgcctggcgcggacctggtgtctcccccactctcctatcctgcccctgcctctcggtgccagccccacccgtccgcccccgacagcctggccctccctcctgatttgccgctcgcggctctccccactttcccccctccccgcgccgctccaccacttccaggcggcgggaccaccaacctcgaccccggacccgcgctggggcgctcccggccctctggagggcggcccttctcttcctgtaactctacagacgcgtccggacagaccaagacactctctgtgccttcgggcatgttacccatcctctctgagctcggcttcctgtctgcaaaatgggcacaatagcggtcctgtctcctaagaccgactgggagtgaactgggaagatggtaaagtttttagcacaggataggtattaggtaaggcttatcagctgcctgtccgctttgtgcccccagggtggtccgtgccgccaggtaggcctttctcagccatcactgaaagcaagctctggaaatcagtagccccatttcacatccgcccctaaatgggtgccatctgcccgtctgcttggagccccatcggccggctgcagtgataacagcagcagcctggatccagcaggctctctgggaaatcattagagggaattaagaagcatgcctggctttcagagtacacagagtcaggagatgggcagaaccatgatgtggccatccacaaacaaacgccatttggacagggagcttccgagccccatgctggcaaagacctggatcttagaaccctccggtgcccaaatcccatgcctttacccgaggtcctaaagatagtgaggcccagatagggagtgtggcttgtcccgggtccctcagcaaagtgtccccagccccaagttcttgccaccttgcgccatgtccactgacgggccaccctcagccgtggacgagttaccaagttggaagggatttcaaagttctcccaagcataggaggttcccatgtagatgttattagtgtgggcaacattttactgcttttaaaatatgaagggggcgggtgcagtggctcttgcctatagtctcaggactttgggaggccatggccagaggatctcttgagcccaggagttcaaggccaggctggacaacatagtgagactccatctctataaaaatttttttaattaaaagaataataataaagcggtggagtggtggcatgtgccagctactcaggaggctgaggtgggaggattccttgacctccggaggttgaggctgtagtgagctataatcgagccactgcactgtagcaagcaagcaacaaagaaagaaagagggaaagagggaaaagagaaagaaaaaaaaaagaaagaaaaagaagaaagaaagagaaagaaagaaagggaaaagaaagagaaggaaagaaggaagggagggagggagggagaagagaagaacaggaaattggattacacccaacctctgccattcctccattctcaggatgcaaccaaggcttgcaaaggtaccaattattatactgacattaagacagaatatcacagaccattgctagggagacataacacctagggaaaatctctcagagataacgttcaagaaacatccctgtatgaatgcttttcttccttccttcctttctgtctctccctccctcccaaccttttctccttccttccttccttccttcctcccttcctcctttcctcccttcctcgcttcctcccttccttcctgtaaaaagcagtagtaagcctgaattttcttctgtcctttactgaatactaccacatcttcatttgtttttctttccccaactgctgagcagcaacaggagccagctttgtgtttttatccatcctaaacacttaccacggctgtgagcttgcaattatttatggggagagctataagactgtaactcttttctttgatccccaaaaaaccacagagattgaatttccaacccaaggcttccaaccagggggtaaaagtaaactgggccacgtgatcatctcaatagacggaaaaagcatttgaagaaatccaataatgctttcatgattaaaaaaataataataaactagaaatagaagggaacttcctcaaccttagggcttctatgaaaatcccagagctaatgacacacttaatggtaaaagactggaagttttacccctaagaacaggaacaagccaaagtgcccactctggccacctctgtccaacattgtcctggaggttctggccattgccattaggcaagaaaaataaaagcatcca

SEQ ID NO: 1886476 - DNA, 4001 bp, Homo sapiens; identical to SEQ ID NO: 1243036

SEQ ID NO: 1886477 - DNA, 4001 bp, Homo sapiens
ccacataccgccctcccgggagtgcaccaacacgtcctcagctgactggcctaggcccccaccaccccgccacagagactccccacctccccacccctcctgtggcagcctgcacgcccagcacctcccctggtgatcactgcaacctggggaaaggagcaggcgctgttggagcctgaggcagggtctcagttgcacagaccaccgtgccccagagtcagggcctggatgccactccccaacctcagtctcccttcctccaggggtgctggagttccccacctgtgtcccagggacttgaagcttccttggtggatggggagccaggaagaggccaccctgcctgctcgcagacctaatgcaactgcttttctttggcaaagagagctctccacggaggtcctcacccggatggcactgtgagcccgagtgggcgatgtctgctctcccaggggcagggggtggaaggtggcacagtttggaccggacccccaccctcactgcttccacttaaacccccacttctgcctgcctgcatcccaggcctaacagatgagttccgcgggcgccccaggcgatgctctgagggccacggaaggatgcggggaccccgagcggagggcagggcctccagggggaagaggcactgcagacggaggtgtgggtcttcccaggcaggtgccggagccaagcgagatggtgggacggggaagagagggcaggccaggctggcagccagctctccacctacgatgcgtggagcctcccaactcgcgcactccgtctccccaccgctgcttcctctgacctggctgcagagatgagaccgccctccgggcaggtgacacggcccttgctcttcagcctggaggccaatgcttcctccaaaggccctggccccctcagctccgggcctggctccggttgttcccaatgcaaagcagcaagggccccggggtctgcggacgggggcgggcggccgctgggggcaccagctctcggccgggccagaacagggggtaggaggcgcgtcctgtgcggtcggtggcggccccaggtgggtgcggtgcgctggcaggaagcggcagcacgacccccgactttgcatctggacttttctagtaacggaccagctccttctgccgaccgggccggggagaccgcgtggctcagtggctgcagcggccaccggcccgggcgtgggggctttgagggcaccggcgcggtaggtcacccgggtttcgcgggccgcaagctcggagacgcgcgtgtcccgcgttggctgcctgacccggaatggcgcagccccttcgcctccagcgcgctggttgaaaggatccgagccaccctcggggacggccgggccgaggccacctcgcggggcggccttgggcggggacccggacccgcggttggacgttcgcctcggggggggcaatgtcccctctccgaccccgcggtccccaccagggcggcacaccccgccctctccccgcctccgcaggcgcccagggctcacaggctcggagcggcctccgcctctgccggaccacccagggccgccccgccggaggggcctccccgcccccgagccctaggtcacgcccggaaggcccggggcccccgcgtccggccacgccatccgcccggcggccccagggactcagcgccggggtcagcgcaggccccgcccagcgctcccgccccctccagctggccggcccccgggaccgcgcccccgcccgcgctctccacgctcgcactcgtatgggcagggcggcccggggtcccccagctccgagccgcggccccttgaagcgcgttacctggacgtgcgctgtccgcagactctggacgagctgggcctgggcgctgcgcggcggaaccgaccctgtcctggaccgcaggcagcagctgaccccgcgccaccggcctgcgggcgagacctcaggcgcgagacgggctgtgtgtgtgtgtgtgtgtgtgagagagagagagagagagagagagagagagagagagagagagagtgtgtgtgtgtgtgtgtgtgtgtgtgtgtgtgtgtgtgtgtgtcgggggaggggcccgaggacccgcttcctagctgagcgtcaggacggggggcggactctcaggagccgcgcggcgcccgcagaggagaggaagcgccggagacccccctgctcccacccggcctccctgccccgcttcctttcccggggctccagagaggggagctccaggcgtggggcgcctggcccacgtggtgcggcgccgggcggggcaggcgggggcgcggcgagagccgcggagctttctttatgggtgggggggcgggggcggccgggctccgcctccgggggatcggggcgcgctccgccaatgggtagccgggcgcggggcggggccgcggggccgccgcttaaagaaacttgttgcgggtcccgcagcgggacccgagcctcggcggcggcggcggcggcggcaggggcgagggtcggggccaccgcgcggcgacctcgggtcccggagcgaccgcagggcagccccgggcgccggccccggtgcgcgtctcctgtgcgcgcccctccgcgcgcggccccgatgctggacatgagcgaggcccgctcccagccgccctgcagcccgtccggcaccgccagctccatgtcgcacgtggaggactcggactcggacgcgccgccgtctcccgccggctccgagggcctgggccgcgcgggggtcgcggtggggggcgcccggggcgacccggcggaggcggcggacgagcgcttcccggcctgcatccgcgacgccgtgtcgcaggtgctcaagggctacgactggagtctggtgcccatgccggtgcgcggcggcggcggcggcgcgctcaaagccaagccgcatgtgaagcggcccatgaacgcattcatggtgtgggcgcaggcggcgcgccgcaagctggccgaccagtacccgcacctgcacaacgccgagctcagcaagacgctgggcaagctgtggcggtgagtgccggcgccccgggggcggggttcgggaccttggccgcccctggtctcggactgcgagcgggggcctggagggcgcagagctcgcggaggtggtggccacacgcaggctccgggctctgcaccccgggcgggtgtcagggcgggtcccagtggaaaaacatcctctggccagccggggtccggcgccagctatgggagtcgggatccgcggagggcagcgcctggggtgtgcaccctcgtggcgggtgcgctctggagccagttctcctggcggggaacaccctgcggagggccatggctggcaccccgacgtgccctccagccgttgcgagtggccccagccccgggaggcacgcccggcacgacagcaagttgcatgcggctctctggaggtgctccctccttagaaagggctcagctcctctagctcctggaccacccatggggagggagtgcggcaggcggatgggtgggcagcaggtttgcctgcgagtaccctccccgcagtttctccctctcctggacaccctcggtccgaagcagggagggcaggagtggagatgacggggtgcgccgtgtgcacgccttggcgtggtggggccggtcagttttccagaaattaggactgcagagtgaagaacttgttgctcaggacaggccgcccccaccgagtgtcctctggttgggtttcaaatggttctcttggtttggggctctggttcccgtatcctgctcctcacctggaagaagggagcttggagcttgcgtatttgcacctcctgccttctgtctggatctagggcgcagccacggggcgctgtggacggcaggcccctgctcccccaagtcctgccgcacaggcggttggaggtgagcctcgggaagagtcccaaggagtgtgtcctgtggctcagtgaggacgggcgcctgggccctgccagggcttctgggtgtctgggaatggaggga

SEQ ID NO: 1886478 - DNA, 4001 bp, Homo sapiens
cacagggccttcgcaacaacacgacaccaacaccacatcacacccgaaaacccaggcgaccttcacacagggccttcgcaacaacacgacaccaacaccacatcacacccgaaaaccccggcgactttcacacagggccttcgcaacaacacgacaccaacaccacatcacacccgaaaaccgaggcgactttcacacagggccttcgcaacaacacgacgccaacaccacatcacacccgaaaacccaggcgactttcacacagggccttcgcaacaacacgacgccaacaccacatcacacccgaaaacccaggcgactttcacacagggccttcgcaacaacacgacaccaataccacatcacacccgaaaacccaggcgactttcacacagggccttcgcaacaacacgcaccaacaccacatcacaccagaaaaccgaggcgactttcagacagggccttcgcaacaacacgacaccaacaccacatcacacccaaaaaccgaggcgactttcttcacgtccatgttagtaatgccttttctcagctgtttgtccacacaagggctggccacgttaggtggacgcccgtgtgctgtctccctgcttcaggtcctgctggatcagttccccagtggccgctctgcctgccattctgcctacctggctaccagtcgctgtgggctgggggtgagagctcacagctggatcagaaccccctctgtggcccccctcgggaggtggctgccttctcccaccttgcatcggaggcgagattgtgcagggaccagaggctgccctggtctgcctgtgagaaagcccctgggtggttgctgccaaggagcatggctgggcctgcgagacagggtgccccgatctgcctggaagttttctgtccaggccgccctccctcatcgcctctgtcccgtgttggctgcttggaatgcgtctctctggacctcatctgggataaacagctgcttctctccccttactcctcagctgtgggggaacgctggtttccaggcccactcacaggatttttaatgttccgcccagaccttgctaacacctctcagcggctaagcctatttctgtagattctcttacttatgttttgtttttaaattttctatgtagtcaatcttttttacatttcaaaccttttaacctttgtttttctcctaagaattgtatagtaaaacccgcacggggaccgcctggatgccgtaggttctgttcacggggtttgctgcgttgttacgtagtgggtctcctcgcccgtgtcccccgtccctgcgtcggtgcttcagcgcacatcagggtggggctggtgtcaatgcttcccacatcattagctggaactcaccgcacactgcgtctttccctccataaagaacttgcacgagccccatcaaggtatagggagtggccgtcaccccagaaagtcccgtcatccccactcgtcaccgcccgcatttgtacagagatacagctgtcttgttctaagggcgagtccctgtgagaacgcgtggagcgttttgtccctgcccccacacactccgccggggggtttggctttgtgccggtgcctggctggcgggtgaactttccacagggcctgccttgtccacgtctctgcagggagcgcaggtccgtgtgcccacccaggaggtcttggacccagcagcccctcaagaagggctatggcgactgttcaccgcaggagggctctgcgctgtctgaaaaggggaacagaatgccccagtggaagcagatttgcaggtgatattagggaagcttcctcctgccttctacttacctggacttcttatcctccaaggcgcttgactcacagtcttacctccttgagttgcctccagaagaaaatggtctttgttttactgagttccttctaagcgcagtctgtgatggggcccgttctgtcctgtcctcgccctgctgagcactgagacagagacccaggcgacctgctgaccgaggccagctcacgagcctgctctgggccacgtggtgccgagttgcttcctccttcaggctctgatgacactgaagctccccggggagaacagcggtgtcctttgctgctggagatgcctgcagatgcttgctctgggcatgcaggggcccctggggaaggatccgcgcctggctccctctctccatctgtccctcgttttggacgggaagtcgactatcattcctgacgttccagtgtaacgtgttatgtttctctgatggctttggggattttatcttccgttgccagtttcttgactatgatatgcctactttttaccaaatttggataatttttgccaatatttgggggggttgccccatgttctttctcctctcctgtggctccacggacatggacatcaggcctctccctgccttccacgagctcctgggccctgtgcttctgtgtggtgttttctaaaagcctctcatctctagaatgagtcactgtggctgctatgtcttcgtgttcactgccttttctttcgttcttcactctgctgctgagctcagccaggggcatttgtgctctggagattttagttcttgctctggagtgggcctggccttcctccgaggctctgtgtctctgctcagctctccagcccgcctgcctggcaagcacgttttcctgtgctttccggtcctgatgctttcctgcgtccgtgtggagccagcgcttggggtgtggtgtgtagagaggggaatgtggacatgcagtgcgtgctgtgggggctgacgggctggggccggtgtggatgtcgtgtcgggggccgagccaacgggccagggccagtgtggatgtcatgttgggggacgacggactagggccagtgtgaatgtcttgttgggggcccagctgacgggccagggctggtgtggatgtcctgttgggagccgacaggctggggccattgtggatgtcgtgttgggggctaagccgacgggccagggccggtgcagatgttgtgctgggggccgacaggctggggccagtgtggatgtcctgtccagcaaggccctggaggtggtgtccgggcagtcttgaccgaggccggaaggatggtgccgggggcaggagcctgactgcctcggaggaagggggtcccggggcggagctgtggggtggggagcccattgtggatgctggctgcttcaccctcacccccacgttctgtctgtgggtctccgtgaggctcctcccagggcggccctgccacatgatgtagctgaaacccagtcctctctgcacaccagtgtttctaggaaaacacttcctgtctttctccccaagacctccaggacgtgggcctgaggtcatcactgcctccttcagttgctgctgcccgaggcccccaagagtgacccacatgagactgcggtccagacgccctccctgcctctgagggcgcacactgtccagagcgggtctgtgggtggaatgcccccagcggcctccgggccccttgtctgtggggcctgtgccctggtgctgccggcactgctgtcctcacgcgagcgctggagatatgagctttcccaggggggctcagcagtgatgaaggtggggcaggagctgtgtgtgtccaccataggtcctgacagagatgaagcagaggccacagggctgccctgccccctgccgcgggcatgtggggtgattcccgcccacttctcaggtgtgccaacccccacgttccttccctgtgagtgtgtgagctcacatagcccctggacacaccaccctccacgtggggtggatcgtgcctgttggccacactgagcacacctggaaacgccgactgccgagtgtcaggggagggtctggaaaagccgcgagtgaaaacagactgtcccccgagactgtgtggtgaggggaacacctgattctgcagcctgggagtccacgccgacatgccgactgcccacacaggtgtcacagcagggatgtggatg

SEQ ID NO: 1886479 - DNA, 4001 bp, Homo sapiens
ggtgaaaccccgtctctactaaaaatacaaaaaaaattagccaggcatgatggggtgtgcctgtagtcccagctaattgggagactgaggcaggagaatcacttgaacctgggaggcagaggttgctatgagccaagatcatgccactgcactccagcctgggtgacagagcgagactgcatctcaaaaaacaaaaacaaactgggttcagaccctcgtccagctgtgtgaccctgggtcagctgctggccctctctggatcttgggtccagctcctcagcagtatagcggaacaccaggcgacagtcatgggtgtccactccttgcctggcactgggctgagtgctttccatgactctccattgattcttgcccagcccaatgaggtaggaacagttccctctgcccaggttctatttttggcccacttcttgctctggggctcacatctggtctcctgaacaccctcctttatctgctgcgtcggccccaaccactgccctgagcctgacctgggtagctaaccctctccaccaggccacctagtgggcatctcaacacaagtggcacttgattccacgcactcgattccatgcccccatcacctgctgtccccatcctcgccttcccaaccttgaggaccagagcctgtgcacctccttggactctttctctattttttttttctttttttggagacagggtctccctctgtcacccaggctatagtgtgcagtggtgcaatcatagctcactggaacctcaacttcacgagctcaagcaatcctcccatctcagcctcctgagtagttgggactacaggcacacatgcaccaccatacctggctaatttttgcattttttgtagagatgaggtctcaccatgttgcccaggctggtctcaaactcctgggctcaaccaaactgcctgcctcagcctcccaaagtgttgggattacaggtgtgagtcaatgcgctcagccaacctttcttgagtgaacaaattccccccaatatccgcaagcccttttgattcttctaaactccaaccacccactggtcggctctgcagcctccaagctgatcacagatcacagcctccatcccttctgccacagacactccagccaccttctcctgagtccccagcttccactcttttattattgttgttatttacatggagtctcgctctgtcgcccaggctggagtgcagtggtgcgatcttggctcactgcagcctctgcttcctgggttcaagtgattctctcacctcagcctcccaagtagctgggattccaggtgtgcgccaccaagcccagctaatttttgtatttttagtagagacggggtttcaccatattggccaggctggtcttgaactcctgacctcaggcgatccacttgcctcagcctcccaaagtgctgggattataggtgtgagccaccgtgcccagcccccagcttccacctttgacccctggagcccgttctctaagggacagcccaggactttcaaaaactgcaaatcagatcatttcactcctcaaccagaatctccccctcacacttagaatgaaaccaaaacccttccccagggcctaaaagtcccagagaactgggctcctccccgacctcatcacagcagcaccacccctttctcccctcctccaagaagggcagccgaaccaccctctccccgacaatgagggctcttttcatttcctccaagaactcacgcttgttccctcaggaactttgcacttgctgttccttaatgcctagccttctttctggtggctcttcttgtcctgcagaagtcgactcaaacatgacgtcctccttgaaggaccctccacccccaccccactccttactctctatcatttcccgggtctctttacagcccttactgtctccctgaaactacctggctccggcatgtgtccatgccctctggactctaagctgcttgaagcagtgaacttggtggtctcacgtgccactgacagcagaccccagaacaagtggagctcaggaaatgtgggaggattgatagcagtgtgggtggatagacttagagatattgtgtccaggccacaaggcatcagcagagccgagcatcagccaggacaatctgaccttgaacctgacagcttaatcctgaagctgtgttgcctctgcagtattcggttaagagttctgctgcctgagttggcatccctgctttgtgaagttattgtgtgtcggctgggcacggtgtctcatgcctgtaatcccagcactttgggaggccgaggagggtggatcgcttaaggccaggagttcaggaccagcctggccaacatggtgaaaccccgtctctcctaagaaaacaaaaaaatttgccgggcagggtggcgcacgccagtaatcttagctacttgggaggctgaggcaggagaatctcttgaacttgggaggcggacattgccgtgagctgagatagtgccactgcgctctagcctgggccaaagagtaaagatctgtctcaaaataaataaataaataaaaaataaaaacaacaataaatgactgtgtgtccttaggcaaggcacttagcaactcttgagcttgttccatctgtaaacccaggacgttagtgattctccctctagtggatgaaatgaagcaatgcagatagagccctaatgcagggtacctgcgagtcgctgcagcagctgtggcaattgtcaccttcatccaggcccatcccgctttgagggcctagagagagtgggccagaggttaacccccgattcatctgcctccccacgctgggcatctgggtgtgccagggcattcccccgctggtcagacaggtttttgggccagggcggggctgaccagggttaattagagggaactggctaggaggagctggggagggggctgggcagagtccaggcctccagagcccctgggacacagcaggtgtgtgctgccatgggccggggcttgaactctgccagactcaggcgccaaaaacggcgcttgcgacctcaggtccagaagccccggcagcagctggaggtgagtggtcatcagagatccccccaccccaacccttgccccgggcccacgcgtcctgtctgctcggaaccttccctctaaatctctgggtcttgctcacgcttcctccctcactctcccttgcttttgtgtctgtcttggacacaaggcccccttaggctttctccctaggtgtctgtccctccatcgccatctctctgtgcctgcccagtctcatcggtgcctctctgcctctgtccctctgccctggcccccacagcggctccagcaggagaaccatgagctccggcgaggcctggcagcccgaggagccgagtgggaggcccgggccgtggagctggagggggacgtggaggccctgcgggcccagcttggggagcagcgctcagagcagcaggacagtgggcgagaacgggcacgggccctcagcgagctcagcgagcagaacctccggctcagccagcagctggctcaggtgggatggccctgaccccagggccctggacaaggttggggaggatgcctgggtccccagcggggagtaggtgcattgggcttggtgctgaggctcctctgtccctctttccacctccccaggcctcccagactgagcaggaacttcagagggaactggacgcccttcggggacagtgccaggctcaggcactggctggagcagagctgaggacgcggctggagagtctgcagggggaagtgagtgtcagctggggctgggggattatctgagccaaaaaagccgggctgagggctgggaggggctgcccctgtccccagctctcaggcctttccccagaaccagatgctgcagagccgccggcaggacctggaggcccagatccgaggcctgcgtgaggaggtggagaagggtgagggcagactgcagaccacccacgaggagttgctgctgc

SEQ ID NO: 1886480 - DNA, 4001 bp, Homo sapiens
catggtcattcttcagaacgcagtttggcgaattatttggactgaatctccagaggaacatactaaagaaccgcttccttttgtttctagtttttatttcagtctagtaaagaacattctttgagactctcaaagcttcagtttgctcatccgtgaaagggagcacataacatatttgcaagagatgcacccagaatgggggagcccccaaatcccagaacagcaccgtggctacgttccccccgtttcctaaatgtctgagtgcctccttaaggagaaacactgcatttggggtgaagagcagtcactgttcatgccaccccaacaggctcatggcttaggcaggctaggtacgctccttagccagagacatgaccccccccccacaccagctgagagccccagctccacaacggtgctgctgacccgtgccactcattaagcatcagggcgcattcagtgagtaaatgtcaaagctctctctcgcccaccgcctgtgttgttaggattccatgaggtcaggtcttcctgtgcctggcatggccataatcactgtttaatacagtctgttcttctacacgagaggcggatcctcctcggtcctcccagcagttctcctctgccgccgccgctcatggtgtgtaattaggaggcgccaagagcaaggtgggatctgggtgcgttaaagcatccccagacacctgggatcacttagggggtactcgttacaagtgaggcgaggactcatggctgagggtccctactctctgccagactgccacagatactataaattctgggtctgcccagagcggttctgatttttatagagaaaattaatacatggtcaacactccaggcccataaaactaaccaaatacaagaaaggcgttgtatggtgaagccccgagagcctgtctgaattatgaattttttccctttgaagtcagatgtcctcaaagaacccttatgaaacggtttattgactaacatggagtatgcaaaaatgtttatgtgcctgaagaggcattcctctgccaagtatgtcccgggggtgtggctctgccattgacaagttaaggtccttcgcaagaaaacctgaagaacctttgctctgaactccagcatggcacagcccactccatacactacacccgtagtgattttaaagttaacaaacagggcacctttccttctagctggccaaagccagaaagagctcctccttgaaactatgagcgcccaaattaaggcagaaaccccgccccatcccccagtggggagtctccttgtcctggagaaagaactgcacagggtgtccctatcccctgtgttctgaaaacaagaaatgaatttaccccaaatctaggaggggctcagaaatcagcaacaattcatttacagtttgcaatcgcttagggtagagaatggtacatagcattcattatggtactaacacgatttcagttggtagtggtggcctggaatgcaggaggggaaagagtgtgatgctgtctctggctctacagaaagagtgctataattgattaatgatgtctgccatgagcatggaaggggtagaggagcacatgtgtcatgcacttccattcctgactggggaaggggctgtaggtgatatactattcttcaggggcatggtgtggagacaggcaagctacatcacaagtgaaatgatgtgtggttaccctttttcagttgttttcacgtgctccaggagactctaaaatctaacgtggtggctggctcagtacaacatgtgattgggaatgggccctggcctcaggctgcctgctccttagctcccaccaggaccacccacagctgctcatcagaccctgcctatcccgtcccacctctctgggtcccagattcctcctatgcacaggtgtcatgggaatggcatgagggttaataacacaatacactcaaagagcaccacactcttgactccaagaaagtgttcaataagcatctgcaaaaagatgttattcttattcctacctgtggtccctgtggccacttagtggacctagctaagcctcagtttcctcgtgacatacagggcaaataatggcatttgctgctgtccctggaatgatgagggaacaccaaggggccacacagattacaagcgccccacccgctctaagtgtgcaattaaatcctgcttttgtatttaaaaaaaaaaattaaaggccaagctttattcagatttcctcagttttcccttcatgtcccttttctgttctgggatcccatggagagccccaaatgacatttagtcgttacgcccccgtagactcctctgagctgtgacagtttcttagaatctccttgtttttgatgaccttgaccgtggggagtactggccaggtactttgtagactgtccccttgttgggatttgtctgatgtttttctcatgattggaatggggtgatgggttactgggaggaagaccatagaggtcaagtgtcgtttttatacgtcctatgaagggaatattctgtctaactggcttgttgttgtcgatgttgaccttgatcacctggctgaggctgagtgtgtctggtttctccactgcaaggctactcctgcccccttccatacagtgctctctggaaggacctcgctgtgcgcagcacacactaaaggagtgcaaagtcgcgctctgggtccttgagggcagggcatctacagacattatttgggcctattcttcccgggaggctttcctcttctcctccagctgcggtatttttgtaattcttaggaactgcaaaaagattcttcctgttgccgtaatggaggacaagctgtacaaaacccccaaaagtccttaaccagaatctcaaccccagttcctggctgtcacgctgggccaaccacattccccaaatctgtgccaacgcaaaaggccagggaggcgcgcggggcctcatgttctgggcgctggggtctgggtgttggggcagggtgactcaccatgttatgcttgaggattcgctgcaccacgggggtgaacacctcgatgaccaccatggaccggggccgctctctgcagtgctggggacagagtggggtacagttactgcggccctaagaatgttctgaacacagcccgtggctgctagcagggctggggacagtcagcccagctgtgggtgcctgggttcccttgatgaacacggctgcactgctttctaaaaatgagtttattttggaggggggccagttctaggttcagagcagaacggagaggaaggtagagacctttcccagataccccctgcccccggcacgcacagcctccccaacgatcactgcacatgctccttttaaggatggggtgggggcgttccaggcggccctgaaatgtaccctgggcacgcaggccagcaggcatgtggggcactggaaaaggaatcctggtggagagacagggcccaagaggacaacacaatcttgtttccctttcctgtcccctgatgcacacacagaggactccctgggcagggggtaaagtgcaccacggtcccctttcctcccaggtgcctgcatttctaccccacaagctggtctcattggtggacacagcccttgcctccccaaaggaccgtgcggtgtaacaaatgtagcacgtataccctgtgggatatttgttacaatggagaaccccacactgacacatcattgttacccagagtccacagttgactttagggttcactcttggtgctgtgcgctctgggtgtttagacaaatgtctaatgtcctggagccaccaatgtaatatcataggaagtcgtttcacgccctaaaaatcctctgtgctcagccaattcgtccctccctctccccaacccctggcaaccaccgatcattttactttctccatagttttgcttttttcagaatgtcctgtagttggaatcgtgcagtgtgcagccttttcagatgggctcctctcacttactaata

SEQ ID NO: 1886481 - DNA, 4001 bp, Homo sapiens
acatacacaagataaaaagcaggcagtagacatctccaagatgtccaagacataatcagcagacaagaatttgaaggcagctattataagcatgctcatgggggcaaaggaaaatattctcataaatgaacagatgtggaacatcagcagagaaatgaaaaatgaccacatagaaaaataataaaaataattgtgagcttttctatatatcagaaacagaagacatagcaatataatttaaccaatctgaggatagaagtaaaaatagtttaaaagaaaatgaacagagccttagacctatctgtgggatgattgattctgagaagaagagagagacagaaaaaattaaatggggtagaaaagcaaatcaacaaaatttaaagaaaataaaccgaggcttagagacccatggaatcattcagtctgagaaggagaggagagagtcagaagaattaaaagggttacaaaaataaatcaacaactaatatctgaaaactttcaaaaattgttcaaaaacctaattcttttttaatctaaagatccacaaaccccccacaaaaatacaaataaaaccataccaaggccatattgtgatttaagaaactagcagacaggactttcaattgacttgatatgatttattatttttactacttataagaatggaaataagttctccttagtttttttcttggagaaagtctgacatgtgaggcacagatgagttattaaaggcagatgactttccagccttgtcttaaatgttccattctttaccttagaaattatttaaatttgtgtcttccaaatactgtagtaatattgatgctccaaagagatgtcccacggagattctgctcttgtgtgtccaccctgcagggagctgaggcagtttcttatgacagtttcagaagcgagtagtcgtgcagtacttaatctaaaaaacttaatggaaacatgaattaagagaatgatcactgtttagttctatcagcaaactattaaaagtgatccaaaggaggtatttataaagagatattaaaagatttttcaagggagccttattcagggcagaaacgcagacactatcgctgacctcaccacagaaaataccctcatgggttgggagggaccaagggacgctctggtcctgctgacctgcattaatcacagccaggaggtccacactagtaccatgaggcctgggaagcagcctgcgtggggtcagagaagtggtggatgtggctcccaaagtggcttacggggtcccttccctgtggctgtttccttactggatgcagcagggtcaggcccttcccctgtgacgttttctcctctttatcacagtggcgggagcgtccccgtgagaggcccgacccaggtgtgggccacgctgcgagcccgaggaccaagcggcactcctgggatgcagaggaggatttgtgacagcttagggaacagaaaaaatggtttcgaaaaggctaatggcaggtgactaaggacacgatgttttcattactggcagtgaactgacggtttcatacactaacaagggggcttctcgaggggatcccaaggagcccaagaactgccaggtcgcccaccattaccctacgcctaaggacaggctgcactgagcatgtctgaaacggtaggcccgttagccccacccctaggaacgggtgcactccgcatgtgtaaaagggcaggacctttaccccaccgctagggacgggctgcactacgcatgtctgaaagggcgtgacaagagggaggagcaagaaggggcggggtggagggggaggggggcaagaaaaggggcggggtgcgcccaacatccggcggagaagtattaccatggcaaccctcccgcgcaggccataagaggcaaatgaacctttgttggttggcgggaaatcgagaccctggcaagggggcttctcccttggagaagcctgagaactgccaggtccgcggccgttaacccgcctctagggacggccgcactgcgcatgtctgaaagggaactagaaagggaggagcgagagagggtggggctgaggaggaggctgtgtgagaaaaggggcggggcgcgcccaaagtctggcggaagagcgttaccctggcaaccctcccgcggaggccgagagaggccaccggccctttgttgatctgcgagaaatcaaactacgaacacgacaagcattagcctgcagctcgaggagacaaggtgtcacaattacaaggggaaactagccgccctagctccactgtctccccagcacgagagatttgagaacagaaaggcttccctccgcagggcgaaactgctgggctgcctggaagggcgaggcagggagcggaaccgtcttcaggaaatttcgggagttccggggtcaggtccactccccggctgttgttgtgttgttggcagggcagagggtctaggatgccagcctgctccgggctgcgctgtgcgcctagcccagggcggggggatgcggggcgacacccgcctcccggtgcatccaggagttgtagtctcttcaccggttccccactgtgggtggtggggctgcaggaggacaattcaaattgagataggagcggaggcggagcgcggccgtgcagggaggggcagggcggtgtaggcggcttcatttaccaagctttgctggccattgtttccatgccaaacccttgccaaggggattgtcaggagaggaacttgaaggggaggcgtgggctggccagtgaggagggtgtgtttttgcgaagtgcgccccgtctttgccgaaattaggagtgtctggtcctcactcacgcggctctctgctgctcaggtcgattttctctcccaccctcacccaggctctttccacagcatcacccctgccccagcccctggagccacctgctttcctaagtggttttggaaactgggctgaggtcccaaagggtgtccactgtgctgttgctctccgctctgtccaagcaaagcacaagctcagccgactttgaaagacacccaccgcctggcctgggaatgcacaagttcagagctttgcaagaagtgatcatgggctatggctttgtgaaaatgtcaccctcaccagtgcctttttcgcggacgtggacgtggaggaatgagggagggtaatcactgggctaccaaggtactgctaagagcagaagagaaaatcccagttttcagccatgtgtctggtttgacatttcaccaacccatttaagtgtgcaggcccccaaatatctacctaaagattatgatagtttaggcattttacacttgaaattattgacctcatatccactgaagcctgactggccagtgtctcaaagacacagatgatgacctgatccctcaggaacagctggtgctccagctttgtggaggtgaatttcaaggtatggattacttggggggtcgttgaaacctgtcaggctcaggaacagatggtgctccagctttgtggagatgaatttcaaggtatggagcacttggggggtctttgaaacctgtcaggtttcatatctctgctttgtgtgaaaagatcatcacctacagtagtcagggatgtgcctttacttactggtgctcatctgttgaaactttatatctagacaatggaaacattgaggagcatttctgctttcatgtagcctcttaataattgacgccctaaagccctgtgtcctcagggagagttcctttgattcctgggtggtaccaggtttcatgctgttaaatctgtaaaaacctgcgcgttaatctccatgaatataagaccttgttctttcttaaatgccccaattttttcttctcttgtcttatattctgagcaggatttcaaatactgtatgtaaggaagtagtgagagtgggcatctttatcttaaaataaatcttagaaaagatttcaacatttcaccactgacaatgttagctatgggcttgtcctatagctaataaagaacgcatct

SEQ ID NO: 1886482 - DNA, 4001 bp, Homo sapiens
gcacaggaacctcagactaaggtgactcactcaggggagggcagtgggaggaggggggcttgggcccagcctggagcagggactgggtctggagcagtcctgggtgctggtgctgaccttggttgctgggtgcagtccggcacagcacactcaaatcacggctcagcaaaatctgcaatctgacctccgtgcctttaaaatgagaacccctgggagcccccctttcccctcagtcggggctgaggacggcccagctgggattcccgggaaacaaagggtctctttaaggctcagccggggcttccttcctccccggccaacaccctccacctccgctgctctggccttcaggggtctgggctcgtggagtcagcttcccctcccccgctccgtaaaccctcaccacccgctgcggcgttcaaaaggtacaaacaggtatggtccctgcggccatccccatccccaccccgcctctcctcctccaaggtcaaccagtgtagccggtgctggatcattccagacattcgatgcctttgacacacacaaaggaaacgtgtttttctcccttttctacacaaatggtagagctttgaacacaccgttcttcctgttcctttcttgcagctactgctgcacctggtggaccatttccaagcagcacagcgcttcctgtctttcctgtctcggccacgctctgtctcgtttagaccccgtatgaatgatttgaatgtcccaccggccagtgacacgcatgtaggcggtgccacattgactcactggacgcatgcagtgtgccacttccgtgaacgtacctggagggaaaaacgcagaggtggaattcccgagggaaggtcattgctgctgttacttcagtggacaagtcgggggggttcccacgaggctcccacatcctctgcctgctgcaagcagtgtctgtgggccacagtctcacctgttagtacagtttttatttgccaatgtgttaggtgaaaggaaaaagaagtcactttaatggggttttcctttaattttttttttttttaaactttttaccctcacatcctgggaaggacactttagtgttttgttttttgtttttgtttttgtttttgtgtttttgttttttgagacggagtctcgctctgtcgcccaggctggagtgcggtggcgcgatctcggctcactgcaacctccgcttcccgggttcaggcgattctctggcctcagcctccggagtagctggagtagtttttaatttgcatttctgcgctgagggaggaggatcagcgtatccctggcagctgtccttcagtattttctaggggagcgtttctgtgattgatttagagctgtttattactgcactgttactagtcttattaaggtgagctctgcggtgtgagctgcaagctgtgtcccccacctcccagtcgggggctcgtcttttggacttcgcttatgcagtttggctttgcagacgcccccacccccctcccacccacgacgcggcggaacttctggactctgtgccacgcttggaaaagccgacttggccctaagacggaaaaagcttccccgagttttctaggctttatcgcttccttttttcggctcaaatcttacatggtgggaatccatccaggtgcaaagcgccgggagttgatgccacgcacccgtgtgaaccgccaccccgatcgggtactacagtccctaaacacaagcagccttctcgtctgtgcataaaagcgtggatctgacacgcacctgcagcggctctgcggcgtgaaggccggcccgggggtccccgtgctgaggcgcctgactcaggcccacgcgcgccgggcggggcagggcagggcgcgggttcctctcggtcccaggcggaggtcggcgcctctgccccccgcgggctccccgagcctgccacggaggtcccggccgagcggagctgggactcagcgaaccggcggggaagccccgcggagcccacgcctcggggagaatttcctgcgtgttccgagcgcgcccggcgcgacctctccgtcctgggacccccgcgatccctccatcccgcgccctccctccagcgtccccccggaccgcgcgcgccccggtccgtcccccgcgcgccccacgtgacccctcccccctaccggcgccccacgtgacccctccccccggcgtccgcgccccccccggtcccgccccccgaccccgccctcgccttcccggctcggcctgcggggcggggcctgcgggcggaagtgcccggggcgacggcggcggggaccggccgggccatgggcgccgggggcagaggcggaggcggcagaggcggaggcggcagaggctgcccgggcggcggcgggggccggcggcgcgggacgcgggccgggtagcgccgggccgagcgcggagccatgggccgggctggcaccgggaccgggggcgaggcggtggccgcggtggtggcggggccgctgctgctgctgctgcttgcccggcccccgcctgcctccgccggctacagcgggaagagcggtgagcgggaggcgcgggcgccatcgggggcgtggggccggggctgcgggcggggcgggattgtgacaccccgggcgcacctgtgcgctcatctggcgccggcgcggggttgggggtccccgccgcgggttgggggtgcacagtggccctttggggcgcttcgtgtcctaggggtcgaggcggacgggaccccgcgcttcctcctcggtcccccgatcggggttgggccacatcggcccctggagcgccccctcccctccctcctcctcccagagcgcccaggtccggcgcgcccggcgcggggaagtggaggggcccaggggactctgcccgggactccagctgggaggagtggctgggccgtgagctcaccggccgggtccggcctgagagaggggcagagccgggagaaagttgttagaccctgtagcgggggcccgtgggcgtcatggctccagcccttccgcagtgacccccagccctggtacggccgcttcctgccgccggcccggcttctgggaggagggactcccagctggcggaagaggggctgaggaaagggcgcccctctcccctcttgttgggaaactcgccgggctccctttgcatttctgttccctgagggtccccgtccctgactgaggtccaaggaggcggctggaccagggagaaggcgtagcccttccacggggtagggacgtgggtgtggagaccgtcaggccttggccaccctgagatggtgaggacttgccccggcctctgtggcctgggactctggaggggccgtgtcctttctggccggctggaagttcccacacgtccccagccacgcgggtgcccaggtgcccggcagctgatgcggtgctgttccccgacttcccggcccccagcccctcccctcccctgcccctgaaataatgctcctttgagctcctgtttctttcgggggctgtgcctcctgctttctgagcttggcacaggtagagatgaaaggcagttttccccgaggaccgtgccccggattaaattgctccatggccaggcgcgaagctcacgcctgcaatcccgcactttgggaggctgaggcgggtggatcacctgaggtcaggagttcgagaccagcctgaccaacatggagaaacccccttctctactaagaatacaaaattagccggcagtggtggcgcatgcctgtaatcccagccactcgggaggctgaggcaggagaatcgcttgaacccgggaggcagaggttgcggtgagccgaagtcgctccattgcactccagcctggacaacagagcgagactccatctcaaaaaaaaaaaagaaagacagaaagaaaaaaaaataacctgggtgtggtaatgtaagcctgcggttccagttacataggaagctgaggctgcggtgagccgtgttcatggcactgcactctagcctgggtgacagagtgagacc

SEQ ID NO: 1886483 - DNA, 4001 bp, Homo sapiens
tcggactgggtggcttagaattttatttttggtttacatctcaactatcacagcagccgggcgcggtggcttcacagctgtaatcccagcacattgggaggctgaggcaggggtatcacctgaggtctggagttctagaccagcctgaccaacatggagaaaccccccgtctctactaaaaatacaaaattacccgggcgtggtggtacatgcctgtaatcccagctactcgggaggctgaggcaggagaatcgcttgaacctgggaggcggaggttgtggtgagctgagatcgtgccactgcactccagcctgggcaacaagagcgaaactctgtcttaaataaataaataaataaacaaacaaacaaacaaacaaactatcacagcataaagtaggaatatttcgttactgtctagttaaactggttaatgcagaaaggaagtctggtaattccagttttaaagtaaaattttggacattgtaggattgattatttggcatagttgtgatgtttgttcctgcgttatggttttgttggcagggcagcctttaaggacctgtatattttcttctagactctatatattccctgtgagtattagttgtatggtcaaactggcaaattttaccataggtataaataatagagaatgtggaagaatagtgaatagtgtcagagatagttaaaagtccatacaatagtagagaaggtagtaagtaatagtggcttggactaaatatttgttgaataaatgttttaaaaaacaggctacctacaatttgtgttgaagatatgaatgaatgaagtttccacacctttatgtggagacctgataagtaagcaacaataaggaagggtccccaggttggggagagccccaagttgagaacaataatgaacaattattgtatgaacaattgttagagacagctaatcacaaacaacctgcgggcacaatgacctcattccacacgtagcacccttcagcaggaccctataaaactttcctccagcccttgcctctttgcaggtagccccttctctgctgagctgcccactgcaacatattttcacaatttctctaataaatctgcccttctttacctacaactatcttggtaaatggctttaccacctgcaaaactgaccctaggttgttgctacccgatatggtttggctgcgtccccacccaaatttcatcttgaattgtagttcccataatccccatgtgtcgtgggagggacccggtaggaggtaatcgaatcatgggggcaggtttttcccatactgttctcgtgatagtgaatacatctcactaaatctgatggttttataaagggcagtttccctgcacgtgctctcttgcctgctgccatggaagacatacctttttgctccttctttgccttccaccatgattctgaggcctctccagccttgtggaactgtgagtacattaaacctctttttctttataaattacccagtttccagtatttcttcatagcagtatgaaaagtaactaatacactacccgagacatcttaggagatttgtaatagctgtaatgccaggtccaccatatttttagcataaagcaaatgtttacgcgtgatatgactgcacgggctttctttcagctggagccatagcaactcaagtagtaaccctatcttagtctgattaaaagtaaatattagtctgggcatggtgggacatgcctgtaatcccagtactttgggaggctgagacagaaggattgcttgagcccaggagtttgagaccagcctgggcaacatggaaaaacaccatctctacaaaaaatacaaaaattagctgagctggtggcacacacctgtagtcccagcaccttgggagggtgaggcaggaggatctcttgaacccgggaggtggaagccgcagtgggcaatgatcatgtcagaggtgtgtgaaccagagcaactccatcttaaataggagccgggaaaaatgaggctgaaactactgggctgcattccctgatggttaaggcattctaagtcacaggatgacatagaaggtcagcacaaaataccagtcataaagaccttgctgataaaacaggttgcagtgaaggagctggccaaaacccaccaaaaccaaaatagagacaagactgacctcccatcatcctccctgctacactcctaccagcaccatgacagtttacaaatgccacggcaacatcaagaagttaccctatatggtctaaaaagaggaggcatgaaaaatccactccttgtttagcatatcatcaacaaataaccataaaaatgggcaaccagcagccctcacggctgctccgtctatggggtagccattcttttattcctttactttctctcttttttttttgagatggagtctccctctgtcacccaggctggagtgcagtggcgcgatctcggcttactgcaagcttcgcctcccgggttcatcccattctcctgcctcagcctccagagtaggtgggactacaggcacccgccaccacacttggctaatttttttgtatttttagtagagatgaggtttcaccgtgttaaccaggatggtcttgatctcctgacctcgtgatccacctgtctcggcctcccaaagtgctgcgattacaggagtgagccaccgtgcccctcctcctttactttcttaataaacttgctttcacttcacactgtggcatcaccctgaattctttcttgcacaagatccaagaaccctctcttggggtctagattgggacccctttcctgtaactatcatgctactgcactccagcctgggcaacagagcaaggccctgtctcaaaaaaaaaaaaaaaaaaaaaaaaggaacatgacttaatacattcattttggagggtaagtctctcaaaataggcctttcactgggggaaaatggtaaaaatactccctggtaattcaagaattggagactcctgagatgctgctcatattagctgagcacttatcaatacttcacttttttccatatatactcaaggaacaagtgctatttaaagtgtttcactccactgtgctaggtgcaagactataaagaggtgtgaggatcaacacttttatgaaaaccagtgtcattctggatatagtttcagatgctagtgcaaaggaagctcttggtatacggaaaaagtattcaacaataaattaggcatggttgcttccattttctgcctcacatactttttttttcgtggttgaagtgatataatgtctatgatattttagattggcagttgcaaactagtggtcctcagcgtgctttttatgacacctacaaggtctgaagactttgatttcatattaaaaatctgggtttcaggctgggtgtggtgttgcatgcctgtaatcccagcactttgggaggctgaggcaggagaatcgcttgaaccagggaggtggaggttgcagtgagccaagatcgcgccactgcactcaagcttaggcaatagagcaagactccatctcaaaaaatgaataaataaataaataaaatctgggtttcaggccaggtgtggtggtgcactcctgcaatcccagcactttgggaggctgagatgggcagacagcttgacctcaggaattccagactagcctgggcaacatggcgaaaccccatgtctacaaataatacaaaaaaattagctgggtgtagtggagtgtgcctgtaatcccagcaacgtgggaggctgaagtgagaggattgcttgagcctgggaggttgatgttacagtgagctgagatcgccctcctacactccaacctgggcaacagagccagaccttgtcttaaaaaaaaaaaaaaaaaaaaaaaaaaaaaaaaattctgggtttctggcatctcaaaaaaaaaaaaaaaaaaaaaaaaaaggaaaggtcagggcacatggctgctacagtcctctattaagcaatgtgccacagcaggggtgcctgacc

SEQ ID NO: 1886484 - DNA, 4001 bp, Homo sapiens
attgggtggcttagaattttatttttggtttacatctcaactatcacagcagccgggcgcggtggcttcacagctgtaatcccagcacattgggaggctgaggcaggggtatcacctgaggtctggagttctagaccagcctgaccaacatggagaaaccccccgtctctactaaaaatacaaaattacccgggcgtggtggtacatgcctgtaatcccagctactcgggaggctgaggcaggagaatcgcttgaacctgggaggcggaggttgtggtgagctgagatcgtgccactgcactccagcctgggcaacaagagcgaaactctgtcttaaataaataaataaataaataaacaaacaaacaaacaaacaaactatcacagcataaagtaggaatatttcgttactgtctagttaaactggttaatgcagaaaggaagtctggtaattccagttttaaagtaaaattttggacattgtaggattgattatttggcatagttgtgatgtttgttcctgcgttatggttttgttggcagggcagcctttaaggacctgtatattttcttctagactctatatattccctgtgagtattagttgtatggtcaaactggcaaattttaccataggtataaataatagagaatgtggaagaatagtgaatagtgtcagagatagttaaaagtccatacaatagtagagaaggtagtaagtaatagtggcttggactaaatatttgttgaataaatgttttaaaaaacaggctacctacaatttgtgttgaagatatgaatgaatgaagtttccacacctttatgtggagacctgataagtaagcaacaataaggaagggtccccaggttggggagagccccaagttgagaacaataatgaacaattattgtatgaacaattgttagagacagctaatcacaaacaacctgcgggcacaatgacctcattccacacgtagcacccttcagcaggaccctataaaactttcctccagcccttgcctctttgcaggtagccccttctctgctgagctgcccactgcaacatattttcacaatttctctaataaatctgcccttctttacccacaactatcttggtaaatggctttaccacctgcaaaactgaccctaggttgttgctacccgatatggtttggctgcgtccccacccaaatttcatcttgaattgtagttcccataatccccatgtgtcgtgggagggacccggtaggaggtaatcgaatcatgggggcaggtttttcccatactgttctcgtgatagtgaatacatctcactaaatctgatggttttataaagggcagtttccctgcacgtgctctcttgcctgctgccatggaagacatacctttttgctccttctttgccttccaccatgattctgaggcctctccagccttgtggaactgtgagtacattaaacctctttttctttataaattacccagtttccagtatttcttcatagcagtatgaaaagtaactaatacactacccgagacatcttaggagatttgtaatagctgtaatgccaggtccaccatatttttagcataaagcaaatgtttacgcgtgatatgactgcacgggctttctttcagctggagccatagcaactcaagtagtaaccctatcttagtctgattaaaagtaaatattagtctgggcatggtgggacatgcctgtaatcccagtactttgggaggctgagacagaaggattgcttgagcccaggagtttgagaccagcctgggcaacatggaaaaacaccatctctacaaaaaatacaaaaattagctgagctggtggcacacacctgtagtcccagcaccttgggagggtgaggcaggaggatctcttgaacccgggaggtggaagccgcagtgggcaatgatcatgtcagaggtgtgtgaaccagagcaactccatcttaaataggagccgggaaaaatgaggctgaaactactgggctgcattccctgatggttaaggcattctaagtcacaggatgacatagaaggtcagcacaaaataccagtcataaagaccttgctgataaaacaggttgcagtgaaggagctggccaaaacccaccaaaaccaaaatagagacaagactgacctcccatcatcctccctgctacactcctaccagcaccatgacagtttacaaatgccacggcaacatcaagaagttaccctatatggtctaaaaagaggaggcatgaaaaatccactccttgtttagcatatcatcaacaaataaccataaaaatgggcaaccagcagccctcacggctgctccgtctatggggtagccattcttttattcctttactttctctcttttttttttgagatggagtctccctctgtcacccaggctggagtgcagtggcgcgatctcggcttactgcaagcttcgcctcccgggttcatcccattctcctgcctcagcctccagagtaggtgggactacaggcacccgccaccacacttggctaatttttttgtatttttagtagagatgaggtttcaccgtgttaaccaggatggtcttgatctcctgacctcgtgatccacctgtctcggcctcccaaagtgctgggattacaggagtgagccaccgtgcccctcctcctttactttcttaataaacttgctttcacttcacactgtggcatcaccctgaattctttcttgcacaagatccaagaaccctctcttggggtctagattgggacccctttcctgtaactatcatgctactgcactccagcctgggcaacagagcaaggccctgtctcaaaaaaaaaaaaaaaaaaggaacatgacttaatacattcattttggagggtaagtctctcaaaataggcctttcactgggggaaaatggtaaaaatactccctggtaattcaagaattggagactcctgagatgctgctcatattagctgagcacttatcaatacttcacttttttccatatatactcaaggaacaagtgctatttaaagtgtttcactccactgtgctaggtgcaagactataaagaggtgtgaggatcaacacttttatgaaaaccagtgtcattctggatatagtttcagatgctagtgcaaaggaagctcttggtatacggaaaaagtattcaacaataaattaggcatggttgcttccattttctgcctcacatactttttttttcgtggttgaagtgatataatgtctatgatattttagattggcagttgcaaactagtggtcctcagcgtgctttttatgacacctacaaggtctgaagactttgatttcatattaaaaatctgggtttcaggctgggtgtggtgttgcatgcctgtaatcccagcactttgggaggctgaggcaggagaatcgcttgaaccagggaggtggaggttgcagtgagccaagatcgcgccactgcactcaagcttaggcaatagagcaagactccatctcaaaaaatgaataaataaataaataaaatctgggtttcaggccaggtgtggtggtgcactcctgcaatcccagcactttgggaggctgagatgggcagacagcttgacctcaggaattccagactagcctgggcaacgtggcgaaaccccatgtctacaaataatacaaaaaaattagctgggtgtagtggagtgtgcctgtaatcccagcaacgtgggaggctgaagtgagaggattgcttgagcctgggaggttgatgttacagtgagctgagatcgccctcctacactccaacctgggcaacagagccagaccttgtcttaaaaaaaaaaaaaaaaaaaaaaaaaaattctgggtttctggcatctcaaaaaaaaaaaaaaaaaaaaaaaaaaggaaaggtcagggcacatggctgctacagtcctctattaagcaatgtgccacagcaggggtccctgacccctgggccatgg

SEQ ID NO: 1886485 - DNA, 4001 bp, Homo sapiens
gtcggactgggtggcttagaattttatttttggtttacatctcaactatcacagcagccgggcgcggtggcttcacagctgtaatcccagcacattgggaggctgaggcaggggtatcacctgaggtctggagttctagaccagcctgaccaacatggagaaaccccccgtctctactaaaaatacaaaattacccgggcgtggtggtacatgcctgtaatcccagctactcgggaggctgaggcaggagaatcgcttgaacctgggaggcggaggttgtggtgagctgagatcgtgccactgcactccagcctgggcaacaagagcgaaactctgtcttaaataaataaataaataaacaaacaaacaaacaaacaaactatcacagcataaagtaggaatatttcgttactgtctagttaaactggttaatgcagaaaggaagtctggtaattccagttttaaagtaaaattttggacattgtaggattgattatttggcatagttgtgatgtttgttcctgcgttatggttttgttggcagggcagcctttaaggacctgtatattttcttctagactctatatattccctgtgagtattagttgtatggtcaaactggcaaattttaccataggtataaataatagagaatgtggaagaatagtgaatagtgtcagagatagttaaaagtccatacaatagtagagaaggtagtaagtaatagtggcttggactaaatatttgttgaataaatgttttaaaaaacaggctacctacaatttgtgttgaagatatgaatgaatgaagtttccacacctttatgtggagacctgataagtaagcaacaataaggaagggtccccaggttggggagagccccaagttgagaacaataatgaacaattattgtatgaacaattgttagagacagctaatcacaaacaacctgcgggcacaatgacctcattccacacgtagcacccttcagcaggaccctataaaactttcctccagcccttgcctctttgcaggtagccccttctctgctgagctgcccactgcaacatattttcacaatttctctaataaatctgcccttctttacctacaactatcttggtaaatggctttaccacctgcaaaactgaccctaggttgttgctacccgatatggtttggctgcgtccccacccaaatttcatcttgaattgtagttcccataatccccatgtgtcgtgggagggacccggtaggaggtaatcgaatcatgggggcaggtttttcccatactgttctcgtgatagtgaatacatctcactaaatctgatggttttataaagggcagtttccctgcacgtgctctcttgcctgctgccatggaagacatacctttttgctccttctttgccttccaccatgattctgaggcctctccagccttgtggaactgtgagtacattaaacctctttttctttataaattacccagtttccagtatttcttcatagcagtatgaaaagtaactaatacactacccgagacatcttaggagatttgtaatagctgtaatgccaggtccaccatatttttagcataaagcaaatgtttacgcgtgatatgactgcacgggctttctttcagctggagccatagcaactcaagtagtaaccctatcttagtctgattaaaagtaaatattagtctgggcatggtgggacatgcctgtaatcccagtactttgggaggctgagacagaaggattgcttgagcccaggagtttgagaccagcctgggcaacatggaaaaacaccatctctacaaaaaatacaaaaattagctgagctggtggcacacacctgtagtcccagcaccttgggagggtgaggcaggaggatctcttgaacccgggaggtggaagccgcagtgggcaatgatcatgtcagaggtgtgtgaaccagagcaactccatcttaaataggagccgggaaaaatgaggctgaaactactgggctgcattccctgatggttaaggcattctaagtcacaggatgacatagaaggtcagcacaaaataccagtcataaagaccttgctgataaaacaggttgcagtgaaggagctggccaaaacccaccaaaaccaaaatagagacaagactgacctcccatcatcctccctgctacactcctaccagcaccatgacagtttacaaatgccacggcaacatcaagaagttaccctatatggtctaaaaagaggaggcatgaaaaatccactccttgtttagcatatcatcaacaaataaccataaaaatgggcaaccagcagccctcacggctgctccgtctatggggtagccattcttttattcctttactttctctcttttttttttgagatggagtctccctctgtcacccaggctggagtgcagtggcgcgatctcggcttactgcaagcttcgcctcccgggttcatcccattctcctgcctcagcctccagagtaggtgggactacaggcacccgccaccacacttggctaatttttttgtatttttagtagagatgaggtttcaccgtgttaaccaggatggtcttgatctcctgacctcgtgatccacctgtctcggcctcccaaagtgctgcgattacaggagtgagccaccgtgcccctcctcctttactttcttaataaacttgctttcacttcacactgtggcatcaccctgaattctttcttgcacaagatccaagaaccctctcttggggtctagattgggacccctttcctgtaactatcatgctactgcactccagcctgggcaacagagcaaggccctgtctcaaaaaaaaaaaaaaaaaaaaaaaaggaacatgacttaatacattcattttggagggtaagtctctcaaaataggcctttcactgggggaaaatggtaaaaatactccctggtaattcaagaattggagactcctgagatgctgctcatattagctgagcacttatcaatacttcacttttttccatatatactcaaggaacaagtgctatttaaagtgtttcactccactgtgctaggtgcaagactataaagaggtgtgaggatcaacacttttatgaaaaccagtgtcattctggatatagtttcagatgctagtgcaaaggaagctcttggtatacggaaaaagtattcaacaataaattaggcatggttgcttccattttctgcctcacatactttttttttcgtggttgaagtgatataatgtctatgatattttagattggcagttgcaaactagtggtcctcagcgtgctttttatgacacctacaaggtctgaagactttgatttcatattaaaaatctgggtttcaggctgggtgtggtgttgcatgcctgtaatcccagcactttgggaggctgaggcaggagaatcgcttgaaccagggaggtggaggttgcagtgagccaagatcgcgccactgcactcaagcttaggcaatagagcaagactccatctcaaaaaatgaataaataaataaataaaatctgggtttcaggccaggtgtggtggtgcactcctgcaatcccagcactttgggaggctgagatgggcagacagcttgacctcaggaattccagactagcctgggcaacatggcgaaaccccatgtctacaaataatacaaaaaaattagctgggtgtagtggagtgtgcctgtaatcccagcaacgtgggaggctgaagtgagaggattgcttgagcctgggaggttgatgttacagtgagctgagatcgccctcctacactccaacctgggcaacagagccagaccttgtcttaaaaaaaaaaaaaaaaaaaaaaaaaaaaaaaaattctgggtttctggcatctcaaaaaaaaaaaaaaaaaaaaaaaaaaaggaaaggtcagggcacatggctgctacagtcctctattaagcaatgtgccacagcaggggtgcctga

SEQ ID NO: 1886486 - DNA, 4001 bp, Homo sapiens
ggtctgcccagaggggtcgtctgaggggagggtgtgggagcaggttccatcccggctcagcctcctgacccaggccctggctaagggctgcaggagtctgtgagtcaggcctacgtggcaactgcggtcctcacacccccacatacgtctgttcccacacgcatccccccaggggccctcagtgagcattgcctgcctcctgtcagggtccagctggctccagtacaccagaacacacaccccagtgtcctctgccctgtgtatgcccttccgccgcccaggttggaaggtggcaaaccggatgagtatcctgggagggggtgagctcaccggcagtggccaggcccctgggaaacctggagtttgggagcagcatcctccacgggtcccccagaccttccagcaggccaaatagacctgtgttggaggtaaccccactcccacgccaggtgctgatccgcagtggccgggtgcccattgtgtccttggagtgtgtgtcctgcaaggcacaggccgtgtacgaagtgagccgcagctcctacgtgtacctggagggccgctgcctcaattgcagcagcggctccaagcgaggggtgagtgttgagcggggtgtgggcgggttggggatgggtcccatggccgaggggacggggcctgcaggcagaagtggggctgacagggcagagggttgcgccccctcaccatcccttctgcctgcagcggtgggctgcacgtacgttcagcaacaagacgctggtgctggatgagaccaccacatccacgggcagcgcaggcatgtgactggtgctgcggcggggcgtgctgcgggacggcgagggatacaccttcacgctgacggtgctgggccgctctggcgaggaggagggctgcgcctccatccccctgtcccccaaccgcccgccgctggggggctcttgccgcctcttcccactgggcgctgtgcacgctctcaccaccaaggtgcacttcgaatgcatgggtgagtgcaggcctgcgtagggggagcagcgggatcccccgactctgtgaggtcacggagccctcccgtgatgccgtggggaccgtccctcaggctggcatgacgcggaggatgctggcgccccgctggtgtacgccctgctgctgcagcgctgtcgccagggccactgcgaggagttctgtgtctacaagggcagcctctccggctacggagccgtgctgcccccgggtttcaggccacacttcgaggtgggcctggccgtggtggtgcaggaccagctgggagccgctgtggtcgccctcaacaggtgagccaggccgtgggagggcgcccccgagactgccacctgctcaccacccccctctgctcgtaggtctctggccatcaccctcccagagcccaacggcagcgcaatggggctcacagtctggctgcacgggctcaccgctagtgtgctcccggggctgctgcggcaggccgatccccagcacgtcatcgagtactcgctggccctggtcactgtgctgaacgaggtgagtgcagcctgggaggggacctcacatctgctgcatgcgtgctggggaccaagacctgttcccctgcctggagctttgcggagggctcatcccgggccccagagataaatcccagtgaccctgaagcagcaccccgacgttccgctcccagcagccacacccaccgggccctctccggcgtctgctttccacaatgcagcccccgcccaggagggcccatgtgcttaccctgttttgcccatgaagaaacagctcagtgttgcgggtcagtgcccacatcacacagcatctagcacgtaactgcaccccgggagtcgtgggcatctgctggcctcctgccggcctcctgccctgctgacagcttgctgtgccccctgcctgccccagtacgagcgggccctggacgtggcggcagagcccaagcacgagcggcagcgccgagcccagatacgcaagaacatcacggagactctggtgtccctgagggtccacactgtggatgacatccagcagatcgctgctgcgctggcccagtgcatggtaggatggccccacatgctctccccgccccgcatgcctgccagggtactgggttcagccccccagggcagacgggcagcttggccgaggagctgagcctccagcctgggctccttcctgccatggcgttcctcggtctctgacctgcttcagtagcctcagccattctgctgtcctgtgtgaacgcagggtgcctctcgggggacccagggtgtaaagaggggcccagatgtggggagggactaagaagatgctgctctgtgccctccactctcccctcccctcccccttccctcccctagcccctcccctccccttccctcccctaacccctcccctcccccttccctcccctagtccctcccccctcccctagcccctgcctcctcccccagcccctcccctcccctagcccttcccctcctcccctcccctagaccttcccctcacctctccccctcccctctcccctcccccttctctcccctctcccctctcccctcccccttctctcccctccccccttctctcccctcccctctcctctcccccttctctcccctcccctctcctctcccccttctctcctctcccctctcctctccccccttctctcccctcccctctcctctcccccttccctctcctctcccccttccctctcctctcccccttccctctcctctcccccttctctccccttccctctcctctccccttccctctcctctccccccttttctccactcccctctcctctctcccctctcccctcctcctcctctcatgtgaagaggtgccttgtgtggtcggtgggctgcatcacgtggtccccaagtggaggccgtgggtcatgcagagccacagaaaatgcttagtgaggagactgggggggtccagtcaagtgggctctccagctgcagggctggaggtgggagccaggtgaggacccgtgtagagaggagggcgtgtgcaaggagtggggccaggagcggggctggacactgctggctccacacaggggcccagcagggagctcgtatgccgctcgtgcctgaagcagacgctgcacaagctggaggccatgatgcgcatcctgcaggcagagaccaccgcgggcaccgtgacgcccaccgccatcggagacagcatcctcaacatcacaggtgccgcggcccgtgccccacgccacccgcccgccccacgtggcccgtccgccccatgccgccctttcctctgcctccctcctccccacaaccgcctcgcctttgccccatcccatcttcgtccccctcccctccccccaattcccatcctcatccccctcccccaattcccatcctcatcccgctcccccaattcccatccttatccccctcccccaattcccatccttatccccctcccccaattcccattctcctccccctcccccttccctattaccatcccttttctccatctctctccccttttctccatttcccccccgatcctccccgtccttttgtccattcccctcatctttcttatcccccttatcctccttcccctcccttatcccccttcccctcccttatccgccttatccccttcccctcccttccccctgctcctcttcttctcccctttctcttttctctacccttttccttcctttttcctccctctccccatcatccccctcatcttcgtcctcatccccatccccttccccctccccctccaccactctctctccagcttcccccttccttctgcctgcacctcgctctctgccccctcaggttccccctttctcccagtccccaccctccggctccccctttttgcctgcccccaccctccctctgcctccctgtctctgcactgacctcacgcctgtctgcaggagacctcatccacctggccagctcagacgtgcg

SEQ ID NO: 1886487 - DNA, 4001 bp, Homo sapiens
ggtctgcccagaggggtcgtctgaggggagggtgtgggagcaggttccatcccggctcagcctcctgacccaggccctggctaagggctgcaggagtctgtgagtcaggcctacgtggcaactgcggtcctcacacccacacatacgtctgttcccacacgcatccccccaggggccctcagtgagcattgcctgcctcctgccagggtccagctgggtccagtacaccagaacgcacaccccagtgtcctctgccctgtgtatgcccttccgccgcccaggttggaaggtggcaaaccggatgagtatcctgggagggggtgagctcaccggcagtggccaggcccctgggaaacctggagtttgggagcagcatcctccacgggtcccccagaccttccagcaggccaaatagacctgtgttggaggtaaccccactcccacgccaggtgctgatccgcagtggccgggtgcccattgtgtccttggagtgtgtgtcctgcaaggcacaggccgtgtacgaagtgagccgcagctcctacgtgtacctggagggccgctgcctcaattgcagcagcggctccaagcgaggggtgagtgttgagcggggtgtgggcgggttggggatgggtcccatggccgaggggacggggcctgcaggcagaagtggggctgacagggcagagggttgcgccccctcaccatcccttctgcctgcagcggtgggctgcacgtacgttcagcaacaagacgctggtgctggatgagaccaccacatccacgggcagcgcaggcatgtgactggtgctgcggcggggcgtgctgcgggacggcgagggatacaccttcacgctgacggtgctgggccgctctggcgaggaggagggctgcgcctccatccccctgtcccccaaccgcccgccgctggggggctcttgctgcctcttcccactgggcgctgtgcacgctctcaccaccaaggtgcacttcgaatgcatgggtgagtgcaggcctgcgtagggggagcagcgggatcccccgactctgtgaggtcacggagccctcctgtgatgccgtggggaccgtccctcaggctggcatgacgcggaggatgctggcgccccgctggtgtacgccctgctgctgcagcgctgtcgccagggccactgcgaggagttctgtgtctacaagggcagcctctccggctacggagccgtgctgcccccgggtttcaggccacacttcgaggtgggcctggccgtggtggtgcaggaccagctgggagccgctgtggtcgccctcaacaggtgagccaggccgtgggagggcgcccccgagactgccacctgctcaccacccccctctgctcgtaggtctctggccatcaccctcccagagcccaacggcagcgcaatggggctcacagtctggctgcacgggctcaccgctagtgtgctcccggggctgctgcggcaggccgatccccagcacgtcatcgagtactcgctggccctggtcactgtgctgaacgaggtgagtgcagcctgggaggggacctcacatctgctgcatgcgtgctggggaccaagacctgttcccctgcctggagctttgcggagggctcatcccgggccccagagataaatcccagtgaccctgaagcagcaccccgacgttccgctcccagcagccacacccaccaggccctctccggcgtctgctttccacaatgcagcccccgcccaggagggcccatgtgcttaccctgttttgcccatgaagaaacagctcagtgttgcgggtcagtgcccacatcacacagcatctagcacgtaactgcaccccgggagtcgtgggcatctgctggcctcctgccggcctcctgccctgctgacagcttgctgtgccccctgcctgccccagtacgagcgggccctggacgtggcggcagagcccaagcacgagcggcagcgccgagcccagatacgcaagaacatcacggagactctggtgtccctgagggtccacactgtggatgacatccagcagatcgctgctgcgctggcccagtgcatggtaggatggccccacatgctctccccgccccgcatgcctgccagggtactgggttcagccccccagggcagacgggcagcttggccgaggagctgagcctccagcctgggctccttcctgccatggcgttcctcggtctctgacctgcttcagtagcctcagccattctgctgtcctgtgtgaacgcagggtgcctctcgggggacccagggtgtaaagaggggcccagatgtggggagggactaagaagatgctgctctgtgccctccactctcccctcccctcccccttccctcccctagcccctcccctccccttccctcccctaacccctcccctcccccttccctcccctagtccctcccccctcccctagcccctgcctcctcccccagcccctcccctcccctagcccttcccctcctcccctcccctagaccttcccctcacctcatcccgctgagcccctccactcctcccccagcccctccatcccctcacccctcccctcctccttcctcccctccctctcctctcccccttctctctccttccctctcctctccccccttttctccacttccctctcctctctcccttctgccctcctccttctctcatgtgaagaggtgccttgtgtggtcagtgggctgcatcacgtgttccccaggtggaggccctgggtcatgcagagccacaaaaaatgcttagtgaggaggctgtgggggtccagtcaagtgggctctccagctgcagggctgggggtgggagccaggtgaggacccgtgtagagaggagggcgtgtgcaaggagtggggccaggagcggggctggacactgctggctccacacaggggcccagcagggagctcgtatgccgctcgtgcctgaagcagacgctgcacaagctggaggccatgatgcgcatcctgcaggcagagaccaccgcgggcaccgtgacgcccaccgccatcggagacagcatcctcaacatcacaggtgccgcggcccgtgccccacgccacccgcccgccccacgtggcccgtccgccccatgccgccctttcctctgcctccctcctccccacaaccgcctcgcctttgccccatcccatcttcgtccccctcccctccccccaattcccatcctcatccccctcccccaattcccatcctcatcccgctcccccaattcccatccttatccccctcccccaattcccatccttatccccctcccccaattcccattctcctccccctcccccttccctattaccatcccttttctccatctctctccccttttctccatttcccccccgatcctccccgtccttttgtccattcccctcatctttcttatcccccttatcctccttcccctcccttatcccccttcccctcccttatcccccttatccccttcccctccctttcaccctgctcctcttcttctcccctttctcttttctctacccttttccttcctttttcctccctctccccatcatccccctcatcttcgtcctcatccccatccccttccccctccccctccaccactctctctccagcttccctcttccttctgcctgcacctcgctctctgccccctcaggttccccctttctcccagtccccaccctccggctccccctttttgcctgcccccaccctccctctgcctccctgtctctgcactgacctcacgcctgtctgcaggagacctcatccacctggccagctcagacgtgcgggcaccacagcgctcagagctgggagccgagtcaccatcgcggatggtggcgtcccaggcctacaacctgacctctgccctcacgcccatcgtcacgcgctcccgcgtgctcaacgaggagcccctgacgctggcgggtgaggagatcgtggcccagggcaagcgc

SEQ ID NO: 1886488 - DNA, 4001 bp, Homo sapiens
gggtctgcccagaggggtcgtctgaggggagggtgtgggagcaggttccatcccggctcagcctcctgacccaggccctggctaagggctgcaggagtctgtgagtcaggcctacgtggcaactgcggtcctcacacccacacatacgtctgttcccacacgcatccccccaggggccctcagtgagcattgcctgcctcctgccagggtccagctggctccagtacaccagaacgcacaccccagtgtcctctgccctgtgtatgcccttccgccgcccaggttggaaggtggcaaaccggatgagtatcctgggagggggtgagctcaccggcagtggccaggcccctgggaaacctggagtttgggagcagcatcctccacgggtcccccagaccttccagcaggccaaatagacctgtgttggaggtaaccccactcccacgccaggtgctgatccgcagtggccgggtgcccattgtgtccttggagtgtgtgtcctgcaaggcacaggccgtgtacgaagtgagccgcagctcctacgtgtacctggagggccgctgcctcaattgcagcagcggctccaagcgaggggtgagtgttgagcggggtgtgggcgggttggggatgggtcccatggccgaggggacggggcctgcaggcagaagtggggctgacagggcagagggttgcgccccctcaccatcccttctgcctgcagcggtgggctgcacgtacgttcagcaacaagacgctggtgctggatgagaccaccacatccacgggcagcgcaggcatgtgactggtgctgcggcggggcgtgctgcgggacggcgagggatacaccttcacgctgacggtgctgggccgctctggcaaggaggagggctgcgcctccatccccctgtcccccaaccgcccgccgctggggggctcttgccgcctcttcccactgggcgctgtgcacgctctcaccaccaaggtgcacttcgaatgcatgggtgagtgcaggcctgcgtagggggagcagcgggatcccccgactctgtgaggtcacggagccctcccgtgatgccgtggggaccgtccctcaggctggcatgacgcggaggatgctggcgccccgctggtgtacgccctgctgctgcagcgctgtcgccagggccactgcgaggagttctgtgtctacaagggcagcctctccggctacggagccgtgctgcccccgggtttcaggccacacttcgaggtgggcctggccgtggtggtgcaggaccagctgggagccgctgtggtcgccctcaacaggtgagccaggccgtgggagggcgcccccgagactgccacctactcaccacccccctctgctcgtaggtctctggccatcaccctcccagagcccaacggcagcgcaatggggctcacagtctggctgcacgggctcaccgctagtgtgctcccggggctgctgcggcaggccgatccccagcacgtcatcgagtactcgctggccctggtcactgtgctgaacgaggtgagtgcagcctgggaggggacctcacatctgctgcatgcgtgctggggaccaagacctgttcccctgcctggagctttgcggagggctcatcccgggccccagagataaatcccagtgaccctgaagcagcaccccgacgttccgctcccagcagccacacccaccgggccctctccggcgtctgctttccacaatgcagcccccgcccaggagggcccatgtgcttaccctgttttgcccatgaagaaacagctcagtgttgcgggtcagtgcccacatcacacagcatctagcacgtaactgcaccccgggagtcgtgggcatctgctggcctcctgccggcctcctgccctgctgacagcttgctgtgccccctgcctgccccagtacgagcgggccctggacgtggcggcagagcccaagcacgagcggcagcgccgagcccagatacgcaagaacatcacggagactctggtgtccctgagggtccacactgtggatgacatccagcagatcgctgctgcgctggcccagtgcatggtaggatggccccacatgctctccccgccccgcatgcctgccagggtactgggttcagccccccagggcagacgggcagcttggccgaggagctgagcctccagcctgggctccttcctgccatggcgttcctcggtctctgacctgcttcagtagcctcagccattctgctgtcctgtgtgaacgcagggtgcctctcgggggacccagggtgtaaagaggggcccagatgtggggagggactaagaagatgctgctctgtgccctccactctcccctcccctcccccttccctcccctagcccctcccctccccttccctcccctaacccctcccctcccccttccctcccctagtccctcccccctcccctagcccctgcctcctcccccagcccctcccctcccctagcccttcccctcctcccctcccctagaccttcccctcacctcatcccgctgagcccctccactcctcccccagcccctccatcccctcacccctcccctcctccttcctcccctcctccccctccctcctctccccccttctctcccctcccctctcctctcccccttctctctccttccctctcctctccccccttttctccacttccctctcctctctcccttctgccctcctccttctctcatgtgaagaggtgccttgtgtggtcggtgggctgcatcacgtgttccccaggtggaggccctgggtcatgcagagccacaaaaaatgcttagtgaggaggctgtgggggtccagtcaagtgggctctccagctgcagggctgggggtgggagccaggtgaggacccgtgtagagaggagggcgtgtgcaaggagtggggccaggagcggggctggacactgctggctccacacaggggcccagcagggagctcgtatgccgctcgtgcctgaagcagacgctgcacaagctggaggccatgatgcgcatcctgcaggcagagaccaccgcgggcaccgtgacgcccaccgccatcggagacagcatcctcaacatcacaggtgccgcggcccgtgccccacgccacccgcccgccccacgtggcccgtccgccccatgccgccctttcctctgcctccctcctccccacaaccgcctcgcctttgccccatcccatcttcgtccccctcccctccccccaattcccatcctcatccccctcccccaattcccatcctcatcccgctcccccaattcccatcctcatcccgctcccccaattcccatcctcatccccctcccccaattcccatccttatccccctcccccaattcccattctcctccccctcccccttccctattaccatcccttttctccatctctctccccttttctccatttcccccccgatcctccccgtccttttgtccattcccctcatctttcttatcccccttatcctccttcccctcccttatcccccttcccctcccttatcccccttatccccttcccctccctttcaccctgctcctcttcttctcccctttctcttttctctacccttttccttcctttttcctccctctccccatcatccccctcatcttcgtcctcatccccatccccttccccctccccctccaccactctctctccagcttccctcttccttctgcctgcacctcgctctctgccccctcaggttccccctttctcccagcccccaccctccggctccccctttttgcctgcccccaccctccctctgcctccctgtctctgcactgacctcacgcctgtctgcaggagacctcatccacctggccagctcagacgtgcgggcaccgcagcgctcagagctgggagccgagtcaccattgcggatggtggcgtcccaggcctacaacctgacctctgccctcatgcgcatcctcacgcgctcc

SEQ ID NO: 1886489 - DNA, 4001 bp, Homo sapiens
agcaatggagatggaggactctcccctgggggcgccaagggggcttcctggaggcagcatccttcgacctcaactgtggaccaggggcgcactccctgcacacaagggtgtccagtaggggcggagtcccagggtctccggcagtgaggacgggagggccccacccctggacagggagagacagtcaggcatctctgcctgggaccttctcgcacatccctccttctccctggacctctcttcactcccccagcccctgcccgtggtctccctgtttctcaaacacctggtccccttccccgtgaaggtggctccaaggctggcagcccccgtgtccctggctggggagcagtggacctgccccagagctgtggctgtggtgggctccgggcagggccagggggcactgtggcctgggagggggcactgatgcctggcctcttgccagcccttccccaacagcaccaacttgctgcccacggagatcagccagtccctgctgtaccgggggcccgtggaccctgccaactggtttggggtgcggaaagggttccccaacctgggctacatccaggtgagttgaagggctggtgggcggctgggcgggcgagtacccggctgccccctgacccttgccctccgcagaaccacctgcaagtgctgctgctgctggtattcgaggccatcgtgtaccggcgccaggagcactaccgccggcagcaccagctggccccgctgcctgcccaggccgtgtttgccagcggcacccgccagcagctggaccaggatctgctcggctgcctcaagtacttcatcaacttcttcttctacaaattcgggctggaggtgaggcaaggacattgcctccccctggggcagggcttggccttcgggagggagggacggctgcaccgtgcaggcaccgcaagcctggccccacctgggtttgcctgggccacagagggtgggggactcagggccaggcacggcttccctggactcctgtggtgtgtcggtgctgacaacaggcagggggccaagttagatctgctctactgtacagcccacctcctggagcctcagtttcccctgcacgatggcaactgccagccactcctgccctcttgacagcgccgctggccctgtccttgcttgatgcccgcagcctccaggcagggctgctgcaagcctgaggcctgctgggtgggacaagaaagtccctccccccagactcagtgcatccccacaccccgccctctcccctccccagatctgcttcctgatggccgtgaacgtgatcgggcagcgcatgaactttctggtgaccctgcacggttgctggctggtggccatcctcacccgcaggcaccgccaggccattgcccgcctctggcccaactactgcctcttcctggcgctgttcctgctgtaccagtacctgctgtgcctggggatgcccccggccctgtgcattggtgaggggcacgtggcttgggtgggagtgggctttgtggctttgtggatgcccgtgggggtgtttcccgcctgccccagactcctgtccaccctcctagacttagccttggcctcctccagtccctcctctctgctccacatcctacccaggcgccatcacctgcatcctgtctctcgggggcggcctggccccctccaggctctgctgttctcttttccttttttgcccagtattctatcttgaaatatttcaaaccttcaggaaagttgtgagtcacacaaggagcactgcgtcctctccgggccccgtgcgggtcggccgtgatgcctcacacccaagtgctgcctcgagcatgcgtctcctgggtgagggtgtctgagcccacagccccacacccgtggtcccgtctcctggcagtgccatcgtcaaacgtgtcctctgcattcaaacagccccggcctcagcacccttctttgtggccatttggttttcagacgggatctggtctgatgtttgctctagtctcttgtcttgggtctaagccgcccccgcctctcctgtctcttgggaagttccggagggaggccggtagcgttgctgacgccgtgagactggatttgcgtggctgtcctggtgctgcaggtctgctcaaggcacacagcaccctgcggtctgagatggggagtcacatttgtgcacgtggccggctcaggggcgtcccacctgccccacagtggcacccagcctgttggcactggtgggctgtgtggggtcagccttgtggttttacgaaacagactttctctctgctgtctctgtgtgtctgtcagctgggattcccatcaaggacagctgccatttgttactggctgctttccaagaattctgtcatccgcagaccctgggcctcccctctgctgagtgggtcctggcccctccggccacacactgttacatcatctccccgtatttggctgggcatggtggttcacgcctgtgatgccagcactttgggaggctgaggcaggagcatcccttgaggccaggagtttgaaaccactctggtcaacatagcaagaaccctttttttttttttttttttttttgagatggagtcttgctctgtcacccaggctggagtacactggcacaatctcggctcactgcagcctccgcctcccgggttcaagcaattctcctgtctcagcctccctcgtggctaggattacaggcaagcaccaccaggcccggctaatttttgtatttttagtagagacggggtttcaccatcttggccaggctggtcttgaactcctgacctcaggtgatccacccgcctcccaaattacaggcctccctcctgggattacaggcgtgagctgccacgcccggccccgtcttgttttctgctcccaggcgctgctgcctcatcttctgctacccaggcccagccttgtgctcacagccattgctccagggagcccaatcgagttctaggagcgtgaggtttagagcccggggtctgggcgctgggtgtgcctgttgctacagggctgcctcagcctctgggccctccagctcttccttgttgaaacatctgctttcgagcatcaccgaggccagctccccgtctcctgtccacctcttccttgttgaaatacctgctatcaagcgtcacctaggccagctccccttcttctgcctccttccacgcggctgcgccatgcagtcgccatcctgtgagatcagcatgtcctgggttccccaacatcgagggtaactttgtttttgtatcgtgaggttccctctgtggcagatggggctgtgggttcagcatgtcctgggttccccagcatcgagggtcactttgtttttgggtcgcgaggttccctctgtggcagatggggctgtgggttcagcatgtcctgggttccccagcatcgagggtcactttgtttttgtgtcgcgaggttccctctgtggcagatggggctgtgggttcagcatgtcctgggttccccagcatcgagggtcactttgtttttgggtcgcgaggttccctctgtggcagatgggggctgtgggttcagaatgtcctgggttccccagcatcgagggtcactttgtttttgggtcacgaggttccctctgtggcagatggggctgtgggttcagcatgtcctgggttccccagcatcgagggtcactttgtttttgtgtcgcgaggttccctctgtggcagatggggctgtgagatcagcatgtcctgggttccccaacatcgagggtcactttgtttttgggtcgcgaggttccctctgtggcagatggggctgtgggttcagcatgtcctgggttccccagcatcgagggtcactttgtttttgggtcgcgaggttccctctgtggcagatggggctgtgggttcagcatgtcctgggttccccagcatcgagggtcactttgtttttgggtcgcgaggttccctctgtggcagatggggctgtgggttcagaatgtcctg

SEQ ID NO: 1886490 - DNA, 4001 bp, Homo sapiens
gctggcggggcgtggtggctcatgcctgtaatcccagcactttgggatgccaaggcgggcggatcacttgaggtcaagagtttgagaccagcctggccaacatggtgaaaccctgtctctactaaaaatacaaaaattagctgggcatggtggcgcatgcctgtaatcctagctactggggaggctgaggcacaagaatcgcttgaacctgggaagcagaggatgcagtgagccaagatcatgacactgtactccagcctgggtgacagagcgagactctgtctcaaaaaaaaaacaaaaaacaaaaaaaccaaattgctgtattttatgttgtgaaatagggtcttgctgtgttgtccaggctggagtgcaggggtacaatcacagctcactgcagccttgacctccagggctcaagtgatcctccgtcctcagttttcaagtagctgggactacaggtatgcaccaccatatgttgcccaggctggtcttgaactcctggagagagatacatataaacacacacacacacacacacacacacacacaccttttttttttttgagacacagtttcactcgtcacccaggctggagtgcaatggcacgatcttggctcactgcaacctctgcctcctgggttcaaactattctcctgcctcggcctcccaagtagctgggattacaggcactgccaccatgcctggctaattttgtatttttagtagagacagggttttgtcatgttggccaggctggtctcaaacttctggcctcaggtgatccacttgcctcggcctcccaaagtgttgggataacaggcgtgagccactgcgccgggcccatacatatgcatttttaaaaacttatttatttatttcgagacagggtctcactctgttgcccaagcaggagtgcagtggtgctatctcccaggctcaagcaatcctcagcctcccgagtagctgggactacaggtgtgtgccaccacacccagataatttttattatttttattttttaaattttttgtagagatggagtttcaccgtgtcacccaggctggatatttttgtatttttgataggcctgtacagtttccaaagttgcaaccttttcccctccctgagagtaggggcagcccctgctctccctctacatcctccacagtcccgaggttttggcctctgtttcctccgtttcctatgcttggaacgccagtggctcttttgttggtctggctgactcctgttcctcttttaaaaatttaagtttggccgggcgtggtggctcatgcttgtaatcccagcactttgggaggccgaggcgggcggatgacctgaggtcatgagttcgagaccagcctggccaacacagtgcaaccccgtctccactaaaaatacgaaaattagccgggtgtggtggcatgcgcctgtaatcccagctacttgggaggctgaggcacgagaattgctggaactggggaggcggaggttgcagtgagctgagatcacaccactgcactccacctgggcaaaagggcaagactcggcctcaaaagaaaataaataaataaataaataaagtcaagggggtaacacctcttcgtaactctcctgttgtttctcatgccagcatcaccatagccttgaggctctgaggtaggtcacttcgtcgagctcgtttccgtgaggataacgttatcttgggtgtctgtgagactgctgcactgagtatagagcccaggctcctgggtcagccgggttcgaatcccctttcctccgtgaagatctgggtcagtcacaagtgcttcagtttcttcgatttgactgagggaggctttgactccaaaaaattaacacttgagtgtacccggccacagcttagcacatccagggtgtttccaccctttcttcgggatcctcagggctggatggagccggtccttcccgtctctccttatactcacgcactagcgctggctggaacaagtcctccaagtagaacgaggagcgggtttcagcggcgctctagcccgccgagagcatacgccctccccacgcggggccgctgattggctgaaggttgcgctggcacgcgcaacttccgggacagaggctgtggctggaaggagctgggcatccggcctgaggcgcagcggtcgcgttagttcggcccaatggcggcaccgctgcttcacacgcgtttgccgggagatgcggccgcttcgtcctctgcagttaagaagctgggcgcgtcgaggactgggtaagattcaggccgcttccttctgcgtatctgggacgaaagctcaggacggcgcttagaggagcggattgaaaggatgtgggacaaagctcatggcgtgtgataggagcacggggtggagggtcatctcacgttcacagaaatgagctcattcctcctaactgggtaatagacatgggtggggcctggaaaagtgactatgttctctgttctggaggccccctttcccgactgtgtctcttcgtgatttcccaggcctgggtactgccttctgcgccttgacccctcttccttccctcttcttcgtccaaatttggaagggatttccctgggctatgtgggttatcagccgaacgtcgtcactcatggcaaattgaatattacatcttttttgtttggaatttgtttcgacacacgtatttgtttcgcagtctttattttgctccacttttaaaatccctaacccccgtagcactcttggcgtttaactttcagagtcattaggatgctatgttttttcattaatttactacgtgtaagtgaagcaaaccttgtaaaacaattagcgtaatatgattcataataattatcgagctcctgcttactgtgttaaacactggggacagtggtttatccaaagacactaatgtccctgctttctacagagcttacagcataggggggaaaggcagtacataggccaataaataaacgaacacgatgatttcagttatacaacaaggtaatgggggagggagaagggagagaaggagcttttgagatttctcattgggaagacatctgtcatttgagcttccacttgaatgaagacaaaaatctaggccgggcgcggttgctcacgcctgtaatcccagcactttgggaggccgaggcgggcggatcatctgaagtcaggagttggagaccagcctggccaacgtgcgaaacctcgtctctactgaaaatacaaaaatcagccgggcatggtggcaggtgcctgtaatcccagctactcaggaggctgaggcaggataattgcttgaacccgggagatggaggttgcagttaagccaagatcacaccactgcactccagcctgggcagcagagcaagactccatctcaaaaaaaaaaatccagccacgtagagatttgggaaaagagtatttccaatagagtgaacagtaagtgaaatgaaaaacagcttggcttgtttgaagagcagaaaagacgttatggctgtagtaaaacaagttgttggagatgaggtgagagaggtaggcaggggccagattaatgtaggatcttaaagaccacactgagagatttggatttttactgtaagtgcagtgggaagacagttattggttgctgagcaaaggaaggattgttggttaagagtggaagcagggagaccagtaaagaggccttaacaatagttccactgaattatgttggttcaataaatgttggctattataatttttattattttcatgaacttaatagcttgttaatcttggttccacaggatttcaaatatgcgtgcattagagaatgactttttcaattctcccccaagaaaaactgttcggtttggtggaactgtgacagaagtcttgctgaagtacaaaaaggtaaggggagataatgtgtgaggtttgcttttggttaggtcagaatacaactattgctgttatactaaagaccaatagaaatagcaagattaattaag

SEQ ID NO: 1886491 - DNA, 4001 bp, Homo sapiens
aaaggagtcaataggaggctggaacagagggtgtctgcagagaaagtactcagaagatgcctggctgagaggtgactttaggggtgggcagaggccaattggtgccagctttgagaactccagaaaaccccagtctctagctcaggtggatgcctgggtagacagtggtgctttgtagggatggggacaatgctgaggactggtgagtcaaccagaaagcagccaggggctctgaaacaggagagggctctgggcacagagggaagtttgggatggtcagcagtgaatggatgggagccctgagactggatgatattttagggtagggtgaataaagagaagaactcagcccctggaagtcatgcccaggtttaaggacttcagagaaaagggcactgaccggcccagtggctcatgcctgtaatcccagcactttgagaggccaaggtgggtggatcgcttgaggccaggaggtggaggccagcctggccaacatggtgaaaccccatctctaccaaaaatataaaaattagccgggacatctctaccaaaaatatagaaattagaaggcggaggttgcagtgagccgagatcacgccactatactccagcctgggcaacagagggagactccgtcccccaaaaaaaaacaaaaaagaaagaaagaaaagggcactacaaaggaagcccaagaggaggggctggagagtggagaactgtgaggcagaggtggctcaagcctgtaatcccagtactttgggaggccaaggtgggaggatcgcttgagcccagttagagaccagtctgagcaacatgaagaaagcccatctctaaaaaaccgaccaaacaggctgggcgcggtggctcatgcctgtaatcccagcactttgggaggccaaggcgggcagatcacgaggtcaggagatcgagaccatcctggctaacatggtgaaaccccatctctaccaaaaatacaaaaaattagccgggcgtggtgtgggcgcctgtagtcccagctactcgggaggctgaggcaggagaatggcatgaacctgggaggtggagcttgcactgcattccagcctgggcgacagtgacactctgtctcaaaaaaaaaaaaaaaaaacccgaccaaacaaaaccaagcaaacaagcaaaacacacaaaaaaacagccctcaggactggtgggggcggggtacagatattcagggacctcttactgtccctgaaaccattcctgggtaggtctgacatacatgagggctgcgggagtgcaaggcctggagaagcctcaggggtgtccaggttggaagggccaggggtgtctgattgatgggaggagcgggggagtggaactggccctttgaccccaacatggggtcgactctcagccccacctttaccgactgtgtggagggccagcattctagccccggctttggaaaggactgggttgcccaacacatggccctgtacccggaccctgccagcgtccccaccccaagactgcccgaaaaccagtacccaatgagtggggaatgcatgacccggctatgagcctggacttaccagccagacagtggcagaaagggcggcctgcctctacagcgacgctgaggctggctgaaatggcagggctgaagggcagcgtctggacccagaaggtgccaggcggcttctggactccccaaggccttcacaacagccctggatcctttccaccaaccagcctaagccagcagtagcagctccaggacctgtttcaggtggtcacggacagggggcccgcaaggtctccagagcccgagggatctggggaggggacaagcaggcggggctccctggcgctcaccgttttagggtctgcgtgagaaagcctccctcacatcccccagggtctgccctccctgcaagctggtgggctgcgtgggccaccggcctgccccgttatccgagagggcggagcgagccgtgggcgcctctaggggtgcgggagccgcgggagcgcagggggtggggcccggcgggccaggggaggggcggcggggcggcgggcggagggaggggccggcgcctgcggcggcgacagcggcagctgcggcgcgaccaggccgggcacctccgagcgcaaggacagcgcgaggtccgcgcagcccagcgcagccatgtgagtgtcccgcgccgtttccggggctgcaggccgggcggggagcaggcgcggaggttctggtgcccccccgccggcgccgcccggtgggtccgggatctgcggctctgtcccgcctcaccccatctcccggaccccggccgcgccttgtctttcctcccctccccccgggcgtggagaacgcagcttctcccacaaaagccgccgcctccgggcctgcagagcctggcgctgctgccttcctcccacggcaaggccctggcggccggtgccccggggcgctgggatgggccaggccagagagcgggctcaaggcgccagcctgggccctggcacgcgcgctccctgggagcccttgctgccttcgccgcaggggaggctgggctggaaatggggagggggcgacgaagggtgcgggccggcctaggagctgagctaatcctcctagctctaggggccggcctaagcggctttgtggccggccccgaggtgaccgagcctgggctggagccgggctctccgcccaaacctggcgtagccgaagccggagaggatcgtccttgtcggggaacggagcttttccctggaaatggaggttggcgcaaggttcctgcaacagccgggcctgggctctctgcagaactggtttgggcaaggggctgctcaccagggctagaggtcggattcagtccagattcagcaccctttgtcctcctctccagggtgagccctgagtccggcctcccctacagaccctccccagccagttctaacgtgtgtccaggctggccgccccagcacctactgtgcgcagcctcgtgtaacaatacttgtgccctggctgcagtctgcggggccgcgccctgggcctgccgcattcggccaacgcacagcatctgaggagggttatgaccatctggcagatgcagaaacaggcccagagaggttagtagtattctcaaggtcacacagctggtttgggagaagcgaggattagatctgagtccttgcccctgcgacacccacctccgtggtattggagggaggagaggaatgataattgggggctgaggtacaaaatactccagcgggacaaggaggactggcatagctccttcttccaccgccctctccggcttgggtcctgtgactgcggcgggagagaggagcaaggtgagccgccccaggggtctgggtttgggtgcgggtgaggggaggactcaggactctgggctgggtcccgcttgagagaagcgggcggggagggcgcgggtgagtcacggcggcccctctgcgtcgccgctcggactcagccctggccaggcccggcccgggggaggccgcctggctcccagcgcgcggccagggaatgtaaccagctgaccagggagggggccggcaggaagtgaggccacccgacagcctccgcccggttccggggtggggggtccggggctgtgccgctccccctccctcctatacgcttgggcagctgcgagatgacgtcagccgccgggtttgggggcagttgccatggagacaaggacaggctcagaagggacccccttctcccttgcagccgccccttgcccaggttatttttagcctctgtttacctcggtcggggcggccccggggtggggcggggctagacccggggactcccagagaggcagctggcctggcacagtgctgagatgggcagcccaggtggtgggatattccgccgcacccgggtgtgccagtcttggtgtgtaggaagtatagcggggctgcaagatctggggccatgcggacaggtcagggctcctccactcacggccatcctgacc

SEQ ID NO: 1886492 - DNA, 4001 bp, Homo sapiens
ttttgtttttgtatttttagtagagacagggtttcactgtgttagccaggctggtctcgatctcctgacctcaggtgatccacctgccttggcctcccaaagtgctgggattataggcatgagccactgcgcccggccctaatttttgtatttttagtagaggtgaggtttcgccatgttggccaggctggtctcgaactcctgacctcaggtgatccaccagccttggcctcccaaagtgctagggttataggcgtgagccaccgcccccggccctttttttgatttttaatcaacattattgaaaggtataatttatataccatgatattttaaatgcacaagttctcacacaaaaattagccaggggtggtggcgaagtgctatattcccagctgctggggagctgaggtgcgaggatcacttgagtctgggagatcaaggctgcagtgagctgtgaacgtgccactgcattccagcctaggtgacagagcaagaccctgtcacaaaaaacaaacaaaaacagttattcttccttgggaactgcttataaaaaagaaaaagcaggtcagcactgtggctcacacctgtaatcccagcactttgggcggcccaggcaggcagatccttgagctcaggagttcaaggccagcctagccaacgtggtgaaactccatctctactaaaaatacaaacattatctgggcgtggtggcgtgtgcctgtaatcccagctacttgggaggctgaggcaggagaaccgcttgaatccaggaagcagaggttgcagtgagccaagacccggccactgcactccagcctgggtgatatctgtaaataatggttccatgagtttagaaatacaaagtagcatgacttaacaaatttacacatctatgtaaccaggtcccaatcaagatacagaataattctatcacccaggaagttctcttgtgtctggaccaaacatccttctccacaggtaagctctgttagtttttatcagcatagattttatttgtcctattcttgaatctcatataaatagattatacattatgtatttggtggtccttcaacataatggccaggtgtggtggctcatgcctgtaatcccaacactttgagaggccaaggcaggaggatctctggagttagcaggagatcaaaagcagcctgagcaatataatgaagacttccgtctctgcaaaaagtttaaaaactagccaggagtggtggtgcgggcctgtgggcccagctacctgggaggctgaggtgggaggtcaagggtgcagtgagccgagatcacaccactgcattccagcctgggcgacacaatgagaccctgactcaaaaaagaaacgaaaaaacgcattgtgtgttgtgtttattggatggtggaattatggggtttacgggtcttctgttgcgttttggtttttgttttcttacctgttatcgcgttcctaacagtagaaattggcatcatatagtattctcatggaactttcctttgttcaaagccctacagttcagagacttacacatttaatgtgagatatgacaggcttaaaaagaaacgttgggggccgggcgcggtggctcacgcctgtaatcccaacactttgggaggctgaggcgggaggatcacaaggtcagcagttcgagatcagcctggccaacatggtgaaaccccatctctactaaaaatacaaaaattagccgggcgtggtggcgggcacctgtaatcccagctactcgggaggctgaggtagaatagcttgaacacggaggcggaggttgcagtgagtcgagatcccgccacggcactccagcctgggacagagcgagactccgtctcgaaaaaaaataataaaataaataataaaataaataaaataaaataaacgttggcttatttcagtgtgaagtaaggcaataaacggagggctaacagttccacttcgtagagctcagacattttaagaagcgaggaggccgcgtcctggaagggtgagcaaaaagcgcgaggtttgcgcacgaagggaaaggcgaggcccgaggagagacctggcgccgcgcagaatgatgatgtcgcacgctgggtgggaactgacgtcacctgtgctcaccgccgcttccggtccgcgtgaggtgcattctcgcgccggtggcgaggttagggcccgcgttgcgacgtggtgcagcgcatattttcacaagtgggtctcccttgtccgggactatggccaccgactcgtgggccctggcggtggacgagcaggaagcggctgtcaagtcggtcagtagctcagctcctggcgaggaggacgtagcaggggcccaagcgaaacctcccaaaagcacagggagctccccgggttggggaggcccctgggcaacgcgctcctgcagtttgctagggcagtcacttgcccttgatttgctcttagagctaaagagaccaatgtcgagctttttatctccatctgggctggttaaggacttcatcctttggtaaatccgccccactatgcatgctgtcattcctctattgacctcctcggtgacgattataaggaaagccaagtttagattctgattctctttttcattacgcgactgttcttcgcatgtttctgtactactctgtatttaacatttcttagatccatgcttaacgtggttggtagtttgtagctctttgcagaataacagattgacttttggatttaatacctcaatctactgcagatgttggaaggaggcactacaaattgtttcattgatgtgtaaagtaacggtttcatgtacttgttctttcagtaatgaatattcattcaactggaatgtaattacagcatacactgtggctttctgttcttatatctaagacctaaactttaggtttgtttagtgataatggactgtctttttttttgttgtagttgtttctcttttgaggcagagttttgctcttgttgcccaggctggagtgcaatggcgccatctcggctcaccgcaacctccgcctcccgggttcaagcgattctcctgcctcagtctcccgagtagctgggattacaggcatgcgccaccacgcccggctaattttgtattttttgtagagacggggtttctccatgttggtcaggctggtctcgaactcccgacctcaagtgatccgcccacctcggcctcccaaagtgctgggattacagccgtgagtcaccgcgcccagccggtatggggatttttgagagggctattgacagaattagacaaggctggcaaggatttattgaactacagagaacagaatatgttagaagtgatggctaatagaaatatcagtgtagaagttattctgatagccccgagatagagggcctatgttgggcagtggaagtgaaaattaagggatgggtataagatatgaaggtagaatgggtaggacttgctaacataataaaggagagaagggagataaagccaaaggtttctgttttcaacctggatcctattggtactactaacgtcccaataacaggaataggaaagtgggaggaagggcagatttgatagaatggtgaaggcagccgggcatgatggcacccacctgtgatcccagcactttgggaggccgaggcgggcagatcactcgaggtcaagagtttgataccagcctggccaacatagtgaaaccctgtctctactaaaaatacaaaagttagccaggcgtggtagtcgtcccctgttaataccagctactcaggaggctgaggcatgagaattgcttgaacctgggaggtggaggttgcagtgagccaaaattacgccactgcactccagcctgggctactgagtgagactctgtctcaaaaaaaaaaaaaaaaaaaaaaagaggtgaaggctgggcacagtggctcacacctgtaatcctagcactttgggaaactgagacaggcagatcagttgaacccaggagttcaagaccagtgt

SEQ ID NO: 1886493 - DNA, 4001 bp, Homo sapiens
cgttctgcatatgaacatgggccttggtttccccatctgtatgaagaagggagtagggctgggtgattcgcaagccctcctgatcttacctctacagaggttgtccccgtgacagcatctgtccccccacctcagccacatcatgctcagcccacctgccttggtgaggacacagaggtaaaggtgtatgcagttgctctcaatggctttatttgtgttttacacagatgcggggtagggggggtggtctcggcctccacgccttcccaggcatgaatttcatgatgcgggcatccacgcctggtgacaacaggaggtgctggtgctgctccaggacacgatgccctccagagtccaggctccatcctggcaggcaagggctgtcggagtcaccctgcaggaaggagaggaggtgtctccaggcctgaactgggtgccagggcctgggagaccctaacctggcggagtccagggaggggtgcggagaaatggcaagtgtgggtgcaggggctgtgccagggtcctgaggcctgggttcacgtggcagccccagctctgccatgcacactcctggagggagctggggcaagtggctttcatccatgccggggcgccattcatcccatgagctgacgcttccagctcagagggctgggaagaggaggaagtccccaggcagcctcgcctgcctggttcaggaagctgtgagcctgagtcctggcccttgtaaggcctagggaaggagggcagagaggagtggggagcccaggcctccatgagtggactggatagtgctggggtacattgagaaaggaacaggaatgggactggacaggtgagtctatggagacggatggagaatagcccgtggcacgtggtgatttttaatgattatctgtccacgtttttctacaatgagcaaaactttaccatcgaagacacctgtcagggtcctttcaggagctttactacttgggaaggaaaaagctgggagaggcaggtgcccatgggccctggcagccaagggtgcagggcaaggcccaggccagctgggcaggggcccttgtgcccactcacctcctctcccagaggtgggtgtgtcccatcgtggtgtcacgagccacctcctctccctggctgtgtggccttagcgttagccatcctcagcacctggatggcctccgggtgagagccaaggtcagacgccctggccaccacacgatcccggccaccacgcggtggctcttcctggagagtgagggtggcaggcggtgcctgggctcatgggggtgcctgggaagtgagccagtcagggtgagccctgcttgcccctcaatctcatggtgatctcagggcatccctttttcagggtctaaatttccccacctgcacagtgagggtacgggacctcccaggtttccccaagctgccgtctgggtggcctgcgagggtggaggtggggtgcacggcctggggtgggtgtcacctgcagaggcggctctgcctgtggccgggggatgggggtgctggttccccagcctgcagttcatttccgacccttttcctgttggttgcagggtgtagttggggttgggaagggggatgagtgtcattccctgacacctggtgggccccaactcctcaagctcaagcctcacctgacccctggtgggcagcggtgaccacccagtcctcgctgatgtggtagcccccgcagaagtggaagccagctttgtactgggaggataggaggactggcaactcccacaagggcagaagggacccgaggggcgagggctgtgtaatcctagcactttgggaggctgaggcaggaggatcacttgaggccaaacttcaaggccagtcgggccgcatagtgagacccaagtctctatttatatattaataaaaattgttttaaacttccccccaactctagcctgcccaccacccagggtcccccccaccacatgggcaggacctctctgatctgcagggacacctgccaggcctcggagctggagttggcatcctccccagaacagccggcagttgatggtgtcctgaggtgccactgcagtgccctcagccccctcccctgaccgttgtgtacccaagggagtgtctgtccccttctgagcccagggtgctgggacatggtggctgtatctccttgggtccctgtgctcttgaggactctgagtcagtggctggggtggattggggtgtggggcccgggggcacataaacccaggaggccgcccaagtccagagggtgcaggggctgggggtgaggggtgggcaaaaggcgtggatgcaggagcccctcaggaggcagaatcgtagggtgtggagggtctgagggtgcgggggctaaggaagggaggaaacagatgccccaagcacggccgagggggtgggggtagcggccagaggggcgggggccagctggcagggtgtgaggaggaaggggaggacgatctggccacggaggatgtggtgccttgatgaaacatggcacggcgggctttttgcttctgggcatttggggctggggatgggcatgtttgacctggggctcccggcctgcctgagcctcgaacttttaagagtcattgccatagggctgggcgcggtggctcaggcctgtaatcgcagcactttgggaggccaaggcgggcggatgacgaggtcaggagatcgagaccatcctggttaacacggtgaaaccccgtctctactaaaaaaatacaaaacaattagccgggcatggtggcgggcgcctgtagtcccagctacttggaaggtgagatcgcaccactgcaccccagcctgggcgacagagtgagactctgtctcaaaaaaaaaaaaaaaaaagtcactgccagggggaagccagtgatccagagaaaggccatgggatgtcagagggtccccatactgtcccctgagcccaccaatcacggcccacctcgacaccacccacctcatcaccagtccttgcgttgataacgctcctggctccagcgtatgtctggcagccctaggagtggccgtgggaagattccttggagccacaggtctgtggggccagagtgagctcatccccccacagcccccacgctgcccacgccctcctgcagggcccagagcaagagagcaagggtgggtggcaagaacctgtcgcctgggggcaggtgctgaggatgggggccaaggtccacccggtccccaccagccagatcccccgtctgtctctgcaccccttttcatctgcccgtgtgttcctggccactctctgggaagcaggagcctgagtggtgggagaggggactaaggaagggtcctcccagaggccgcccatgcctagcccagcccagtccagcccagtgggggcccaggttccggagtggagtgaggccttggaggccccaaaacagaagacggacagcgccgacgtgtgttccatgggtttactgaggctctgtggggagcagggtcggagggagccgcgggctcagttggcagccaggatcttctgcacccaaggtatgagcttggtgacacgggcgtacacgccagggctggaggtggagcaggtgtcgctgccccaggacacaatgcccaccagggtccaggctccatccttttggcagaccagggggccgccagagtcgccctgtgggagagggagaagggggcttggatctggcagccgagacagactggtcccaggggccactggacattgttcccagagtccagtccaggaccccacacacagcaaaggctcagcatgtgctgttgcgtgggttatgaaagaccctagtagctgcttatgtggttcatgcccctggaagcctgagccagccctggaatgggaccctttaatggcagctcagtaaagctggtttgaccaataggaggaagagcatggtggggctggccaaggggtccgtgtgagggagggagggctgctggagcccgctgtcctgctggga

SEQ ID NO: 1886494 - DNA, 4001 bp, Homo sapiens
aaatgcaaaaggagtcagaatatcttgaaaaagaagaaaatgttttggctttctggcttgttgctgtgtaattattttaaaatatttcaaatgactactttgctaaattttcttttcctatagcaacttgagataaacatgtgaaagtgattgttctgactcttgttccccaattcatgtttatttatttattttgctaaatataactgtatttagagaaaacccaggattctctttgaagttccagccagaaccttaaagcctctgaaaaggcatcaagggaaaaacaaaaacaaaaacaaaaacaaaactcagccttggtgatggccacacccaaaatgatgcctaccttctctcttcccagaaaaaaaagtttatttggataaagctcttaagctatttctttcttgttctagtgagaacctgtagctagtcctccttaaactccctttctcctaagccaaatggatagacacctgtaaaaagtagagtcaaatagcaacaactctggaactgagacaggaatcctagatctgatttgctgtgtgatcttggataagatagttaacctctctgtgccataatttcctcatctacaaaataagggttataaatgtacatactccgtagagctcactgagtgttcacaaaaatcccacctacttacaaaaagtcacttattagttatgtacctggcatataactaatacttgataaatgctaacaattattggtttcctatatgcagcctcctacctctaaatgcaatacctcttctaggatacagattttgtagtaaactctgtaaatttcctatttccaaagttgtttatatttttaaattattcacattaggaatattttgtttattttcacatcacaatttttttgcaggcattgcttgagaaccaatttattcttgatcatcttttttgatgtgatgcttatcagtaatccctgaagaaatctaatttaaaaaaaagcttcaacatctatagctgtctatgttggatttatttgcattagctatttagatgagtctctctagcttggcatttgtcacctttttttaacttttttcttcccaggagatcaacatctttgcatccttctatcagtactttgaatcttgtatttcacttgaatgcccagccccgcgtcagcgatgagatattgatttcttcttgttgtcatttaacattctcatggagaccctggcggaccaatttacaaatgattgctaaagtgctttggcaaatcgtggtgtttttgacagagaaagaaaaatacagactatgaaaattttgtacctttcaatggggttcacttaatgccatgcagcctttctcctcatgagcattttcggtcaccactaaagatcctgtttggcttctttgatcctgcgatgcacagggctccctcctccaggcaggatgtctcatctccggactttgtggactggggttgattctttcacgcccagggggcctcacctccgggcctgctcctttcttagaggttagtctttgcgtgagcaggcacacttgttctgaaaccaccaccatggggttaatttgcagatcctcaacccaccaggcagactccactttctgaccccatctgtcagacgctgaaattcatggtccttcccagggcagaagccacgagccacagagcaaagctgccatcactttgtatatttcagggttatttattaggccttggcttggaagtctagccaggaggttttcactcagggtctgtttgccttacgcagtctgtctctgaagtgcaatttggagatacagagacgtcagggtaattttccatcctctggtgacagtgttattattgagaaggaaggatgagggccgcttgctgtgctaatgactgcttctcatttcataggctccaggagacccaggctgtaaacgactgcacatagtcaggttcccccagagcctcacatggagttcctcgccctggggaagtgatgttaatggttttctttgcaaatccctctcccacccactttcctgacaggattatagaatccctgtgtctagacaccctgggagctctgaggatttcctgagcctgttttcactcactcattgtgatatctcctatggaggctgagtcaacacccagtattgtgagtattgggggcgtaaaggagatgttaggatcataacctaaaagtccctgcctcccacccgcagccccctccctgaccctgtgacccatcacgctagccttctgcaccctttgattctgtgcttttcagagccccgagaaagctccgagcctagaatgctgctcctttcccctcttcatctcctcaatgtccacccatcctgtgtcaccagtcatcagagaagcctctgtgcctccaccccagaagaggtcaggctggaaagctcttagaacctctagtttgcttccttcagtgcctttcttctatttcatatttgcgtgagaatgtgcctggcctcttccacccgaggaacctgagaggctcctgtgagctagggcaggcttgaggctctgctcaccagcgcattcagcagggaggagaggctggcacatgcaaattcctttctttagtcatctttattgtatgaatggctgcgagggagtagcctcggggtattcagtggggaactgtgagtcagtagaggggtatataataggtactcacctgaaaatggtcttttgtctttcagtttacccctgggaaagggtgaaaaaaaggagctgctacatggtgggttacttgagtgtaggaaggagaacaggcataggatccattcacgtttactcttcttgacgtgatatatgcatgtgaatagcctttaggagcaaactcaacactcagctaaattgtagtgcatgtcatttccaacagacccttagactattagaaagggcaagatgattgtctgtttcagcgttgacatgtgtgtgcacacagaactctttatgtagaagagataatgtatcaagtggggtaaaaaatggaatcactgaaaaaaaattatgtttttccatggaagggtaattattgcccaaaatagagcacagatcaaaacatcttaattctttgccattctcttttggattgtaaaaatccctgtactctctatatttgccatgtcaatgacccaaacgcccaggcattgcaggaatgtggcagagtttgagttgagtcttacgtattcatttagaaaatacttaccaggcagtggccacgtgctgggtactctgatcatgtttcagggtcatgcaagacacagttcctgtcctcagatggcatggggtgatgtgaagagcctggggtttggaatcacaccactttaaattggaattacaaatctaccatttaccagcagcataaactgggacaagatgtttaatctccctcattcccacttcctacatctgtaaagtgaggttaatgctgcttatctcataagatagttttgaagactaaataagacacaaccatgtataaagaaagtcagatcgccgcatgccctcagtcaaaacccttcaaagggttgttaggaaattgggaatagagtttgaaattctttgtgctgctacacgatctgacctttgtctgcctctctgtccatctgtctggtttttgctgccttgctctgtgtgctcccagtgtgctggcctcctccctgcatctccagcctcccaagcatcttcctgcctcaggacctttgtgctggctgcttcctctggctggaacagttttgcttccaataatcacaagccttttgctcacattaatcaagtctctcctccagaggcatctccgcaagagttctttcctgccctccagcctgaaatatctcccatcactccgaattctttaacctactttctttctctttatagccataattcctatctgacgttacgtgatatgtctatttgcttcctgtctgtctgaaaactctgatgaaggcggggcacagtggcttgta

SEQ ID NO: 1886495 - DNA, 4001 bp, Homo sapiens
tctatttcattcacactcctgattagaagaattggtaagtaatccaaattaagaaaataatggatcaaatccaacatacctggggggtcagtctgtgactgctgcattagaatggacataaaagtaatgtcgaaactcgacagggtgaatagtgtgtgtgaactaccacgcaggactgtggtatttgtgtaggttaaacatgaaaggtacagatagagtgttacagagacccggagtttgaagctttgtcattcccctccccactcatccagtgtgcatgttcaaagcacaaaggagtatttggtagtttactgcttatgatcctaacctgaatttaccaaaagaaacgtacgtttatctaaaaatggcaccatccaaacaaaattccttatcaagcatctactaagatttggtggcaaacagtgtgggttgtagattctaactgcctgggttgacttctgactctgtatctaccagtttttatttaaataccttctctgcctggtccctcctccacaaaagggtatgatgtccactgcgtaagggaatgaggaaggctagatgtgctataaagtgcttattatgcctgacttgataccccagtgtcttgctgaaccaaatattttcgctatccttatatagctctagaaacttgacaaagaaatacactttattatcatagatgtaattttcttaggcctttctgaattctgaaaataataacaggtttacagatataaataatggagcaaaaggacacctggttttggggtcacattttgacaggcttgcactgtcatgtcaggatgaggatttagcctcaagagtttgtattgcctagaaatgtgctgacagtgtcattaagtacaaactacagtatttccaaagaaatgaattttcatgacaaagcttttcctaaaattgttttagaagtccttttgctgtaacttttaaaacatctcaatgaccactcaccatatttgcctgttgtctattcagacctttttgatatttccttcctctttcagcatttttgttttttaagtgcagttttcattgtggtatccaccaaatgtttgtaaaacaaacaaaaaaaatgagcattagtgttggaccataaatcatcaaattggataatgactaactgtagtctttttttttttttttttttttagctgctggatacaattttcatggcaataggaactgaagtacttcaaataatgtgagcttaaacatgttacttcattgaaacaaccaaaactacttgatgtttacatctaaaatcctggttaaaataaattttagatttggaaagggaattggcaaaactaacattctttgtagcaaaatgtcccttagtaatagtcaagttgacctcatttcagtagttcataaaggaaaatccaaagccctcagcagtgaattacctggccacatagctgattttggtcactgtgaatgcagaccaatcacctagtactggaagctcacagtggtagacatcactatcacagtactttacggtcatggatttctcgtgaactatttcaggaacaatcacaaagatgacattcttcactgtatttgcatttgtaaccaccaagcaagtaaggatctctgccccagatgcatggtttgaggtaaggttcacagggaccactaaaggggcagagccaagtaaaaacatggatgtctccagtggacagtgtaggatttcttgataagcaaagcacctaaagcttttagttttaatacttgagaagttttaaaaacccatgcataaaacgtggaataccggtaaaatacacatatccctaagtctagtttaaactaaaatttctagagttaataattttcaataaaaaaatccagcttattttgatacaaggggtctttgggtaacatcttaaaaatcaatgctagaaaatgctcaacatcactagtcattagggacatagaatcaaaatacgtcacacccatttggagggctattataaaaaacccagaaaatgagtgctggcaaggatgtggagaaactggaacatttgtgcattgctggaaggaatgtcaaatggtgcagctgcggtggaaaagtttggcagttctcaaaaagttaaacagaattatcctgttgtcttagtcatttgtgttaaccgtaacagaatacctgagactgggtaatttaaaagtacgaatttatttctcatagttgtgaagactgagaagcccacgatcagcgtgctggcagactggtatcatctattgagggcccagtctcagcttctaggacggggcctgttgctgtgtcctcatatggtggaagggaatcgaagggcaaaaaggaggtaattggttcccttgagcccctttataaaggcactaaatccattaatgaggatggagctctcatgacataatcacctcctaaagcctcacctatcacgttggtggttgcttcaacatacgaatttggtggggggacattcagaccttagcatatgtgatctagtagttctgctcctggatatgtatccctaaaggacctaagaagggacttcaagagagatgtgtacacccatgttcatagcattactcataatacccaagagggggaaacaatcagcagatgagtggataaaccaaatgcggtctatggatatagtggtgtattatttggccataaaaatttctggtacttgctaccacatggctttttcccagggaaagtattagtttttgtttgacaaaacaccttgataggtcatggttctgcaaggcagagatgtgaaacaaagaaagctaactgttgcaaataataaaaagttggagttcctttgagctaaagctaaagtggcaaaggaggaagaggttcatccctacccttctgcaccccattattttgaagaaaaagagtggcctgaccctccagatctttcttttctggaggacactgggcgaaaagtagttgccccagtgactgttcgagcagttgatggcttgctaagtaagaatgctaaacacaaaaggacaactcttgtttgatcccactcatatgaagggaaattcagaaagaaagtgaaatagtggttaccagggtctggggtgagggtggaatttggagctctttttcagtgggtacagagtttcagtttgtggtgataaaaaatgcatgtaagccgggtgtggtggctcacgcctgtaatgccagcattttgggaggccaaggtggccggatcatttgaggttgggagtttgagaccagcctggccaacatggtgaaaccctgtctctactaaaaaatacaaaaattagctgggcgtggtggcacacacctgtggtcccagctacttgggaggctgaggcatgagaattgcttgaactggggaggcagaggttgcagtgagccgagatcatgccactgcagtgcagcctgggtaacagagcaagactccatctcaaaaaaaaaaaaaaaaaaaaaaaaaaaaagcgtgtagagtggacatgcttagatccagtaactgatacccccaaattatatgcttaaaaatggttaaaattttggctcttccccacccgccccacccctaaccccccaccccccccaaaaaaaaaaaacccaggtgaaaaaggaagagcttagacttcaaccaaccaacctcccacccctggaattaaaaaaaaaacaaaacaaaccaaaaacaaagctagtgcaatggtcatactgttccatgtcatacacagcaaggggagaatgcattattctctcaatggatgcctttcgaaagatatgcttaaagcaagtgccctcctgctgctacaaagtgcaaggctgcctgtgtcaggactaaaggaagaataccgagaaccccaagttatatccttgttgcccctgctgggtggaacagggcagagcgatgtgggtgtggattagcgccctctggttgctgaaagtgaattcacagtttgttctagtccccagttagatgacgttggaaatg

SEQ ID NO: 1886496 - DNA, 4001 bp, Homo sapiens
actgggccactgagaaggactctatccgtccctcaggaccagccctacttcctctagcctctctgtccctcccccactgtccctgctcagtcccctctgctgcattgtctcggttccacatttctgggtaattatatttttggcagtggcccttgtgcgtgctgtggagcaagcagttgagtctgtggtcttttcccaagtactgtgtccagcagggccatgccatcctgttcttctgctgtattccaggacacaaaaggtcaggggcactgccagaagaacagagcctggtgtggagacctcttggcctgatcgttatgtaggcaaaaaaggagcatcttaggagaatcagtgagagtatataacagggcaccccagtcccagccttgctggctgaccccataaataatctcaatcgtgcctggttttgtttgtttgtttctgagacaagtcttgctctgtcgcctagactggagtgcagcggcgagatctcggctcactgcaacctccgcctcccgtgttcaatctattctcctgcctcagcctcccgagtagctgggactgcaggcatgcaccactacgcctggctaatttttttgtattttagtagagatggggtttcactatgttacccaggctggtctccaatccttgagctcaggtaatccacctgccttggcctcccaaaaggctagacaattgtgacttaatatttgggtaggagtcaggaggagctggatctatatttagggcactcagttgtggcaaggagaggatataggacaattaaaaatagagggactgctgtcttcaaatcatactctcatactgacctcatataggaaaacacaatgccaagtctgtcacatggaaaagctgaacaaaggacaactcttaccatctttcataattgctaaattttataattgtatataaacagttacaatatttgataattattagaatatttttacaaaattatattttttatgagtgtagttgatgatttattcttattttatgaaatatttgcaaagtgattttcgtaaagacctaaaagacatctttaggaaacacctaactttattgctgaattctgaagcagcaatgcatttggtaaatatctattgagtacttattaatactgggtcctgggatgtactcagcaccacgatagtctctcagccccgagatgcatgcccccgcagctccggttcaagtgtgaatgaaggacagggatggagggtcaatgaagagaagggggaatgtcaagctggctctgggcaaagtatgaatcccccaggagtgtcccatatcaatgccatccttctgccctttgccacactccatgccattggggtctggatttgccaaccatatgtgcccaagcttcttgaatcagggtacggagagctctatggtacccagcagcatcccagcagctaccaaggccacagggtgaatataggccctgaattaaccattttatttgaagatctttacaggataaactacctttataacaagacacacaggaaaatatcatggagtgtgatgcaaactcctatatgtttaagataaaaagtgagaccaaaaagaacctttctgccagtgaggggctactttgtgtcttacctcagattcttcaggccagaagttcacccaccccttttcctagggaaagcttgagaagttgtggcatcttccatgcccatttccaatacaggatcagatggagactgctaggcctggagggcttgagaagggctgagaggtagtccaaccttgatttcagcctgtgctcagtcccagccctgcagactggcctttggaaaaatgactgattgctttcccttcttaactcctcccaaacctcttcacagatcttcttcctctaaatctcctgtactctcctccttcagtgattgtgtctgcctgatctactctcccccacccctttttatgatagaatcacccctagtttctccaaggaactgccacttcctgccactccctctggccattgtggttggcccagtaatgaacacatgaccaaagctgagccaatcagaagttttccttgggattttacgactgaaactaggcaagagaaaccatttctttccctttggatcagcaactctcaggccacagccactgggttaatgacgactgtatacctgccacctgaaggagtctaagagaagatcagcactgggacagaagccgaaatgaaaaaagaaggtaccagtgctttcaaatccctggattgcttcctgctttacattcagtacctagctcataaggtctttataaggattaggtgagttaaaacatgtgctgagcatgtaatatgtgctcagtaaatgtcagatattatttttccacctttgttttcctcagctacatgaaccaataaaaccaacaaaaccatccttttaaaaggagggtttgaatcaggtttctgtcctgggctcttaggcaccctgtcttttgaaattccagaagtatgttttcctagaaaggaaagcaggaactaaattaagctacatagattatcagtgacaagtagccagcctccaagatggccccaatgacccctgcctcttggcattagtgcccttgtctagttttctcccatattgaatagggctgatttgtgtaaccacagtaggatattgcagaaatgacagaatgagacttccaaagctaggtcataagagacgctgtggcttctatcttgttctctcttggatcactggctctgccatgttgtgtggacactcaagcagctctgtggagaggtccacgtggtaatgatcagaaacctccttcccacaactgtgtgagtgagccatcttggaagtggatgtcccagtctcagtcaagcctccagatgactgtaaccctgtgtgacatcatgactgccacctcatgagaaagcccaagccagaaccacccagctaagctgctcctgaatttctgaggcacaggaactgtgagataataaatgtttgttgttttatgctaccaggctttgggataattggttatgcagcaatggataattgatacagtgccttaatgtgtaactcccaccaaagcaggtcagtgctttgcacagcatcatttgactattttttttttttttttttttagtaaacagtcctttgttaaataatatcaactatcacttatggagcttactgatatggtgtctgttgctatactaaaggctttgcatacatcattgcctcagtgaaattctccgtagaaatcccgtgtaacaggtactattgctgtgttcatggcagtatagtgatttttgtaatagagtcttgggaaccagactacctgggttcaattatgcctcctcccatttcctggggctgtggctttgggtgaattatatctccctgagccgccgtttctccagctgcaaaatggaggtaattgtagtacctacctcataggaccttgtaaagattggatacactgctatacgtgcttaacacatacaagctacacaataaatgctagatatgattatttacagaggacagcactgaggcttagtgtggctgagctaatttgctgaaggtgccttaactggtaagcagtggtgctggaatgtggactcctgcatctcagtcttttgaggtcagtgctggccactagaaacacaacatgtgccatgtacgtcatttaaaaatttctggacgggggctgtggctcatgcctgtaatcccagcactctgagataacaaggtgggcagctcacctgaggtcaggcatttgagaccagcctggtcaacatggtgaaaccccatctctactaaaaatacaaaaattagccgggtgtggtggctcacacttgtaatcccagctactcaagaggctgaggcaggagaatcacttgagagaatcttgggaggtggaggttgcagtgagctgagattgtgccattgtactccagcctgggcaacagagtctcaaaaaaa

SEQ ID NO: 1886497 - DNA, 4001 bp, Homo sapiens
agcttggcagctgggcgccgtggctcacgcctgtaatcccaacacttggggaggccaaggaggatggatcacttgaggccaggagtttgagaccagcctggccaacatggtgaaacctcatctctattaaagatacaaaaattagctgggtgtagtggtgcgtgcctgtaatcccagccacttgggaggctgaggcagaagaatcacttgaacccaggaggcagaggttgcagtgagccgatttcatactactgcactccagtttgggtagcagagcaagactgcgtctcaaaaatatatatatgtgtgtgtgtgcgtgcatacacacacacacacacaatacacatatacgtacgtacaccttggcaatcttttcagacaagcatgcgctgataaaatttaaattctattgtagatttcattgagattaattcaatctaaatattattaaattctacaattaaataggcaatacatttaaatgattcaaagttcaaaagctatgaaagggtatagaactgactctcccatatggtagccagtggcacacatgtttatagaaatctcagtgaggccaggtgcggtggctcacgcctataatcccagcactttgggaggccgagaaaggtggctcacctgaggtcaggagttcaagaccagcctgaacaacatggcaaaaccccgtctctaccaaaaatacaaaaagtagccgggtatggtggcaggctcctgtaatcccagctacttgggaggctgaggcaggagaattgcttgaacctggtggggtggaggttgcagtgaaccaagatcacgccactttactgcagcctgggcaacagagcgagactccatctcaaaaaaaaaaaatctaaatgaattaaaattaaagaaaattaaagatttggttctttggctgcatgggccgcatttcaggtgttccacagcttcatgtggctctgaaacattgtcctcattgcagaaagttctattggttggcgctggtatagactcaaaacctctctcccacccctcctgaaagccaaccactgttagggattttttggtgattcctttctgagatgatctatgcacacagtcagcacatggagttaatatatccactttaaagaaaataagtgcctcctgtgtagcgcaaattgctgtgtaatagtccgtggaatggaatttattcagctagtttaataatgaaggactcttgagttttttccaggtttctgctcttacaaatattctgccatgaacaccattctctctgcagagtaaattcttaacaatggaattcccaggccacaaggtttatatgttttttctcttttcttttttcttcctttcttccttttctttcctttctcgccctgtctttccctccctctattccctctcttttcctcttcccacgtctttcccccactttcccccatgtcttctaccagtctctttccccctctctcttttccctctctgcccaccccccgccttctctttcttttacaaggtcttattctgtgcagtgatcgtagatcactgcagcctcaaacccctgggctcaagcgatcctcttgcctcagcctcccaagtagctgggactacggcctgtgccaccatgcccttctatttttctttttttcttttttttgtgaagacgaggtcttactatgttgtctaggctcgttttcatctcagtaggtgcttttctagggttcttacccaagggtacctggacggaacttagtcgtttgaagcccctgtcactgtgttgaagttctgtgtctgccctccatcctgcgaagaaggttgaaaacttctatccacttttcaggaagatgtgtgacttcaaaaagtatacaaatgttgggaggctgaggcgggaggatcacttgaggtgaggaatttgggaccagcctggccaagatggtgaaaccctgtctctgttaaaaatacaaaaattagctgggtgtggtggcgcatgcctgtagtcccagcttcttgggaggctgaggcaggagaattgcttgaatctgggaggtggaggttccagtgagtcgagatcatgccactgcattccagccagggtacaaatagcagctttagacttgatcccaccaggcatgattgctgggcaccttcggcagtggatctcctgattctgcctcagtttccagtgtcttctcagagaggcctggagtggagcatctgaagccggagctggatgtcttgctgcaaaaatacattctcctcttccagctctgccgtcagcctgggtgggggaagacctatgtcaggggagagctgtcttcctcctaaagctccacctgcctgatggctgagacttatgcctcattttcagaattcccaggggcccttgaacttctagttgtttgctaaatgtgcaagcacggattgcctctacctccccgtggatcttcctgctggtccctatagagctgcctgcagcctggaaatgtttgcctttggagaaattctagttccgtctgccccagactcatcacaattacagtaacagccggaactccggaactttctggagcctgtttcagcagacaggaggtccccccttcaagtcctctgtaacccaatacaagatgaagaaactgaggcagatgagctcatgaatacgaagtcccagagcttatgttcaacttgtctcaaagctaatgggatttaaggttggtttagggaagaatgttctgttcagtgccccctcctgctagtgtgcaggggttgggtcgtgggttgcctggagagccccagtttacgcctggtgacgtgacacatttacaactagtgttctctttaactgcaaagtgttccggtttgggtgagaaattctgtgttcaccctgttcatgtgcaccttgaggaagctctgacgagcactgcacagcctctgatacagactggagaaagccatcgctcgaatgtgcctgccagcaggaaaagctgggagcagagtggagagcgagcatctgtttctgtaaaaagggaaggagaagggtgtgtctgtatattcgtgtgtgcacacacatacatccatacacatatgacatacacatgtccatacacatacacatcatacacacgtccatatttacatacacgaacatccacatgtagatacagctgtacatacattcgtatatacacacatatctgtacacatgtctgtacagagtccatacacatccatattcacacacatccaaatgcatatctgtatgcacattcatatacacacatccacatatatacatatcttttcacatgtccgtggtgtacacacgtccatatacatccatattcacacagtccacatgtggacatatctgtacacattcatatgcacgcatccgtatatatgcatctctttacacacatacatgtccataaacacacgtccatacacacatattcatacacacaaacatccatatgtagacacatctgtatatacgttcatatatacacacatccatatatatacatatctgtacatatatccacacacacatccatatatacatatctgttcacatgtccgtacacacacatccatacacatccatattcacacaatccacgtgtagacatatctgtatgcatacattcatatacatgcatccatatatatacacctctttacacatccgtatacatacgttcacacacacgtccatacatgtctacatacagacacatccatgtatacacacattcatacatctgtatgcacccacatgtctgtgtacatacacgtctgtatacacacacccctgtatacacacacatccatgtacagatacatctgtacacacatccacacacattcatacacacacatccgcacacacatctgtggggatcggggacagagagcattaagtagtggcagtgtggtaatagtgagtcttgttttggcgtcttttgggtaaactgaccagctggtggccatcaggggggcgt

SEQ ID NO: 1886498 - DNA, 4001 bp, Homo sapiens
taaagcccatatccttccaatgaatccctcttactcagttgagctcaaatgtgctaccattgcttgaaagcaaagcccccaactgagagagtgcccttctcagcacaccatgactacaaaagagcctgctatacctttctgcactaagaaaaggatcaaaatcagacagaaaaagaaaaaatacagacttcctgattgtctatatataaattcggctggtccttttggctgcctgtgttagtcagggttccctagagggacagaactaataggatatatccatatatatgtatacatccatatatacatatatacatatatgtatatacatatgtgtatatgtatatacatatgccagtgatgacacatatatacatatccatatatacatatacatccatatgtatatgtatgtatatatacacatatataatcatatatatccacacacatatatgtgtgtatatatatatgcatatatatccatatatatccatatatatccatatatatccatatatgtatatatccatatatatatatccatatatgtatatatccatatatatatccatatatgtatatatccatatatatatccatatatgtatatatccatatatataagggagtttatcaagtattaacttacatgatcacaaggtcccacaataggccatctgcaggcttgaagagcaaggagagccaggcagagtcccaaaactgaagaacttggagtctgatgttcgagggcaggaagcatccagcacgggagaaagatatgggctggaggctaagccagtctcgccttttcacatttttctgcctgctttatattcgttggcagctgattagattgtgcccaccagattaagggtgggtctgccttccctagcccactgactcaaatattaatctcctttggcaacaccctcgaagacacacccagaaacaatactttgcatccttcaatctgatcaagttgttactcagtattaaccatcatgcagcccttgtgggtggaagtcagtaggaaagtcgcttgacccagggccaggacacccagctgtgcctgcagatcctgctgcttctggaggtgtggctttgggcatcactaagcctccctggacctcagtttcttcatctgtaaagcagatctaaaaacccctatgcctcagggttgttgcgaagattaaatgagatcctgagtatctgggactctgaggagagaccccacactccttacagtcagagcagctctgcgttgcaaggaaggatttggactctgggagaggcaaaccagttcaaatcccaccttcgccacttactgccatgcagcctcgggcacatcacctggcccctctgcgcctccattgcctggtctttaaaagggggataattagcacagcctgtatccaaggacagtcatcgggattgctgagtccatgcctgtgttttatcccagtgcctggcacatgcaaagtgcccaataataataatttgttgttgctattgcaggggctcaataaatgtcatttccctcctcaggacgagagccttggcacctgagccagatcattcatttctttttctcttttgatgccagtgatgacacataacttgccccaacaatgtagctccccgggaagattttgatgggataacaaaaatgtgtttcttgggctttctacagctacagccctatgactcctgtcatggaactgtcaaaacaagcttgaaacatgcatgggctttctgccaagtcctcttggagagggagagatgtagcatgcactcctttctttctctctgcactgtccctactcccacccaccccgatccttctgcagcaacacactgtgtcagccgtgcttgagtggtttggtaaaacagggctcattttagctccctttggcagaacacagggtggtgtggagacggccggagagtagaggcacgtgaaaatggttcagaaatgcctgggagatgccatcggtttgtaccaggtgctagacgctagggttatggctgctgtgccctcgtggctgactttgagtcatggcttgtgaaactctgcatgctgatcaggaatcagagcaactaaggacagacaaggacacccatctaccttgagtcaggtccttcagagtgatctgagatgccaagggcagcaggtggctgccaaaccttattgccaaattgtcatagctcctttgttgtttctggttttgatatcaatcttgtaaaacagagacgctcctgcttcctaaggtcttggagtcaggaatttgtaaaaaacaatttcacttcaagcttccacaaacacactgtttcccctgcctctgcttccctgttgtgaccaggaaggcggtactatcatacagttaaccctccacatgagataaataggaatcttttgaaagccactgtattccatccataaattatcagctgtacagatgcagacctctggctgacacagaaatcactcctccaaatccccaccatgtataggcatttagaaacaactcattgtacttcactggtcccctgtttccctttagagaggtttatagtggtcaagactcttgggtacagatgatagaaacccacctgaaattgacctaagcatgaaagaagacatactattcccatgatagagacacttgggggtagttcagcttcgggcacagcaggatccaaatgtcaaaaaaatatttccagccagctgcgggggttcatgcctataattctagcactttgggagaccaaggtggaaggatggcttgagccatgagtttgagaccagcctgggcaagatggccagaccctgtctctacaaaaataaattagccagtcatgggtgatgtgtgcctgtagtgccagctactcaggaggtgcagatgggagaatgccttgagcccaggcattccaggttgcagtgagctatgatcgcaccactgtactccagtctgggcaacaaagggagaccccatctcactctgttgagctcgcattgtccagctatatatatatatatatagctgacatatatatatatatatagctgacatatatatatataatagctgatatatatatatatagctgacatatatatatatagctgacatatatatatatagctgacatatatatatatagctggacatatatatatatatgtatagctggacatatatatatatgtgtgtatatataacgattttattacctacatcttaacatcttacctacatcttaccagtttagcctccccaggagagtgaggtttgctttactaatatttccagcaaaaatcttagcaaaggatggccatgtctctgagtggccctacccgtgtctcatgcctatccaggacccaacctctgtggctaggggtatatccttacatgatccccatgttaatagctgttattgactactatgtgccaagtctttaactatattatcgctcatctcacaacaaaatgaaagatatctatttactatccccatttttcaagtgacggaacaggattagagacgttaaataacttgcccaagttcacatcccccaaatggagaaactaaaattttggctcagttctccaggactccctatcagagtgccaaaatggcccatctccctgcagctgcagaataagtgagctgtctcataaaatgtgcattcattccatagacattaattaggcactgctctgtgcagtcacaggttatgactggaagattcctgggacatttcagcactccaggcactagcttcctcaagccccatatggaccccttctggaaacccacctggtaataaatagtaggaccctggtctcttgagagacacatggctcatctggtaattctgggtagtagaacctttccaaagaggaataagtcatcatttgcaacttctgccctacctgtttgactcactctcaaaaagtctaccatctaggtaagataaaaataaaaagggggtcaca

SEQ ID NO: 1886499 - DNA, 4001 bp, Homo sapiens
tcgtgcttctggcagccttggcctgagcatccacgggagtttcttctggccatggacactgcatcttcatccactacaagttgtctgatggactgggatggcctgccacagccagctcctcctggcatctcccatatgctgcagcagttagagcccactcgttccttgggttcctggaacaagtccttgaattccttaggcccccacctccagcaagctttccgcagggcccactgcagccccaccggggtaccccacctccctgtttgcctgggccctctcccacgccacctgtattagtccttgtttctaggggactttagagtggtggcagctgggactgaacattcttctcctgacccctcaaaagctgggtccacaggagaggtgagggggtacctgacctccatacccaggatggagccttgttaggaacacagaatttcaggccccaccctagacctgcttaatcggagtctgcactttaacaagagcatcccccactgccgcaggtgactcttacctgcatacctcaaaggttgagaagcccagtgttgaactgacttgaaggcacctcaatgaaaatcatccatggaactgggccatctgtggtcctgggttcatccccatccttctcttctctccacccgggccctctaccatacaggtgcctcatcccaggggactgcagatgggactaccatgccagcctcacaaccatacctgcaaaaccactctgggcatttggactggagcttaaaggggttcattccaatgaagccctccctgctgcagcagccactcccccccactggctgtgatggagtcctggggtctccactttgagctgggattaggcatcctcatgagaccctgtcccctgggatgccggcagttccctgccaagcccacaattgaaaacaagctctgcaagcagctccctgtgcggtaaaagtcagggctccccaggcctactgtgtgaccaggcactgccgggccattgatagcaccgtcactccagctctgcttgggacatgttcctatcccatttttcagttgaggaaaatgtgatcatttgtaacattgtaacctgagggggttaagtgacttgcccagggttacacagctaataactggaccaggaaattaagaccaggctttaatttgacccaagccctactttccttgctgaactccacattaaaggatgtggaggagaggggaagggatatgttcctggtcccctcaccgaaatgggtccttgatatggtttggatgcatggtggtcacctccaaatctcatgctgaatgtgactcccagtgttgaaggtgtggcctggtgggagatgtttggctcatgggggcaggtccctcatggatggcttggtgccctccccgtggtaatgaatgagttctcactctgttagtttacatgagagctggttgtttagaagagcctgacatggctcttgctccctctcttgccatgtaagtcacgaactcccccttccccttccaccataagtggaagcttcctgaagcttcacaagaagcaatgctggtgccatgcttctgtacaacctgcacaactgtgagccaaataaccctcttttctttataagctacccaacctcaggtattcctttatagcaatgcaaaatggactgacacgcctttaaagatcatttcactcacctctgtttacagatggggaaatcaaggcctggagagatgacttatccagggtcacgtggcgagacagggacagcaccagaaccagacccgagatgtccacgtcaaagtgacatgctctgagaggcagcacacacagaataaccctgcatccaaattccaggaagctcttaggggtcatccagctgggcctaggggtgcagggtcagtgctgaggcctgggcagggccgctagcctccctgagctttctggcttcaggctgggaggcacagttcagggtggactgtgaccccttggcctagaatgcccttagctctgctctctagtggctgtccccatagctggaactctgttttggagtggcaaaaccagttccacctgctggtaggggtaggttggctcccaacacatccccagcaggcctctcttgggctcaaaagccaagctgtgcccagccacgtctccaaatgcttcctggcccccatgcagcaactgcatttagctgccttcccagaatttcctgcatgctcacacagcccttccctctggggcccaacaatgccacagcctgttctatcaatcaccagctgttttcctttgagcagtctccttttacttatgcacatttacttgaaaaagaaacttcctattactatcctaaatggaaactcagaatcacttgctataattagaaagtagctacaaaaataaacacaatgaaaccgatcactgttattacaccctaacccgcttttacctgagacaggccctgagcctgaggccgctggtagacttttgttaaaagagagagagacagagacagagaaataagcattagagacctgcaatcaccaagctgagacttctctttgatttactcagaaggactggaaaatgttgtcctgcaaaaggaggtaagtttctcaccacgtagcgctgatcatcccgtgttgcccgtgcgttgctgcagaccatctggggtcttgcccaagcaccctggagactttgctccctggtttcctggtcaccaactcgagtgttcagccctgtgtgctctccagctcctaagtcgtgggcctggtttcagctttgattgcccactcttggctttcaacccgtaggctccggctcctgacgccacaccctgatatcaagaccctcagatggagcgagcgttctgggctggtcgaagcctgaagccgcagtatgtccttgagtgggtccccccctacccatctagctgttgcccccatggtaagatcaagaaaatgccctcccctccaaaagtccccacgccgagccctcatctgtcagctcccaggctcggccccctcactagctccaggctgggaggcacagttcagggcagactgtggcccctcagcatagcatggacttagctctgctctctagtggctgtccccatagctagaactctgttttggagcagcaaaactagttccacctgctggtagggctaagttgactcccaacatgtccccagcgtgttggtgttgggaaccttgatctagctgctcgttttctcagtaaccaaagatccctggcactcctacgatgtctcaggccttatctagagctggggatacagcagtgaccaggacagaactggtccctgcctcacggaagtgaagtgtcaggaggccactcccaaagcaaatggaagctgggacagaatgatgtcctcagccaggtggtcagggaaggcttctcagagggggcgctgttcaaagaatcacagagcatacaaaggagctggccctgggagcacagagaggggagaattttaggcaaagaggtagcaggagcacagccctgaggcaggaaactacccccccaccaccctcggcatcctcagttctggtttgcacccagaaagggggtaggtccaggacacacccggactgatgtgtcacactggctgtgccagctgagagagtgggctccaggcaccactaacagagaagccttgcaaggcaggtccatgcaccgcccgcctccagttaccactcattgcaaaggaaatgagctgggagcctgtgtgtgggccgtgcagacccttttggttacaagccacaaaaacccaggttaatctgatgaggaaggaatttattatctgtaaagtccaggagcaggctagctttacaccaagcaggatccaaggacccacacttgtcacctcatatctctctctctctcccactttcgctttctctgtctcttcttagttctgctttcctccactgtgccttcgctctcagagagagctctcccctggcagtgacaagat

SEQ ID NO: 1886500 - DNA, 4001 bp, Homo sapiens
tagtcgtttgtctgtctccaccatgaaaatattccctccagaagggcaggacccatgtctattccccatgccctcccctcctctcccctagggccaagaacacttagcaggcaactgaataaatatttgttaaataaatcacggtgtttcccaattgcgtggagaatgaagtaagagtgaagactggtgagaaagtgacagtcttcttgcaatcatttcagtcctgataatatcaagagtctcagtgccgggcaaggtggctcatgcctgtaatcccagcactttggggaggctgggatgggaggatcacttgaggccaggagtttgaaaccaacccaggcaacatagtgagaccttgtctctacaaattaaaaaaaaatagtaatagttagctgggcatggtggcacacgcctacagtcccagctatttggcaggctgaggcaggagaattgcttgaacctgggaggcagaggctacagtgagcagtgattgcgccactgcgctccaacatgggcaacatggtgagactcttgtctcaaaaagaaaaaaaaaagccaggcgcagtggctcacgcctgtaatctcagcactttgggaggccaagacaggtggatcacctgaggtcaggagttcgagaccagcctggccaacatggtgaaaccccgtctctactaaaaatgcaaaaaagaaaaaaagaaaattagccgggcatggtggtgggtgcctgtaatcccagctactcaggaggctgaggcagggagaattgcttgaacccagaaggcggaggttgtagtgagctgagatcgtgccactgcactccagcctggcgacagggcaagactccatctcaaaaaaataaaaaataaaaaactctcagttcggtgtctaacatctcttttccttgctattctcatcccccaacacctccacactccccacaccctgcctctttttttgtttaaatagaaagtacatcttggggctcagagtgaaggacagttatcgaggctagctaggatttcatactattgtttggttttctgagtgtttaatccctttcaaataacatttgcggctctacatgtctggtagtaatataaagtttccctgggaaagaaatgtaagtgtaagtgtattgctttaaagggaaacagccacaatgcaagtgaaatgaaacaaaaggcttggaggtgtctctgcatggctgaagtttggaaacgaatgcacacaggcatgcacattcatccgtgggactatccgcttagagttctgtttgaccagtgccttgtgcaaggcaattcagcaaagagaactttattttcctctcttccccaaataattcaggcctgtgctgttaagtcctacctcctcatctcttccccttcctcctctccctgcatccacctttaggagttatcattactcagaaagagaccaagaaatataggggacctgggactccatgagaccggatgtggaaagcccctcaacacaccggcaggaaatacctgcagccgtattcctagccgaatcctgaaattgcagacaaattttgcgcttttctggaaggaagtctcgctatcattcatcaagttctgaaagggccccgagaagagttcgaaactactgggctggaggtggcaccaggaatggatcgttgccctggagttctgacccttggttttctgccgcacacagctgatcggttaataatgcagcaacttaataattaaaatgagactgtgtgatccttaaagatgcaggctcactccctcctgtcttcacttgaagaaggctgttgccaccaaaatcagtgggctttcccagaaggttctgtacttacctgtgcttacaggtaaacacagagaacagtctgcttttctctccgggtctcctccacacttggagcttatgcatccagagactaggctggctggttcatcttttgccttcacaatccttcatgtttaattgcgtctacttctgcctctaccctatctaacttctccaaaatatttcttgtcagtaccccaggatcaagatgggtggacccactgctctgtttgtaagctgggaggcaggaagtttggcttggctgtgtgactgtaaacaagttacttcacttctctgactcataggaatgctgttaaatttagatcaaatgaaggaacagatgtgggagctctgtagaaagttagaagagtcatctcggatgtgaaagctctatttagagagcagcaatcaagtcaccatctgaccaataacacctagaagaccctggaataaggctcctcccagtcagaaaaaaaaaaatgacatggaacttgcaacttttgcagtggttttaaatatgattttttttaggtgggtcccactcaattctccaaggcatagtagataaccctccatcagtaactatcgatgatggatatttgtggtcctttcatacctcccttaaaggactctgacctaggctgggcgcggtggctcacgcctgtaatcccagtactttgggagcctgaagtgggtggatcacctgaggtcgggagttcgagaccagcctgagcaacatggagaaacgctgtctctactaaaaatacaaaaattagccaggagtggcggcgcatgcctgtaatcccaggtactcgggaggctgaggcaggagaatggcttgaacccaggaggcggaggttgcggcgagccgagatcacaccactgcactccatcgtgggtaacaagagggaaactctgcctcaaaaaaaaaaaaaaaaaaaaaaaaaagaccctgacctattcccaggccgtatggtggttgggatggtattgattggctccagatgtgaacatgtgattcagaattggccaattagatcatcacattcccttcatcataagcaattggtttaactctgagtatgtcatttagtttaggccaatgagatgcaacaagacttttacaagcatttctgagatgtaatcatattcctttcaaatagaacctagcttgatattgggccaaagctgctgcagtcttcttcttttttttttttttttttgagacggagtctcgctctgttgcccaggctggagtgcagtggagcaatctcggctcactacaagctccacctcccgggttcacaccattctcctgcgtcagcctcccaagtagctgggactacaggcgcccgccaccacacccggctaattttttgtatttttaatagagacggggtttcaccatgttagccaggatggtctcgatctcctgaccttgtgatccgcccccctcggcctcccaaaatgctgggattacaggcgtgagccaccgcgcccggcctgctgcagtcttcttaacagcagaaagagagaattggagaatggcctgcagcaaaaactggaacaagagatgaatggaaacagagttgtgattttattacttgagctctggaatccagttgtgcctgaattattgagctttttcattatatgaaatgtaaattgtgtttgttcgtgtgaaacctctatggtatgagttttgtgtcccttgcaacgaaaagagaactgactgactacagtatatatatatatatatatatatatatatatatatatatatatatatgtatatatgtgtgtgtgtgtgtgtatttgtgtgtgtgtgtgtgtgtgtatatatatatatatatatatatatttttttttttttttttttttttgagacagggtctctctctttctcccgggctagagtgcactgtgtgatcacagctcactgcaacctcctcaaactcctgggttcaagtgatcctcctgcctcagcctctaagtagctgggacaataggcatgtgctaccatgtctggctaattttttaaaaacttttctatagaaatgggttcttgctatgttgcccagattggtcttgaactcaaggccccaagcaatcctcctgcctcgacctcccaaagtgctggggttacaggcatgagtcactgtacttgg

SEQ ID NO: 1886501 - DNA, 4001 bp, Homo sapiens
gtgagaaatatgctcaatcagagaagaaaaagagatgtaattatgtcatttataatgaattctgaaggaaacaaagaatttaagaaggaaaactctggagacaaccagagctccgaagcctttcggatcatctgagctgccctggagaagacgcatagctgatcaaacattcgtgccgatcataggaggccatcccagcccctgagaatgctcgggaggaagcagaaaaactcaggagcccaagcaaacacagtccagcttttattaaagaaattatacgctcctctcagcttccacccacatcgataatatcaacttttggacaaatgcatctctctggggaacaggttctaagactggctcctaatcttctttctttgaagtatccaagggcttaaaggcatgtgtcaatatctagggcctctggcctttgtatgagggggtttgaaagggtcctgctgtggaggagagtgagaccaccagcgtccacatccccctttccaggctgactgtttccattcagccagccttcagcctcaagaccaccacctgcccacgctgcagtaagaactccctgaggatcctgcctggtgtctcataaagagatggtcaccatgcacctcctgttttaacacaggccatgctcagggggtcccactttcaagaactaaatatttctaaaagattgattacagcacttgttatatcatatgatatggaataccattaattaactcttttgaaaattataatgagaattgagtttatgaatatctttgtatattgttgtcttgaccagcatttcccaagtgtgctgctgatgtaacagccaacatctagttcctgtgtattctctctcaggccctgtgctaagcacacgcttcatcagatgtgctcttcacaccagccccaggagataagtattattatgctcattttactgaatccagatcccatattttaacctaagcttttgtggtcaagtgagtttgtaaaagtcagagttaaccaagattaatggattttgttactataggaattctcagctttttaatatgtttatatccattagaaatctccaagagggagaataaaatatgtaaacttttccaaacatactttaccatggaacacttttttcccctagtgttatttccgggggttagttttctataggaaccttgctagggagggttatgtcctaaagagacacagactctactttctggattagtcacaaggctacaaagtggatcattgaatgagtttttaatgagttcttatgtttctataaactactttcaaaactgcaatatcagaattgaaaacttgatacagagccagggttataccatgctggatatcaaaagtcatgggaatagtttggcagaattttcactgcttataaaaactctcaccaagctccttcattttaccctctagttaccaatttcctaacttacaggatcttttcccaggactagaagagattctttcagcagaaactctacagcttacctgagagcaggggctaaactgtccatagactaaatctggccagctgcctgcttttgtaaataaagttttattggaacacatccatacacattcctttacatagcgcctaagctgctttcacactataaggggcagagttgagtagctgtaacaggaactatacagaccacagagtctaaaatatttactatgtgatctttttcagaaaaatttgtcaactcttgccttagagcaacatatttacaatgattatagagcctggctacaacagaaaacttcttcagtagaagccactgcctaatataccataaattcaatttgaagcatgctattgccatggcttacccattctttaagttcagagatcctatgtaaagcatgttttctgcagaaggaaaaaggaaaaagacaccagcatcgattgagctgtgattaggtatctggaatggcacatatactgtcccatttgtaacaatttagataagcagatggtgaccccattttatgcagaagaagattaattcaatgaggtgaagtcatttgatcaaggctatacagtaaaggatttgcatctcaaactctgactcaaagatgggtgctgattctatagaatggttaagagtgaaacatctggaattacctggccaagattccaattctagctcggtcatgaactagctttgtgacttatgcaagtgacataactgtgtgcctcaatttcctcacctgtgaaatgggaaagaaaaatactattttaatagggttttgagaactaaatgagttaattcgtgatacctagcatattaaaggtactgagcacatgttagttgttaatgttaaatggggaggggcatcaaaggatggaggatgacatctaaacttctggcttgaacaaattctgagttgggatggtatattcgtcttatcagatatataagtggacctcttgagagcagggaatattttcttgtgtcttccgtacaccccctgtcccctcaagtgccttggacaacatattccactgatgcttactggttaattgaaggtggaattgaggaaagaggactatcaggaaagtgaaattttttttaatttttaatttttataaatttagggggtacaagtgcaggtttcttacatgcatatattgcatagtggtgaagtctgggcttttaatgtgcccatcacctgaatagtgaacgttgtacccaatgggtaatttttcaactctcacccccttcacacactgtcccaccttttggagtctccagtgtctgttattccactctgcatgtctgtgtgtacccactgcttatctcccacttataagtgagaacatgtggcatttgaccttctgtttctgagttatttcacttcggctaatggtctccagttccatctatgctgttgcaaaagacatgatttcattcttttttatggctgaatagtattcctatatatctatatatcctatatatctatatcccatatatccatatcctatatatcctatatatatatcacataggaaagtggaatcttgagctcctcaaactgttggcagaatgagctaatgtggggagctttgttggcactagtgactgatttttgcttcagcttcagaggactgggcctttgtctaatatttcagcgatctcaccatcccaagcttagtgccttaaaacaacaatcatttatcatctctccaagattctgtgggttgattgaacactgtgggggtggttcttctgttccaggtgttgctgattagagctggaatcctctggggactcaattctgctggagcaaccaagagggctgtctcacatggttgcagttgatactggctgtgggcttgaagtccattcggggctgttgagcagagcaccttgatttacctctatgtggcctctcctttgacttggacatctcacagtgtaaccattggcctccaagggaagaaagcttaactgtctttctcaaagtctgcacttggaagtcccaagacaatttttgtgcccaaattcaaggagggaggaaagggaccgcctttggatgacaaagaattagtggtcatctttaagccaccatattgaaactcctgaacccatgtctgaccttgccctggagctggtcagctgcagccagcatcttcctcgcagacaagtcactcccattattctgtttgtgaggttacccagatcttaactttcagtgggcttctcagtgtgtgaccactgcagtctgttcataaggcctgaaggatggtattatcacgccccctccttgccctttcattgagcttcctaaagcaatttcaacttgcccacacctctgcctcttcagatcttcctcctctacacctaaataactctcacttgcccttcctgtctcaacttaggagccacctcctccaggaagcactcccctatgctctcaatgcatcatgatttaaccccttacctggccctgcccatccaatc

SEQ ID NO: 1886502 - DNA, 4001 bp, Homo sapiens
ggtggcagcattcttccctctggaactaagacctctaggccagcaaagcataaagtctcaagaacaggaaaaaaacattttgctagtgggtcgctaggggtgatggtgactggtgccactcccatttccaccccgttgattcctggatctgtgaatcccggctaggggagaaatagcaccatatattggatactaattcagagcatattcagccttctggagaaacttgccccagccctccaaggtattactacttagctggtgctgtaattgagtcttcaaagggctgttacaatattctatgaagccagctgcttcagcatcatgacgaacatggtaagaccagtgaattccatgagcatgggcccattcctgcacttcttttgctctgaagccaagtcaggttgacacataaaattaaccatcacaatctctatcaagttttttttcatatacgaaatttttgcaataattttctacagattaacttctggctctgtacatcctcaaaccttgtttctcctccatgacccacatacttgggaatattcaagctgcagtgcaagcttcacgtcctatttccaggtgagttggcccagtgagtagtaagcatatttctggaaaccatttctacattaagccagctagcaattacttaactctataaggaagtgactgcgaacagcgttaatcgatcccgctgaacccaaaccacatgtttgggttcaaattccctcagctattatagatccaaaaaaggcttacagaaattccaatgctgcccaacacagagggagtaagatgggacaaatagaagggaagtgaggtggaaggaaacatcagtcttaattgattgcggttgaactatcctattcttgcaaatgttacagaaacattgatcacgtgagacgcttattagggcgctatcagggccttgacagtacctaagcatgtgataaacccttcagcttaagctttatgagctttaaagtatattcaccctgtctatgcaatcctcattctggccaaactggattgacacccactgactgggtaccccctccactgtcccatgaccttgcctttgcttgtgttagcttcccctcccctggaacaaatcccatctgggtcaaacactctgcctcccatgcaagcatccttgaccttttcaatgaatcctcttccatcctgctctacaccctaatagaatttcatcctttatttatttattttttattgcatttgtcaaacattaccttgtcgtgtagtctttcatttgcttagcaaatatttgctaactgtccatggtgtttcacccattgttgtggctctagagatgcttcagtaaacaagccaggtcccagtattcttgaagcttatagccaaatttggggcaggaattataaatacctgaaaattcaaagaccatcgcagagagtaacagggtcatggagaagggcatcactttagccaggtggtcacggaaggcctttctgataagctgaccctgcatgaaagaaggagccacccccaagaaaagctgagagaaaggcattcttggcacaaggaacatcagatgtaaaggcagtaaggctcttggctgccagatgacggcagctccagatgaaattataatggagaccattctccttcctgttgccaatgagcccttaacccttgtatgctactcaaggccttgcctcttctgtctcctatctggagcttccctttcagggcaggatcctcctctgtttggaacttctggactctgcaccaaaatatggctcttctgtatttcagggtgggaaactcctctggttgcatggtaattactgataggctgctaatgccttacctcatctcagacagtgtctgaacttaacaacaagactttttgtaggaagacaccttaatttcaaggtgtgcctctgacagcaggaatatcaacccatgtggtatgtcagtggaggagatatttttagaccaagccctgctattcacttgtagtgcagtggcactaacaccagcttaagatgacacccgtttgttatgtcacagttctggaggtcagaagcccatggatagcatgtggctcagctgtgtcctctgttagagtctcacaaggataagatcaatctgttggcaggaccagctctgggggtgaattaagttgttggctgaattcagttcttcgtggttgtaggactgaggtgactcttttctgctgggggctggtctttgatcgtagaggcagcctgcattctttcttatgcttcccatgtggctcgctcctacagcagcaggacaaatccctctcatgctttgaatctctatgacttcttattttaaaaaatatatttccataagtttttggggaacaggtggtgtttggttacatgagtaagttctttagtggtgatttgtgagattttggtgtgcccatcaaccaagcagtatacactgcacccaatttgtagtgttttatccctcatccccttcccaccctttccctctgagtccccaaagtccattgtatcattctcatgcttttgcatcctcatagcttagctcccacttataagtgagaacatacaatgtttggttttccattcctgagttactttacctggaataatagtctccaatcccatccaggttgctgcaaatgccgttaattcattcctttttatagctgagtagtattccatcgtatataccacagtttctttatccactcattgattgatgggtatttgggctggttccatatttttgcagttgcgaatcgtgctgctatagacatgtgtgtgcaagtatctttttcgtataatgacttatttcccgccgggtagatacccagtagtgggactgctggatcaaatggtagattccttaaagaactaaaagtagaactctctgacttcttctgccacatacctctgactccagccagagaaagttctctgcctttaagggctcctaggattatgttgggcccaccaaaaaaaatccaggataatctccctattttaaaggctatacttttaatcacacctgcaaaatctcttttgccatgtaacatcacttacaggttccagaggctagtagagtctacatgtgtttggagagccagtctgcctaccacactagagaaggaggtggaataacaggatttttaccctggctccaacacttactgtaattgtgagcaaatccctgagttctaattcctatctctgcagaggagataggagccaggacttaacaactctatcataatcccatttgagagtttcagcttaaataaaattgtatatgcaaaaagcatttctttttttttgagacagtcttgctctgtcaccaggctagagtacagtggcgcgatctccactcactgcaacttccgcctcctgggttcaagtgattctcctgcctcagcctcctgagcagctgggactacaggcgtatgccaccacacccagctaatttttgtatttttagtaaagacagggtttcaccatgttggccaggatgatcaagatggtctcaatctcttgaccttgtgatccacccaaagtgctgggattacaggcatgagccaccatgcccggccataaaaaacatttcgtcagttcagcacatacatagaagtcattgctaatactgttctttttttttttttttttttttgagacaaggtctcactctgttgcccagactgaagtgcagtggcctcagcctcccgagtggctgggattacaggcgcctgcaaccacgcctggctactttttgtatttttagtagaagtgaggtttcgccatgttgaccaggctggtctcaaactcccgacctcaagtgaccaccggcctcggcctcccaaagtgctgagattataggcgtgagccactgtgcccagcctaatgctgttcttataccacatggtgctatctctattttttaattttatatttttatttgctcttatgttgtgtggtttcccc

SEQ ID NO: 1886503 - DNA, 4001 bp, Homo sapiens
tataaatatccttaaaactaaccataagttttattacttaagtaaacacctcaaattcacagctataaaaatcattaatagaaaaataacttaaaatattggctatcacttttttgcaaataacctaggtaaactactaaattaatcaggtaaatgtaatggaataaatgcttgtaaacacacttgtcataatttaggatttaaggttattatttgatactaagtttctgggtaatttccaatttaagaaattttttaatgttcttattaaggtaaaatatctttgtctaattaaaaccttatttaagagttatatatgaaacaaggtaaaccaggaaatgagagcaatataaagaaagttataaaaataaagaggtatttttgaccaaaaaaaaaaaaaagcacctcaaaaaataattactgaatgagaaataattgttatcaaattactgggaaaatttaggtaattcaaaattctctattcccaaacatgattttctagctcttaaatttgcacaaatacacaaagtcagagccatttattaagtaataatcatctctgttaccttagattaaaaacattatctcaacctctattatgcataaaatacttgaagaatacacctgacctgcttacaatacccagcagccattaattagactaaggcagggaaagaataaaatagatacttttaaaacacaagatacatgttaggatgggatttggttatttcttttaagaaaagttaagtttacatacttagttaaaaatttataatggtaagagttgctattttgcccatctttgttgtagcggccaagggaaaacttcccctttgccccctgaagattcactgaaaagtcaattggcaaaaggcagattaataggtgttaaattaagtttaacctaaagctgtctcctcggaagtatggcctaaaggtttctccatatacagtgacctgtaaactatacataaatgcgctgtaactcattttgtactaatcatcaagtgttggccaatcacagggcaccaaccaaataagaaaaacactgagctgtaacccatccagctgtttctgtacctcacttctgtttcgtttatggcacttttctgtccataaatcctctccaaccaaaggacagcacaggagtctctaaagctattctggctcagggtataggctgcttgatttgcaaattgttctttactcaattaaattgttaaatttaatttgtctaatatttttcttttaacataggagaaaaggcatatgcatctaataacatgcatatgagtcatacaaaatataagaactcaaagacgtggccaggttaggggaaaggggtagagtacagattctctacagatgcaaatctccccccacataaaacagcattgcaaggcaacttctgttaatatgtcaaagaagtatattttgtagtgaaatattttggttttcttcactgtgttttgccagcactcgcagagtcaacctattggaggtattaataaagtgaaaatacaaacaccatgtaaaatgaatagcttactctatcaaagttcttaaatcttggggttgaaggtaatctttgagtaatatagctcaatattgcactcacagcaggtctttccttctaaaaatatatatatttttagtggatacctggcatcttttggatgcttttaaggaaaggataggacacatttagtggcccatgctaccttaaaatacttttattagtattactataaattttattatgattattaggtatttctatccccttgtgctaacctgaaacttgcctcctatagttttcactcaccttttgcccacaggacttgtgcagaatctcttacagatggcagttctattcaggtccaatcaaacgtctcccgtctctttaaaatgtttatatgtctccaagcacgctacttttaccagatccaattggagcaaatggctcaagcaggaccatcaaacatactgcactcttctgtgtcctcaacacctcataccttgttaagcacccttagctcacagttatcttatgaggtttaattgacacaaaataattcagaattcacggtgtcagcattaaatactaatgagctgtttctcctgatgccagattcacacagatttgaatatgtgtaaccaaaatctcattgtctgaggaacattcttcctagtccgtctcctgtgccttttgtggaccccccacaccaacctaggatggttctcagttcattgcaatccctgatgctcttccagagatcctgaaccacacataatctctcttggctagtatgaattttgctgatggcagcatttctaaaagaagatggaaaaatcagacttgcttctcccttccctcttgcataggcatattaagcatcattatcttcaacaccatcgtcatcaccaccagcaccaccactgcccttcattcatcctatatttatgctaaatacttgacatatcatagccaatccttaaaatgactttatgaaactatgattattctcattttaatataagaaagggtttcagagaaataacgccatctgtctaagtgacaccagtgggataagagagatccccaaatgcaagcgggacctttacccaggccagtgtccaggcttttagacaccgtttgttaccagaggtaaatcaagaacaaatcagggaatactgaaagtatgggaattaacagcaaagctaaaatacacactcaagaaaagggagttcggacatactcaagtttggggttcctatctttacaggtttctttaaccaaagggtagaatattcaaaaagatttctggaaaaaagtgaagatttctcagaaccatggtgtcactcatttttacaccaaatacgaatgttcccagaactgttatggtgctggtgggtgtgggatttagtacattagtgagcatccattcaaaaaaaaatcttaagtcatttataaaactagtgatgatcattttttccagtgtgtggttgtgaggattgttatgtgataattggtcacatgcttaacatatcacactaaccaagagaggcttgtgtgtggttcagtatctgcggaagggcataagggattgcagtcaactgaaaaccatcctggtttttctttctttttttttttttccttttttgtgggaggtacacaaatggcacaaggagacggactaggaagatgcccctcagccattgcgttttagatgtattcaaaaaggcaactttttttttcagttatgccatctcctctctttagtccatcttttcacatagccatcgttttatggctttgctttatttttctactcccccaaaatgaaaacggcctgaagagtcttccttgcatatctacaaacacccctggagtagtactccctgtttataatcatttcatcccctatggagagtaggggctactgtgtcacatttatcttttctcactgccacatgaattccaccaacataggcttctgtcttccactcacacattcagggcaggtacacagcaggtgcctcagtactgacaacttctgggttttgatttcttagcgccctaaatattcagtgttacccagtcagggggaggggaaagtatggtttgaaatcaacaattccaaaagagaccaagatatgagaacagacagaaaatcagatataaacttgcaatgtaatatgctgacatttgaggaaaaatttgccctgaatatgtatggacactgtgctatgattccaggagttgataatacttctttctacaataccactgaggatttacctaaaactctttctgcagttcagctcgataatgcctgtcatccttttcctttttaaaaaaatattttccgtttaagccacttagtaaaatacctcctgatgttcaacagtgaagatattaaagttgcttcttattttcgttagtgtccttttaaaacttcattcctattctgaatgcttccctctaacgtgcctta

SEQ ID NO: 1886504 - DNA, 4001 bp, Homo sapiens
ggcaaggctacccttttgtgcttttgtcaaaaatcagttgggtgtatttgtataggtttatatctgggttccccattctgtgctactggcctgtgcccttctctctgccaataccagtctgccttgattattattgccatagaatagccttaacaccagacaggatgactcctttacccttttttttttcacagttgctttatctgttctatgtcttttgcctttccatatggattttagaataagcttgtctatgtctacaaaaaaccttgctgagattttaataggaattgtattaaacctacagattaatttgggggagaatcaactttgtattctgttgattcttcaaggaaatgttttaaaatattttgttttatgaagagacttcagcagttttagaaagtgagggattcaaagggggtatgtgtaattgaagtgcgtcactgaggaaactgacaggggaggcttgagggttcaggtggaggggctcagctgcaaactccaaacactcagaccaacataaactgaaaggaagagaatcccagggaactcactgaccaacaatgagaagaaagaagctatacttgaccttgaagccggacttccagattcaaagggaaatgtagactgtatctagaaaaccacatctagttctcatctccagcgtggtgagaagcgagaatgaaaatgtctctgagaacccatgtgaacagggctctgcaataaatgaactgcagtttagactgcaagagagagagaaaaaaaatgaattaggaaagcctgctgcttgctgctccaagaataaaagctgtaggtgtggcctcaggggtcccagtctcgcttcccttccagtattctgcctgaatccatctctaatgcaagagatcacaactctccatctttgggttttgcccaaaggaacctgctgcctgcctttaccacctgagttcatgtcctctaacgctgtgtgatcacctgtccagaatgactctcctcactcttgtacccattcttcctcactaacagctcccacctatactaaccctggccctgcattacacgagctgcttagctcacctgctgataactggctaagagcatagtataccttcatccgtcagagaaatgacaagagttctgcagagaaatgcctgaaataggactggtgagatactgatccacatatggacgtacatgtaggctttctggtggaaactcacactctttttttgtttgtttttttatttatacccactgctccatttgcatcaaagtcataaacctccacctgctaccacccacccccccaacacaacgcttcctaatttacagattgcaatctcctggtagctttctcattttttcttggtaggtttaaaagcttgatgccaccaactgtttctcccccatctgcttttctgtgttccttcggagaagtaaagcacagcctcttgttgcacctaagcccctccacatatcaagaaagcttactgtgagaagccttcgacgaacagcctcaggaatgtaaggtttgaagtgatgcactctggaatggaaatgccagtcgcaccactccacacctttgccacctttgtcacttttctctgatgtgccatctcttcatctgtaaaatgcaaacaagaattcttacctcatagtagtgttgatgggattctgtgagatgatgtgctggaaatattctgaacatggatagtgatgatggttgcacattgtggtctggaaaccaccaaattgtactcttcaaaataattaaaatggtgaattttatgttatgtgaagtttgtctcaaaaaaaaaaaagattaaaaaaagtatttaacacagaaccccatagccagaattcagcaaatctcattacctcctcatcagatgaaaagttgcagctcctgacagaaagcctggggccttttgctttagaccaagtgaaaattttaggaggtaagtcctaaaatccgagagcattcgctgggaaatacacaggggtagagctggaaggactttccatgtctgctgatcatcccaacagcctgctcccctcagccacaaggttcaagaggcacccttggcctggactttcctggctctctcgtccctcttagccctggccttgtccccagggctcttccctctgagaaatgattgaagagttggctttcagacgttggtctccaaacagctccagaagcagctggaagatttcatgtggatgatgattgttcacactttgacccatttaaaaaaaaataaaactaaagcgtgggagaggatgggtcagtgaaaataaacgtcttctctggaagacatcccacagctgtgtgctgaggcagcacagtgtggaggtattggagcttccaatatgcatagttgtggttaggaagaagagaagacgccgattcataggtccccacagcttcatggtggctccaaaccaggaattagaggtacctttccttaacactcggatttgtcagatgctgaatgccctcagcatttcagagtcgattgaattcctttcaaaggtgggatgacaccaagagcaagtttgtggttactccatggaagcctgagttggataatgtgttggggttctgggtcaggaaagtgcacatcagaatcatggttccaccagcctgggcaacatattgagacccccatctctacacaaaataaaaatcttagccaagtgtgctggtacatgcctgtagtcctagcttctcaggaggctgaggagggggctgacttgagatcagctgttagaggttgcagtgagatgtgatcatgccactccactccagcctgagtgacagagcaagatcctgtctcaaaaaaaaaaaaaaaaaaaaaaaaaaaatcatggttccaccacttactgatgaccttcatcaaatcacatgacctctcaggtccttaatgtcataatctctgaaatggtttgccttgctgtttccttgggaagacaagaagtcttgtcttaatgcgatgagcttatagtgtctttcccatataagaccctatattcatggtaataatagcaccagcagcaatgccaatcatgttgatatagttaaatcccctgatgtttcatcatcttttaccactttgtatcacagaaatggtccaagcaaggcagacttatttccaggtgatgtttataggcattgttaaccaagacagagggagggacacccggtatctggcagcaaaccagattaaaactacctgccatttaaagtttgcaaataaacttctggggaataataacagctataataataattatgttgttgtcagtaggatggtactccaagatacttgtcatgctgcccagagcttttgttttcaaagagagattatcagaataattgccaatagttattacaatttacttaaaaattagccagctccagcctcagtgatttcatcaacagctccctagaatatatttctgtgcttcaccttgaaaagacaggtgtgatccaaagattaaaaccataggataaaatcaccttcagtcttacccatcctaacttgggaacaattgttcaggctcagcattatcatggaaataaaaatccccgtaccacaaaagaaagggtaagttgagctttgatacacaggcagccttaggaaagactctaaatcttagaagacataaaaatcaaacagaactgaggtgagttcggtacaagaactgctcaactgagaaggtcaagaaggcaggaaatgatgaggaatcatgactgggagccagtgacccaaaatgagatcagcaggaatgtggctgtgaaaatacagtcctgcagggatgagttcttttgaaaggtctttacgcctgacattggggctctcagtgtaacactagcaacctgatattggacccagatcataaatagaaatgtccccttgcatgtctctactccctaattagtgcttaatggaatcgattaggtaatgagtgcaggtcatcagggaatcaag

SEQ ID NO: 1886505 - DNA, 4001 bp, Homo sapiens
aaatagcatgggtttgagtgtttggtggttattatagagtattttaaatgtatgagtgatttatttttctaggccagctgctcagatataaaacaaaatctgctcctttgagctgttaggcttcgtggcagtcaactgaccccaaaatccttctgactacagcagccatctacttgcttgttcatctgataacattttgcagtctctcagctacagctatgtggtctcactctatagctggggcatacctttttgtctcctttgtcttcagaaaggaaatatgccattttatgcactcctgctgctttcacccccactttaaaaagatgaaggcttccttttgtgacagagttgctttgtctgttacactgatcctaagagacaggaaggagaggtgtcatagtaaataaacagttattggacttgctaccatagttcctttttgatgacttgggccaggaccactagaggtttgaactagatttagtaaggcttgggcttttcggggttttggcaggaagcagtcagggagtatattggaaagagagaacacaaaataccgaaccccacccaccctgtgcctttttgtttgttgttacagcctgttacattaggcaacaagatatccttgttagccaaaggtgccaagctgagattcttaaaagctaatgaaagagctgttgggccaggtgcggtggctcacgcctgtaatcccagcactttgggaggccgaggcaggcggatcacgaggtcaagagatggagaccatcctggccaacatggtgaaatcccgtctctacgaaaaacacaaaaattagctgggcatggtggcgcgcacccgtagtcccagctgctcgggaggctgaggcagaagaattgcttgaacccgggaggcggagtttgaagtgagccgagatcgagccactgcactccagcctggagacagagcgagactccactccgtttcaaaaaaaaaaaaaaaaaaaagctgttgggtaaggaatgattttgttccccatctgtggctcaccaccccactgtttcataaatgaaaatctctgatgtgcaacgctgaattaaccaaaaggcttacttcttttgttttgaacttagacacatttacattatttctggtgcagttaaattaaaagcactttccaaacaaacctaggaaagtattaaagttagggactcccacgaaatgttactccttaattgtggcttggataatagcaggaagaactgcagacaggaacacagtgtaactaacccttcagttctgaaatgttgctaggtctcctcgtgttataaatgatcaaataaatatccgggttaaacactgctcccagagctgagttcactcttaagagtgttgggtccaacttccctgtgctaattcaaggaaacaaggcagccaaggagtctaacttgaggtcttcattcttgggcagggccatcaatacatctaaaacattacttgtgggtaccccagctgcggtagcttccccaaaaggcagaattttcactcattctttatagaaacacgtagccagcaacttctcaggcttggggaacggggcaggcgggtcgtggtggtggggagagtagaggagggagtctggcaggtcggttctaaatgtaaactggaaactacgcatccgagcgggcaaccatcactggcaccattcgtctccgggaagaacctgtgtgtgtcaggatgcacgaaaggaatgactcccctctttgcgcccccggggttaactgcacgaccctgtcaaagtcccgccgtggagtgggatgagggtcgagaggtaaccctgtcaaagtcccgccgtggagtgggatgaggcgaggaaagactggaggtccttccagcaccaccttggaggggcagggaggctgcagttaccgccttcggaagtgatctcctcagccctcaaaaaaattaaaaccacctccgccatttactagaggccaaggcagggccgggacacgagaacgcgctccgggcggatgcgcgctccctttgtcccgcctcccagcggcccgctcattggacggagggagggcgccgggggagaaagcgacgcggccgctcgtaagtgctccggatggaaactggtgcagggggcagcggcgttccgcggccggaagggaagggggaggtgccgaggctgcgcgccggctgctcctccccacccccagcctttgccctgaagggggctggatgggcaaggcggccgcgatggctcgagctcgggcggtggcggcggtggccggaggcggcggtgcctcctcctcctcgccccggcgccggcggtgatccgagcgagcggccgcggcccccgatgagactgctggcgggctggctgtgcctgagcctggcgtccgtgtggctggcgcggaggatgtggacgctgcggagcccgctcacccgctccctgtacgtgaacatgactagcggcccgggtgggccggcggcggccgcgggcggcaggaaggagaaccaccaggtacgggctggggccggggccggggcgggggcgtggcggcccggccttcccgcgctgggcccggctattgtgcgggacggctccgcgagggggcggcccggccctcgcccctccgcctcggccccttggaaagttttccccgcgccttccccgccgggcgtcgactccgcgagccccgggcacccggccgcggccccgcgagcgccttttgttccgcagcgcaggcggggcatggcctcccgggcccgatcgtgagcggcccggagccccgcattgttcctgggtcccgggcggtgactgcggacgcccggcagcgggactggggaactttggggccagagcgtggctgggggcgcccgcctggcaccgaggcctgagactgaagagacccggccagatccattaccccgagaaacaaaacgaaaagccagcccctcttgttgtctcgttgaatcccagaacgtacaaagggtcgtgaagaaatgtaactgtacatcgcaagccattgaactctccaggctgattggggtgacatttctccctaagcacttaaaaaatgggtttgacaggttgtcgctcccatcctacggaaccttcccctcctacctagcagagatctcctttaaacttggatttagtcagcctgctagaaagattgtgtgtgatgaggaggaagattatgcaagttttacaggaagggtttttaaaacagaacgggacgggagggagttttagttatgcatcgtgagcgttacgctgtgaccgggtaggtaggcttttcattagctcagtcttgcgccacttaaacgtgtacaggttaactgtagaattaagtgagatatttcgtatatgaccttaacatagtttgcagttaatgttaaattcattgaaaagaggcttttgaactctgccagagtgttggcttgtcatagctagcatttataatacattttgcttttccatagagtattaattattccctatatcatcttgtgtctcatcattttcatatatttctcattttcctacattacttttttattatgccaggtgttcagagaatttacacccaggttgatttcatgtgttttaatgagggtagagaattgtctaagaaggagatagagcaatttagaaaagtagcatttagtctttagtaatatgtatattgggcttttttctattgttaaaggaatcctaaatttctgtaaatttttttgaaagcctccagccattgcagtttgttaggtgcaatatcagtatcattgatcacttgtatgatatggttaggaatgtatgtaaacttaaattgcaaaaccacatttattcctatggattatttgcttacactagttcattcttatagagacaactcaaaggtactgtaccgttgactgtacagttaccagaatgtcacatatggaacaatggggtagacaatgaattagaaatgtcatttttaacatttttaagcagttgatagaaata

SEQ ID NO: 1886506 - DNA, 4001 bp, Homo sapiens
gtgtggggctgtgataaagccccctgcagcctcgacctcacaggctcaagtgattctcctgagtagagactcaagtgattctactgagtagctgggaccacaggcgtgtaccaccatgccaaattttttaattttttatagggatggggtcccattgtgttgcccaggctggtcttgaactcctgggctcaagattataccgtgatagaatatgaatgggggtgagtgtgtgactggtaaggtctcgggtatggtggtgacatagtataaaaatataaaagcaatacatatctccgtagagaatttgaagaatattgagaagtataaggaagaaagtcaagacctgagcttgactttgaagaatgaataggagtttgccagctggacacagtagaaaagggcattctaggaagatggagagggaccctcctaaactggaaggtgtttgcggttgctcagaggctggggaggcagccagacagcacccctcaacacagtgcatgccacgggctctgggaggcggctgccacggcgatgggtcctgaggtcacaaacagcggctgccagcctggggaaacactggagtgtgtcccatgtaggagtggaagctttcgtcctgtgaagcttttattttccaggggtgtgtgtgtgtgtgtgtgtgtgtgtgtgtgtgtgtgtgtgtactgcatcacgatgtacaacatgaatatattccttgttagcccagtgacttctgcacaccagactgaggtgtaaataagtgaccagatgtggcaaattctccccttagcactgtggggaataagttgatggtgtgtgtggctggaggtggagataattaagttgttatgatgatgtaggtaaagaaatactgagacactcttgaactagaagtcagagcggttgcagtagggaggagtgacagtgatgggggggagctggaaatggacaggatttataagtgggcttttgatagggaggaggaggcagctggtttctgccttggagggttagacagtggtgccctgcagcaaggcaggggatacaggaaggagtggggtgagggctctgtatgtgcacagcctgtgtgaggagagccgagtaaggtgggaacattgtctctgattgacagtgtctctagttggacattgttgcagtgggttcagtgggttcaactctgattggcagagctgggattcagcagcacgtcgttaaagccagaggcaggtgagagtgcccctgcagtggctgaagacaacattgagggaggaggtggaggaaggagatgtagcaagtgaaacaaaatggaaacaaagttcacaagagaaaccgggaatggtggggtggaagcctgggaagagagtggtttgtaggttcagtgctactgcgagaccatgctagatgagtgccagttatgttccatgtttctcacaagaaacacagaggtggcatctgttaagggctgtcgtgggggttgaatgaggcgatgcgtggagagcacagagtgggtgtgcctgggtgtgtgatcatcatggtgtggccagtggtggtgatgggaggggcagccactcaccagctcgctctctctccagcccgtgcagcctgccaggactcttccagacacgggatttgtcggtgaacaacgcagagctgatgcagacatgtgggtaaagatgttgtccatccagtcgcacgcaccggccagcttgctcttatttatcttctgtactttgcctttgctgcttgagagttctgtaaacaattcttaataaacaaagaggcaggttttatgtggaaactcctgggagaggagaggatttcactgaatgcaaacaggaggaaggagcagatgttaaccctaggcttctggaagcagggttgagtcagcagcgccttggtcttaggaagaggccgggatggataggttgagcctggagtggccgtttctgtttctccgcctgcgcacccacttcccaggctcacaggggtttcctttgtgatgcaggaggaagcacagtgggaagaggagagcacaggcagggctgacgaacatgatgattctcagacagaaactgcgtaaggtcatatgtgaggagcaaactcccttttgtcttaagaaagaaacaattcattttggtgatgtttcttttgttacagtggccggccatcaggttgcattaatgaaatggaaaagtagtgtttcaagataggggacaagtctgctgggcggggacagagcctgcagtgtggaatgcctgccaatcagccattcatccaaggggcgtttgttgacctttgtccttgttaaaggacagcgcacctgctgtgtactagaacgtctgagcgtgagagttgagaatccctgctgtgtactagaacgtctgagcgtgagagttgagagtccctgctgtgtactagaacgactgagcgtgagagttgagagtccctgctgtgtactagaacgactgagcgtgagagttgagaatccctgctgtgtactagaacgactgagcgtgagagttgagagtccctgctgtgtactagaacgactgagcgtgagagttgagagtccctgctgtgtactagaacgtctgagcgcgagagttgagagtccctgctgtgtactagaacgactgagcctgagagttgagagtccctgctgtgtactagaacgactgagcgcgagagttgagagtccctgctgtgtactagaacgtctgagcctgagagttgagagtccctgctatgtactagaacgactgagcgcgagagttgagagtccctgctgtgtactagaacgtctgagcgtgagagttgagagtccctgctgtgtactagaacgtctgagcgtgagagttgagagtccctgctgtgtactagaacgactgagcgtgagagttgagaatccctgctgtgtactagaacgactgagcgtgagagttgagaatccctgctgtgtactagaacgtctgagcgcgagagttgagagtccctgctgtgtactagaacgtctgagcgcgagagttgagagtacctgctgtgtactagaacgtctgagcgtgagagttgagagtccctgctgtgtactagaacgtctgagcgcgagagttgagagtacctgctgtgtactagaacgactgagcgtgagagttgagagtccctgctgtgtactagaacgactgagcgtgagagttgagagtccctgctgtgtactagaacgactgagcgtgagagttgagagtccctgctgtgtactagaacgactgagcgcgagagttgagagtccctgctgtgtactagaacgactgagcctgagagttgagagtccctgctgtgtactagaacgactgagcgcgagagttgagagtccctgctgtgtactagaacgtctgagcctgagagttgagagtccctgctgtgtactagaacgactgagcgcgagagttgagagtccctgctgtgtactagaacgtctgagcgcgagagttgagagtccctgctgtgtactagaacgtctgagcgcgagagttgagagtccctgctgtgtactagaacgtctgagcgcgagagttgagagtccctgctgtgtactagaacgtctgagcgcgagagttgagagtacctgctgtgtactagaacgtctgagcgtgagagttgagagtccctgctgtgtactagaacgtctgagcgtgagagttgagagtccctgctgtgtactagaacgtctgagcgtgagagttgagaatccctgctgtgtactagaacgtctgagcgcgagagttgagagtccctgctgtgtactagaacgtctgagcgtgagagttgagaatcccacgctgcagggacgttgctgttctctcagaagctgtgtagtcccttccctccccccaacccccatttacattctgttcattgcatcttagatgttgggctgtacaaatcattgtgggctcacattctaaattaaaagaacagtgcacattcagggacagtggtgtatt

SEQ ID NO: 1886507 - DNA, 4001 bp, Homo sapiens
gatggacaaccgtgttaagagaatgagaagtaaggaagtagaaacagctggcatcagcaacttttacgatttaaatttgctggtgaggccaggcaccatggctcatgcctataatctcagcactttgacaggttgaggtaggaggatcacatgagcccaggagtttgagaccacccctagcaacatagacaaaccccatctctaaaaaaataaaaaataaataaataaatagccacctatcacccagctacttgggaggctgagatgggaggagcgcttgagcctgggagatcaaggctgcagtgagccgtgatcgcgccactgcactccagcctgggtgacagagcgagaccctgtctcaaaataaaaataaataataaaattaaaactaaacaaatctataaaggacatttccaagtttaggaaatttgaatatagactataaattaaatgatatgattgaatccatgtggattttcttggttgtgacaatgataatgtggtcatgtaagaaaatgttcttttcttagacggggatgtaagaatcccttatacccctgataagggatgaagtgacttgccatctgcaacttcctgtcaaatgattttacaaaaagacaaacacattgattgattgatacaaatatggcaaaatgttaaccataggtgaatccaggagaagtttctttagatgtttgtgctattctttcaacctctctacagatttaaacttgtttcaaataaaaattgcatgggggtgggggaagatgtagattatagaaggctgagacagtcctctccccactagatgtcccaaatcataaactctggagacaaaacccagtaatctgcttttttttttttttttttttgagacagagtctcaccctgttacctaggctggagtgcagtggtactatccagctcactgcaacctccacctcccaggttcaagtgattctcccacctcagcctcccaagaagctgggaatacaggagtccaccaccatacccaggtaatttttgtatttttagtagagacagggtttcgccatgttggccaggctggtctcgaacttctggactcaagtgatctgcacacctcagcctctcaaagtgctgggattacaggcgtgagccactgcacctggccaagtaatctgttttttataaaagttcctaaatttttttagcagctagactctgattagcagctagaattgtgactgtattcattatctattgccacatgcaaaccacactaaagcttattggtggcttaaaaccaccactattttatttgcttacacatttatgggtcaagaatttgagtaggactcagcgtagcagtggctccattaggactggcggactcaagactgcctaactcatacgtgtggcactttggggctggttgtgctccacacagcttctccctccagaagagcctggccctctttacataacggatgggtcccttccatgggaacagaagctacaagacctgggcgtggaagttgagaacattacttccatccctttgtattattcaaaccaagttgcagaccagcctagattcaaggggatagagaaagagatcattccttttttttttttttttttttttttttttttgagacagagtcttgttctgtcaccaaggctggagtgcgtggctcactgcaacctccgcctcccaggttcaagtgattctcctgcctcagcctcctgattagctgggatgcacaccaccacgcccggctaagtttttgtatttttagtagagacagggtcttaccatgttggccaggctggtctcgaactccttacctcaagccatctgcctgcctcagcctcccaaagtgctgggatgacgtgagctactgtgcccggccaaaagagaccatttcttgatgggaagagcaacaatatcatgttacaaaggggtgtggatgcagggaggcattgattcactgggagctgttatgatgatgatctactacagacacccactaaattagactaccaaagccccaccttaaataacacaagcttttgttatatcataattatcttgtccgtatgtaaatggttcctctaaaactgcttgaaaacaattcattttcttaattttatagagtcttgccattttcagatgctattcatttgctcaatagaccataagcattacagaaaattcaatctctcgcactggttcccagcctctgggaccaaaatttagatcccagtagttctgaaactaaaggacaatagaaaagattttagaagagtctcagaaagttctcaccaacctcacagacaaatggagagcagagctaagatggctgctctcccatcctcattcctgccctctgagcgatgacagaagtgatacctgcaaactgtcccctttgcaacttcccaaaggttcattagctgctcaccatgtcaacagaggtggccaggcctttcactcgggatctggaatgggaagacgagtggtgggtcaggatgtctcaaaggaaatgggagtgagtgagtgagagagagagagagagaagataacacccattgccccagctcttgcccccatgaccacagcttttgaagtagtggcatccacattcacatagtttttattgtgtgcatttatgacatttactaaagcaatagatacacatacatacatctccttgtccagacaggctcttaacacagagtcctcactacgaaaaaattccactcatgtcagcttccaaattcaaaaagcagtagttgatgctactcctaacaaattattaagtgcctcttgttaatctaggctctatttacataaaccaccttggagtggtgccccctggagttgtgcaatgtggcagccctgagtatcggcgctagattttatacccgagttcatctgcctcaaaagcctgagctacttgcactatgctaagcagtgatgaaaccaagaaggtatgcatctctgatcacagaaagtgaagaaaaaattagctgagtcaggaggcatctgactttctggagggctcctgaaatcacccacagaggaggagcgaggcagtggaaattgcattacagttccttaggctctagttgtgcctgttctatcatgaataagctatgtggccttgagaagtcacttcacttctctgggcctccatgtcccacactgtcatgggaagagtttctatcagagctgacaactcttaacaccaagagtgtttatatgtgatcatgcatgtttatatgaagagcagtctatcaagtgtatgcacactttaaggaaagatatgtatgatgaaaatatcaccatcaatttcaatatactttattagaactagtcggttttttgtgggttttttttttttgagattaaaaaaaacacacacacacagcaagactttctctctacaaaaataaaacaattagccaggcatggtggtgcatgcctgtagtcccagctactcaggaggctgagatggaagggtcacttgagcccaggagttcaaggctgtagtgagctacaatcatgccactgaactgcagcccaggtgactgagcatgacccgtctctttaaaagtaaataaataaataaataaataaataaataaaacttcacttacattatcttaactatgaggcgtttccgccatttttgttgactcttttctactccattatagtcactgaaaggaattataggaactaaatgccaatcagtagttttattatacaatagtacaaattattacatctctaacaccatttataaatatcaatatctaagcagcaagcagtgtatgtatcttaaaccatctatagatgagtgtagtgtgtgtgtgtatgtacttgtgagtggccttttcatgaactttccaaatttgatcattgattaagatgcccagagataatcagtttaggcaaaatcaaatgttatacttggtcataatcagtagtgaccatatactaaaataatatgata

SEQ ID NO: 1886508 - DNA, 4001 bp, Homo sapiens
gacctcagtcctacaaccacatataactgaattctgccaaaaatctaaatgagcaaagaaagacattgtctcctagggcctccagagagaaacacagccctggccacacctcaattttagcccagtaaaacctgtgctagacctggatctacaaaactgtaaaataataaatttatactgctttaagtcactaaaattgtgttaatttttaatagtcacaataaaaaaaactaataaagtgaactcatcctcacagaattgggactaattttaaactagatgattcatgtaaaaagtatataccgttcctgacactaagttgttagtagttttaccattgctcttctgttactgttagtctcacagcactttgaacacgaggctttgtttcatagatatatttttcaaaatagattggatgccccttgatggcaagagtcatgcctaatttattttggagcactcatgctagcaatagcattgtaggttttttaattctttcgtatatgtgtgattaaattaacaattggacagtattacagaattttgcatttccggatactttagaattctatgctaaataattacaggaacacttgggagttgctgctctacctaaatgatgtgaaactatgggaaaaggagaaaaaatgaaagtaaactatcttttgtaactggtcttagataggcaagaacacggccaagagaattaaggaatgaaaagcattacagaagactaaatgggctgcaacattggtagctttggcatagttgctgttagagacaaattttatgaatgacagtacacgtagtctatatgcattgcttatgtgatgtgtattaggagttattttcttctcattctgctcaataagacttaggagaaaagatgaacaagcaacagtaagaacagctctttcatctcttctataagtttcttaccagtcagtattaaaattgtcccaaatttaagcctgtttgtgttaccatatacacagaatactcatcagggattataccaaagaatattagaacagaaagaagctttaagaatttgaattgaattacaagacaccctgatacttaggcacatttttttctaagcttatttttttttgctcaaagtagcatctccagagctgcaaagcacaattttcactgctttggaaaataatgttgtattttccgtgagtcaatatatctggataattacttatttgaagttgacaaacacaacttttgatatactgaaaagcaaacatgtaaggctaaaacaagaaaggtatgtgtataatatactattgttttggtttaggtatcattttatccttaaatctttgagcatatatagaaaaaacacaatctagagactcacaggatttgtgttcatctttctccggcagacagactataagatggccccatggtttccatctcgtgcttttgctcttgcataatcttctccctttgagtgtgggtcagacttgtgactttgttttaacctgtagaatacagcaaaagtgacatgctatatgtaattatgacatgtaagattttaacagctgtcttcctagaagacactattttccttgctggcttttaagaaaccagctgccattggtgtatttccaatatgttttcttgctttttgtcagtttcaaataaacagaatgtgaaaaataaacaagtctgaaactaacttcaagttttaagagtgataaagtattgtgtaagttaaagaggcgcaccctgccgccattttgtcccctggtccgggcaagacattctgacggcctgcgccccagcgtggacagtccgggtgggcgcgacgctcctagtggacactcacccctggccgccctgcgcaggtgggggtggctcagagcctcccgccaggaaaggagcggagcgaggcagtgagctctccaagaagctaggcggcttcctggcgcaccacgtgactctcagcgcggccgcgcagctcccggctgcaagcgctttgtggcccgcgcgcaggcgcactccggttcgcgccactggggcgcacaggcgggaggtcggagcatcttgtgagttagaatatggagagggccacatgacaaccaactgagggtggcctctgtccagcagctggtaaaaaagtcataaccctcattccgataacctgcaagaagactgaattttgccaacaatcacatgagcttaaaggaagttccttcttcaactgagccttagatgagactagtactctggctaacatattgattgcagctttgttaaaccctaaacgggacccaaactaaattattcttcaactcatgacacagaaaacatgagataataaattgtattgttttaagcaatagctaatacactaggtttcaaaaccttttctgtgcaggttgaaaaaagtttcataatacgagctattgcctcatatttcttatttaaagtattaaatactaaattaacacaacatgagtagactaattatgatactacatatatgaactgacaagtgaaaacttccatctttaggacgtttcaagactgtatataaaaaactggttaaatgtttaacttgggtgtcccattaatttgctataaagcttttttaaaatctcttttttctttcttatctctgcaatatctactaaccaaattaggcaagttcacatcataaatatttctaaaatgcatctactttccttaattcatagtcatgagccctaatttgggagctatcatatcccacctttgactgtatcaacttcatttttttttttttctttttgagacggagtctcacttgtcacccaggctggagcgcagtagcgcgatctcggctcactgcaagctccgcctcccaggttcacaccattctcctgcctcagcctcccgagtagctgggactacaggcgcctgcgcctgccaccacacccaactaatttttttgtatgtttaatagagacagggtttcactgtgttagccaggatagtctcgattccctgacctcgtgatctgtctgcctctgcctctgcctcccaaagttctgggattacaggagtgagccaccgcgcccagcgtgactgtatcaactccattctgatctccatacttcactctcactctttttcccctcccttcatttttacctaaaaccagagtgatatttcctatataaacatgtaattacatgaaccagattctctatctgctttccagagtctttgggaaaaggctaaactctttagtataactcatcttatgccccaggttttattaatttcatctgtctagctaaaagaaacacattttgtttccccaagggtaagggttacgcatcacttatcactttattctcagcattctgcatcgttgattcaagcctgaaacaaatttggcagttaatatttgttgaagtaatacacgaagcaatacataacatatttttaaatgtatgtcatcagaacacgaatctcatatacattttgtacatttattttctgtacctactcatcattaaacttttttgtttttgtttttgagacggagtctcgctctgtcgcccaggctcgagtgcagtggcgcgatctcagctcactgtaagctccgcctcccgggttcacgccattctcctgcctcagcctcccgagtagctaggactacaggcgcctgccaccgtgcctggctaattttttgtaattttagtagagatggggtttcaccatggtctcgatctcctgacctcgtgatccgcccacctcagcctcccgaagtgctgggattacaggcgtgagccaccgcgctcggcctaagcttttaataaaacatctgaaaggtatctatagaggtgatgtcagcaaaatggcaggaaaggagttttccacccctgagacagcatcgctcagtgccgagagacaccctacttgtttgctgtttctcccacaagggaaagttacagcatagtgagagagcatctgactccttcagctacctg

SEQ ID NO: 1886509 - DNA, 4001 bp, Homo sapiens
tgaggagacttgagggaatgttttttgttttttttcttggcaaatcagtgaaagatgggcagataagtatggtgaacccctagtgtgaagtagagaaattggaggctggagttatagaggcagatgttgaagaacgtggaagcttctagaagagctgaaaacgtccatagactgagtaatcggccaggcacagtggctcacacatgtaatcccagcagtttgggaggctgaggcgggcagatcacctgaggtcaggagttcgagacctgcctggccaacatggtgaaaccccgtctctacaaaaatacaaaaattagctgggcatgttggtgggtgcctgtaatcccagctactctggaggcccgagacaggagaattgcttgaacccggctggcggaggttgcagtgagccaagatcgcaccactgcactccagcctgggagacagagtgaaactccaactcaaaaaaaaaaaaaaaaatgcgagtaatgaagggcagattcaggaccgggactggatgctcactcagtaggttgctgtgtcccgcaaggtaggaggtgttctgtgggtgaaaggcaaagacagagaggacatcaggtcagaacattccaagtgagactctacgttccttgaagactccattgtctcatttctttttatatctccagtgccaaagacctaagtgagccctctggatattagataaataaattaacttattaaaggatgaaagagtgaactactaagttaatttgaaattgaaatatagggtaaggcctgcacttacacagagaaaatgaactttcaaaaatgtacaaagcagacaaaggggagacggagagagagaatgaagactgaatgggtatccaactgatacctggaacatggcagtgtgagtagctgaaaaaggaaaagacctcaaggaatggggctgtctgtggggcctatatttatgttgacatcactcacaagtacaagtctgcatccctgggtgtcctcagacaagcatatagtttgcatatcgtattaccttttgtgttagtaatcactgattttgaatcttagctgactgtggaggtgctgttctgcctttgacatggcagtgtgagctggagagggatggggagatgaagaagccacatgtcccaggaatatcaggatcctataaacttattctgggtaaggcagtggcaagggtgaccagcaaagtggtgcctgaaggctgggaatccagtcatgtcaattttcttgtttgtttctctctggcaccttctctaggcccagagcctagatgaggctgtgtggaccagtgatacaatggagactttaattttctcgattagtgcagaggatgaagaaatctcagcagtcatgctgtattcaaggtgcagggtattgcctgcttctgttctcaatgctggctctcgtagcttaacccacctatacagaagtgacttgttttcatccccgtcctggccagtgactctttaaccaggcaatgtgatttacgtttagatgttagtttaatccctttgtttcttaatgaagctgcccttgttaaaatccctgggacctaatcatagaaattctctctagccccacgtctccgttcaacaactgcttagcaaatttctcatcagtcccatttttttttttaccagctcccctcaatagccatttcttgtctccaaggttttttgaagcccagaggcttttcttgtcaggcaattctcttatttcagccctgcagtgaactatccatatactgtatcacatcatgattttttttttctctgcaacctctcccttccccttgaaacaacttacctttatctgtgttccaaccccaatctgttgcgtctagaagtcagagagccaactgccaatcattctagaattcagcattttcaaagttcatctttgaaatggatagcctcttgttctgcagaaaagcaaggatcctagaaaaaacatgcaaactgcatttcaaggaggatggcatcatctttttgtttctcttggaatgactcaggagtgaggaaacaggaatacattactgtggttcccactcatcttggcctaccaatctctcccatctttctaggtacagcccatcttgtgatgggctgggacctgggcccctcctggacttacgttcaggatttcaaataacttggatggcagtctagccaaggaagccaaaagcttccatctcttccttgtcgtttgtgtgggttttttggtttgggttttttttttttttttagagacagagtctcactttatcatccaggctggagtgcagtggcacaatcacggctcactgccgccttgaactcctgggctcaagtgattctcccacctcagcctcctgagtagctagaattacaggtgcatgccaccaggaccagctatttatttatttattgtagaggtggggtcttgctatgttgcctaggctgattttgaactcctggtctgaagtgatccatcttggcctccaaagtactgggattacaggtgtgagccactgtgccccacagtatatctttttaaaatgaagactttcttatcagatttcagcaccaaggctcatacatatgttgactcaagaattaaagggctttagtttcatgtgctggcactaatcaatggctctggtttgagaacaattttgaaaccatactcgtctcattggaaaagagggcagtagtggtgcctaccagagatagggcatgaggaagcagtagtagcatccctgccatgcacctgccatccttgatttgataaagtccagaagcacatctgatcacaccatcttgcacaatggccttctcccaagcaacagtgacaacttagatggcctggaaaactatttcaaactaatagcaacatgtctaccaagagtgcattattaatgacacattcaactgaaaaattgatcacacgctcttaggtattacatgggtcacatttgcaataattttggtttttactgctgaaaggcaaatttaaggtaaaaatcaaatactttaaaagtatatatcttaatatgccttcctcttaacattcatctagtaaggggggagatgtagaattttgatataaattggccagccttatgttgatttatctttaacacagatttcaactccttcacttcagttgccatgaactgcaaggcccttgttcagtctggcttttcatctctttcctgcccaagtccaatttagctcttataaaacaaccagactactgcaatccctcatctcacggcaacctccaggacataatatataaaacttacccttgacatgtgggtgggtcaaataagtgatcaaagggcaagtcatgatctgaaagcatggtaatctcaagcaaccgctgatgtgaacattgcgtgtggcacagtgaaactcaaaggactcctgattttggcaataaaaacgattgtgtctataaactgagagaattatagaagtttgagcacagctgatcttagccttgaacatagttgaggaagagggaaggagaaatttaaaactttaattctgccaatttaacaaaaccgcttcacatcattatctaggatgagagtgatataaagaaatttaccagaactttttccattaatcaaaaagaaggtagtgaatgagatggaggatcaatcatgtcaaaaatttcagaaagggatgaggaaataatttctagcaaattatataataaaagtatgtttccactgaaaggagcattgaggaagaagaagagtatttcgtagaagtgaaacggcactgattaacctcattaaggacatgacttcctcatactttaataggaagtggtaaacttcagaatgagaccagcactatgttgaagtatgtcctagtccagcctctgttgtgagctagctgggaaagcatggccttatctgtttcagtatccttatttgtgaaatgaagagcttggcctgaaatcagcagctctcaaattttcgtgggcat

SEQ ID NO: 1886510 - DNA, 4001 bp, Homo sapiens
aatggttactttactgtattaggaggctccgctgactttcttgtatatcatgattacagtgaccccattttgactatgttctgagtgccatatagtgtgctaagagctttacatgcatttatctattcactctatcacaactatatgcagtaggtacagctgtcatcctcatttcacagataagacagccgaggtatagacaggtgctcacagtcccaagtgagtggtagagacatctcctgttcaccataccctattctactctccttccagcacgtgggaggattacagtctctagggccattaggtagagtctgcaacccaatcttgctcctgggctgcaggtagaactgatccattttatttccaagtcaaagcatttaaccgccaagattctccagcatttttattcctcagctgcagctataggaagagcttgtttggtaacagaggagccataggaggggatagcccaccatgctgccccaccaggtgcaggaacacaccctgaccagggggcttctcatgaaggagaattaaacccgctcacaggctctgagatctgtgactgttcatgaatgcagcagagcctcacctatcctggtggatacagtgagcacacagcatttccagaacttaaaccctagaaaatgaacaccataactttaacacagggtgatggtaagaattaagttatgtcagataaaatctatatgaaaggacatggcacagagatgagcaccaaggaaattttcaataaatgcttgttgaatgaaataattctttttctgaaggtcaagattgaaacctcctaaagaatacacagtggtagaccctgacactaggtagtgcttcctctatgttatgtatatttctatgggcttcatacatacagactcacttatttctcacaataacctatgagatagctagtgtaagtatccacaatttacagatggggaaaccaagccatgtagaaatgaaaaaaaaaaaaaaatgaactgaagtcatacagatgtaaattgaagagctgggtctccaacccaggcagtatgacaccagagcctatattctttcttatttttttgttttaatcactgcttcagtcaagggaaaagagcctatattcttaaccactatgatgtagcctctctgttggcaaccaattagggaagcacattttttttttaaagagaattccaatgatgagtaattaggtataaagaagaacaatactggccgggcacggtgtcttactcctgtagtcccagcactttgggaggccaaggcaggtggatcacgaggtcaggagattgagaccagcctggccaacatagtgaaaccctgtctctcccaaaaacacaaaaaatcagccaggggtggtggtgggtggctgtaatcccagctacttgggaggctgaagcaggagaattgcttgaacccgggaggcggaggttgcagtgagctgagatcgcgcaattgcactccagcctgggtgacagtgtgaaactccatttaaaaaaaaaaagaagaagaagaagaaaaacaatattcacagataaattaagaaaaagaaaaaaaaatgcaatgttggcaacataaggcaagatttattttcagtttgcttcaggtcagttacttcataatggtaactgaacacacatacatacaaatgtacatacatagaggaaaatataaaatgaattggagattgatgacacttgaaaggtagctctagaatgtactgttacaggataaaacacatgataaaagcacctgaaatacaaagctgagacctacctaatgttcaaaggaaacttccagacctacctccactgtgtcacagggacaagtccacctattatttcctcctgcaggactgtttatgtcaggggatccctgggggcccagaagtgggagcagggcaggggtggcagccttccacttccagacccttcatatgtccttgctgctggctactacatcaatccagggatgggcaagccagagaaaggaaagaagaactttcacaaagcagtggctcttatggcaaaggaaaccacaaagaacaagagggacatttatctctcttaccacaaaaaaattcacacagcctgactgctaatgattctgctggctcagccccatgtcccaggtttgctctgcctttctcagcctctgtatcatttgttttgggccagcctggagctgattctgagagatgaaaggagtgtatccagacttccatccctcgatgagatttgagttctatcctttccacaccaggaggcccagctactgattctgggctctcgtgcgctctctacatggttttttttcctgataaccagatggttaagcctataatcacgtaaaattaggttactcccaggtcatcctgatggccactgaagcaacctatgcccccacaaccatgtgtactcagtccataggaagtgggacctattctgtcaaagttattcaatctttgcatttggagtcagattgaatgggttcagagctcagccatcccactatgatgttagacatattactttacttctctaaatctcaattttatcatctgtagaagaaggatgacaaagatgataataatagttagagtgaggatgatgatgatgaaatctacctcctagggctcctatgaagattagccaaagtaaagcatctagctcagtgcctggcagtgcaagtattcagtagcttagttagctattttaatctcagttatttctaggtttttttctgcgtagcatgtctcatacccaggccacctcaggttgagagaccttgctctgaaatccagcatgttcccctccctctcaccagttccctttttctcacacacctctgcctagcctgtgtgggcaggggcaggtttcctaccatattgcagctggtatacatgagtgctgcagtagatgctgtccctgcaccatccacatcccctagattttctttgccattttagtgcacacggacccccagtatgcttccattcccaaaggccagcagctccggtagtatgccagtaaatatttactgaacacttctgggtggagggaagggagccctaatttgtaatgttggccaatttccatggtgtagatactctcaccatggctgatttcaagctgtcagtggggtcaaccagattgcaaaattcctaacaatttaacatccagctcttccaagccattgctaaccgacaccagcacatcaagggcatctgtgtctttttccaaaaggctgcatctagtggatctgctttgtctgtaacacatgaagtacagaagcatctgacaacttgtgcccctgcctgcccactatcccagcagcctttaaccaaggacttgtgggtcaagagttataaatactcaagttgccttgccccaaaggggccagcactgaagtgcaaatcacatcattcccagtctccctggaagatgaggccaaagttatctcaatggaacttcgcttgagatgacacccttgctcagtctccctcttgccaaactcagttcccacttccctatacgtttttcctagcaacctttccgatacatcactttaacacaaattctcatcccaggaccttcttctggggaagcaaacttaaggcagcacttaagagtttgcattctaaagctggacagacctgagctcaaatcccaattccgatacaagctggtggactggggaaagttactgaaactctccgagcctccgtttctccatgtcctttgcctcactgtctccactttcggggaggaagagtcgttgagtgcacaggtgtggtgaagcgagctgtaatgctgacggcagaatagattaattgccctttacaaatgctatcaagcagcctctacctagacccttacaaacaccagtcatattgggtccaatggtaccaatttaatatatcctttctaagcagacaatcccaaacttggaaagtttatgtacacagataaccagtt

SEQ ID NO: 1886511 - DNA, 4001 bp, Homo sapiens
acgcttggaggggcagtgggagacaaagtgaggtggtatgaggaggagggtgtgctgcgcccaccccccctccccccgcaatcctcttgccctaacaaccctgccaggttgaacaccccgctctgggcgctgccggctttaggcatcacctccaattcctgatggctctggggcttctatagccttctctataaagagggactgcaccatctgccctcaggggtaataacgagggcaaagtaagacaccatatgtttagctcttactgcagcaggagtttggtccgcatgggatgcttttattgttactgttgccacagatcttgtctgaggagctcctgcaatcctgaggaaacaggtggaaggtgtaagattcccctcggctggagacctgctcatttttcaagatctttcctgagcaccatctctgccccagcactgggctgagcactgggcacatgcggagccccaacactgcccccaaaggcttccggcctggaccctgaaggaagacaggctgggagcacgggacagcaccagggagcagcctctccaggaagaggagcccaaacgggcagaaatggggcgggaagggctctcttggcagagagggtcagatgactgagaactttacacaccaagagggaaaatctattcttgcattcagtgaaagcactccttttgtgaactggaaagttgtttttttctttttttttgagatggggtctcacactgtcccccaggctgcaatgcagtgacatgatcttggctcactacaacctccgcctcccaggttcaagcaattctactgcctcagcctcccaagtagctgggattacaggcacccgccaccacggccagctaatttttgtatttttagtagaaacgaggtttcgtcatgttggccaggctggtctcgaactcctgacctcaaatgatccaccttccttggcctcccaaagtgttgggattacagacatgagctaccacactcagccaactttttctttaaaaccccaaattttaattagcacccctgacacagatcattacccctttaagtagctagtttctgaactcctgcctcctgcagagattctctcaggcatgcaggtgccctgccctccccatggtctacctccatgaagttgcactcagtcctactctggccccaaacccctttgaacaaaacccatggaatggtgtggctgtctgagcctcggtctcctcacctgtcaaatgtaagagtgaatcaatgtcatgcatgtaggatgtctgtggaacacctggcagggagaaaacagtgaatagtaactatcgttactgctggtgctcaaaaaatatcagtcatttgcttgagtccaggagtttgaggctgccgtgagctatgactgaatcactgcagttaagcctaagcgacagagggaaatcccatctcttcaaaagaaaaaaaaaagccctattttcttcacgttttccatcacagaaaagcaaaacattcagatctagtaattaatacttcagcaaagaaggctcatgagcccatttcttttaagcatcttcttaacatttctgagcctgtcagtaatcactttcccatgtactgggtggtactgagtaattatctccagctctccccaggtccaaggtattctgctgcagaaacgtgacgtgtatgagttagctagtgctgtgtaacaaattatactgagactcagcagtttcaaacaaccaccgttgaacatctctcacagtttttgagagttgggaatccaggagcagctcatctgggtggttctggctcagtcttgctagttaagtggatgtccagggctgcaatccaggattgcatgacggggcctaaaggatccgctgccgagctcactcatgtggctgctgagatttcagctccttaccatgtggcatggtcacaaggctgatggtgatgtagcagctggtttccccagagcaaagggtccaagagaaaggagagaggagagagagagggaaagaaaccaagagggaagcaacaggaccttttatgacctaatcttggaagtactgtggcatcacttctgcagattctattggtcacacagacctatgtgatataatgtaggaggggctacacaagcacgtgaattccagggtgtgggactgctgggggctatcctggaggctggctaccacgacatgtctgagatcagttcccaaggacaccatcccatctgggaacacagatgggagcagctacgtcttcctctggtgcgtcttcaagtgtggctgccatccattagaatcaagagctgagatggcagctcctgaaaaggatgggaaggctgtgacctcacagtccatgggggaggttggtgcgtatttttctcaccagctgcaagacaactggtgggaaaatgctcaaggcattaacacttccctaaggtgagcacagtcatttcagcacattagcaggctggactcataagcatttcagaaactcaagtgagaaccagagccgggaggtcaagctggcaagtcgtttcagatggtcttaaattttatttaaaaaggaagaatgcaggattgcacaaacaggggctttctgtgccagacctggccataatcagcttctctctcacctgggaggacaaaagtaaaagagatgtttggaaaccccaagaaaacgtatttagagcagttgaaggtggggtgggtgggaaggaaagtaactatttccatagaaaagaaatgatgacatgataatattttcgttttacatcttttcactgtttccagaggtagacaattacagcctcttggtttccttccaatcgagcccttgaaccaggaccctaagggaccccagggatctgaaaggaagtcacagtgacttgggtagcaaagggcagttccagggctctggctctcccaggcccctgcacatttcacatctacaccgtgagaggcagcagagccaaaatccaagctttgcacccccatttcctcatctagaaaatggggatgccaatggtacctgcttcagagtatgacattactatggaggatgcattcaatacctgcagctcaatctgtgcctggcactggctgagcacgtcaccagcactacctcacttagcaggtaaaaaaatgaacatccagaaatttgaagtcgctggccttgcccagagggctatgttcaccaattgccaccagggctgttggaccccagactgcgtctcagcctgggcagctcagtgttactcttcatccaaccagcgagccagtgtcacccctcagtgtctcagaggcccctccaactgagctcctcctctcctccactcctctgcccctgcccctccccgacacagccccacctgcccctcttccatcctgtcctcacctgtgtcccattcaggatgagcaaatcagctgcagtacccagtctctgggagctgacactccagtgcaaggggacacatgggacgcaagatgcacaaaacaaagaaaacagacgggcagccctggcttacgatggctgggcctaaccatgttttgactttacatagatgcgtggatgagtcaatcagtaggtgtatagatagacagataatacatgaatgagtggctgggtgaatgggtgagtatgtggataggtgggtggctgggtgggtgagtgggtggatggatggatggatgaatggatgaatggatgaacagatgagtgggtgggtgaatgagagtgtgtgtgagtgaatggataaatggatgagtgggtagatgggtgggtgagtaggtgggtaaatggaggggtaaatgaaaggacagtggatgaattgttgagtggatgggcgagttgatggacgagtgataggtagatgaatggatggtggctggctggctggctgggtgaatgggtcagtggatggatgaatgagtgactgaaggatgaatgagtgcctgaaggatgaatggatggataggtagacgaatgatgaacagatggat

SEQ ID NO: 1886512 - DNA, 4001 bp, Homo sapiens
tgggaggctgtgagaagcagatgtggggccaacttgtctctgctctccctcatttcacatccatcctctcgactgtctgccctgctgacttcaggcccagcaccagccacagcccacagccttccatggaagtcttgggagtttaaccagctcccatgaatgagtgacattgagtacctataacaagtcccttgttctatatttctcagtgcttccacttccgtgattaagccccgacacaacatcaccatcaccacaataatccttattagcaccatcaccatcatcatcacctcaccatcactatcatcaccacatcaccatcagcaccgtcatcattttcactatcgccatcatcaccttcaccatcatcatcaccatcaccatcactgacatcctcgccatcattatcaccatctttaccataatccttactgttattgctaccatccttatcatcaaataagtactgcgtgcagaaccaactgcaccactggagcccatccttatcatcatttaccatcatcactgtcaccattatcaccatcatcctccttaccatcaccattcccccatccttcttctcctcaccatcattaatgtcaccatcatcatcaccaaccctactatcatcataatcatgatcattttcaccaccatcaccaaaatcatcatcgttttgccattgtcacactatcaccaccaccaccatgatcctcatcataatgggaaagacaacatctatgtacagaaagtagagctatatcaaggaaggcagttcacttttacaaagagccacctgacaattaggactagcatttggtcatgaactctaacacctttcgtagccaggcagataacatacctgattggaatttgggggtacatggaaatgtggaatgctgagactatgacaagctgcccgaggataattaaatccaaattcttaccaaacaaggtggtggccaaacagaagccacctgaggggtgaatccagctgaagtccccagtttgcacccactggactggagggtcgttttctttagtttcagtgatatttccattcctaggtgaggagacagagaaaaaccatttttcaggtagtgggaggccgcagaatctggtgggaagattgcagtttaggaatcagacagatttgggtttgagtcccaggtccaggttgcaatgttggccactttggtcaccttttctgagcagcagtactgtcgtctgaaataaataacaacaatagtccatccctcacttcatttggctgccctgagatcaaaggagacaagatctggagagcactcactcagtgcctagcgcataggacatgctcaatgaatactagctgttaccataattagttttagaggattcgtttctaggatgacctgaagtctccctacactctccctctccctactcatataatatcacacacacatacatacacacacactctctcacactcacatacatacacattctcacaaatacactcaaagtaaggtagattaataatccaatgtgctgagtctatggattactgagtaagcatacaatttatccactatgtaaattaatgaaactgatgtcaagaacagtatttcatgctaaaagtccacacttaattctttcttcttctacaacacactcacacacattcattcacactcccctttcaattctgcagctcctatgatctgcctaatctcagaaacaaccttttgattgtgcattcctgggggaaatactttctttcctcctccagaagaaagatgcctcatgatatcacttcagaagaatgaactcaaaccaagggctctcaggggacaaactttgacccggtggtttgctggcgctggcctttctgagtaaggagacccacccagcataccttgccctcaggccacccagtctttcctgctttcctacaggaaggctttggttaaacatccacagtcgtgggtgggctccttcccatcgcgctgcccaactgggcagttcctccccttcattgtgacttcattgctgtaatggaagaaccaaggaaggggatgtcttctctcatccaaggccgtggtggcccaagcctctctcttagcggctgggtaagaagcccagtttcttcagttctacttgggtcttctgcaggggataggctgaagagcacaacacccttgcttggtgtatggcaaacagtcgacaggtaaatagatgttttccctattgagcaggcttgtccaagccatgaacatgcagtgctcagctgttgattgtgctctctcagcactcatctctcctgttactagcacctgagtttcccttcaaagaatcatgttccctccacttccagtcaacctggtttggggtgggcatgtgacccagtatcagccatgagatcactccatcctaggctgggtgcggtggctcacacctgtaatcctagcattttaggaagctaaggctggaagatcccttgaggccaggagttccagaatactccaccctttctgaccattgcgattggtccagagatgttatttatcccaaatgactcgactgagagcccttgaggaatcttttgctgtagccccaagaaagagaaattctctttgtcctgggattgctgaactgtgaggatttgaacttgaggatgccagaagctccttaccacccccagggagagcctacttaaaacaacactggctcagagaaaaccatcaagggacagagagagaccaagatttggagacattgtttgagcctcttagtctatgttaatggaagctagaccttctagttaagagaagcagttaatttccccaattggcataaatcagctatttacaaactaaagggtctcagttaatacaggtcacatattgagagatgcttataaatatacatgaaattgcttagtcagatttaaaaccagaatcttattgcgaaaacaacagtcatcatagctggcattcactgagggcttagtgccaagaattgtacaaagcatttttaatacttttcctgaataaatcattaaggccaccctgtcccatgcatattgtcaccgtctctataatcatcatcatcatcatcatcatcatcactattatggactgaatgtgcccccaccccaaatttgcatgttgaagccctaacgtccaacgtgatggcatttggagatggggcctttgacaggtaattaagtttagatgaggtcatgagggtggagcctctatgatgggtttaatgtcagtataggaagaaacactagagtgtacgtgtgctgtctctctctctctctctctctgcacctccctcccccccgcctctccttctctctccctctctctttttctttctcctcgccatgtgaagacacagggagatgtagccatctacaagtcaggaagatagccttcaccagaacctaaccatgttggcactgtgatcttgaacttcccagcctcaagaactgtgagaaataaatttctgttttttaagccaccctgtctatggtattttgttgtgacagcctgagaagaccgaaatagtcaccatcattgccatcaccaccatcaccatcagcaccatcatcatcaccatcaccaccattatcaccatcaccaccaccaccaccatcaccatcatccacatcaccatcactaacatcaccaccatcatcaccatcatcaccattatcatcaccatcaccaccatcaccatcaccatcataatcaccatcaccaccattatcaccatcaccatcatcaccatcatcatcatcaccatcaccatcaccattatcaccatcaccattatcaccatcaccatcatcaccagcatcatcaccaccatcagcatcaccattatcacaatcaccaccattaccatcatcaccatcattaacatgaccaccatcaccaccattaccatcatcaccatcattaacatggccaccatcatcaccatcatcaccattaccatcatca

SEQ ID NO: 1886513 - DNA, 4001 bp, Homo sapiens
gaaaaccagaatctcggggccaggacccagagaatgctggagggcccgggaggtcagcgtctgccctctccttatgagggaggccccctccttcaggcagcctgcctgcttcagagtggggagtccaggttgtcagttctgtagggtcgatggacctggtctcatttgcctctgaggcccccaagcccttcctgaggcctggtcctgtagggcagggatttcatatttgttgtgaactggattgagctgagccacaccgatgtctggggggatatgacattgtttcggtttccctggctgccctacaagtaaccacaacacgcgtgagtgagggaggggtggggagatgggggtaggggaggggtggggggggggtgggagatggggatgggggaggggtgggagatgggggtgggagagggtcggggggtgggggagggtgggggttgggggttgaaaacaatagcaacttaccctctcacagttctggaggccaggagtccaaagtcaaggtgtgggcatggctctgttccctctggaggctctaggggagggtcctccctgtctcttgcagcctctggtaggcccaggcactccttggctccaatctctgccattcttgcacatagtctcctttcccccgaagtctctatgtgttcttttctgtatcttgtaaggacagtctcattgcatgtagggctcaccttaattcagtgtgattttatcttgactcttaccttaattatatctgcaaagactcttttcccaaataaggtcacattctgagatttggggtagagataaactttggggggacatgattcaacctactaagccattaaatcacaaagagcacgcaagaaggaccaaaaaggcagcgggaagtggggaggaccttgatccaaggacttccacagctcaggcctcccttgttccagccagcaagggctttccatgagcacctttgacttccactgctagccaggatgacgggttcctggctgtcttctacagatgaggaaactgaggctcagaggcctctgaatgcatagccaagttcacacagtcagccacagctgggactggagctcacttggtaccaaagcctgggggtttcacagccagctcggctggattgaagaagccccacccccacccccagcactaatgaggttccaagatctttctccaaggagcttgctttatcaataagaaatgaatcttttgttttgttttgtttttgagacagagtcttacgctgtcacccaggctggagtgcagtggcgggatccccattcaccgcaacctccctttcccgggctcgggcaatccttccactgcagtctcccaagtacctgggactacaggcacatgccaccacatctggctaatttttgtagtttttgtagagatgggatttcgccatgttgcccaggctggtctcgaactcctgggctcaagggatctaccctcggcctcccaaagtactgggattacagatgtgagcctctgagcccagccaaactgtcttgatgttcacgttctttcactaccttagattatgaattttggaatgtggccagttccctggaatcacattaagaagtgaggtccaggacaacgacgattaatttaattattaatagaaatcagcctagacctgggaaataagatgaggagacccaactgtccccagccttgcccttgtgcccatgtgggaggccatcctgactccatttagatttttgcttcttcctacactgacaaagaacactggggcagctccagggaaatgtgcccaaggtgtggagggggctgggggagtggagagcaattttttttgttcccaaccatgcctttctgcaatctctgttcatcctcgaagacctaagactggagaatgtggggtttgtttgttttggagcgactggggcggggagggggggtctcaccatgttgcccaggttggtcttaaactcttggcctcaagcgatcctcctgcctcggtctacccagtagctggaaccacaggcgtgccagattcggctgaagagttttgttaggaagttttcagcaccttggaccatatcctgaaaaagttcattcattgatttaaccaatctctagtgtgcactgcccagaaccagagtgtaagctccacagggtagggagggcgccagctttgctctcagctgcccccgggcgcttgggacctggaacccatgaatgaacagaccccgttctagatcaacagacattcaaagcagcgctctaggggaagggcaggggaggaatgagcgtccagcccccgcggctctacttctatgcctgtgtgtaagtggtgggatttaaaggtggttgggtgcaccggcccttcccccacctgcaatccggtgccaatgcaagtgccaggggagggtggcgtttctgtttacttccagccaggtcagctcccttgccccctcccctgtgtttgcattttctgcgtttggcgagctggtgaagtagccgcggaaagaaggcggatttaaaggctccatttggacgaggcttttggagaaagcttgcacctcccatcacacccccagggcaagtcagccgcctcaaaagtgccggtgccggccctctgtgagctcaacaccttcgcacaaacctcgggggcggttattattaccctctttttcccggggaggcgcctggggctcagagaggccaagtgactcgcccaaggtcacacagctttgcagtggccgacccgggattggaacccggggctccggaccccgcggcggccgtttctcgaagatacccactacctccctcttacaccgctcaaaaataaagcaggaaggccgaacgccccgttttcgccgaaaaacaatgctccacgcaaatttgcgggaacaaaagcaaccagaaatccagcccgggttttccgcctctccgattccgcggaccaatcgcgtcttgacggccgccgagggacgggaggcggtggccccaacatgatcgacagcccccagggaggcgtggccgcggaacgggcgaatgggattggggacccggcacaatcacgggccgagaacgggccgcctgagccaatcagtgggggggggacgggcccggcaggcccgggctgtcgcgagaggcggccaccccgcccacttctgctgatcccggccgcccgtcagccgcgagcgcgacgatccctccgctcctcggccggcgcctcctccgccgtcgccgtcgccgtcgccgtcgccgtcgccgccgccgccgcgctcgggcccggatccgtccgccgcgcgggagcagcaaggccggcaagtcccggccggatccctccgcgcctcccgccgcgcgtccctccccctccagcgtccgtttcgcggccgcggcccccagcgctccccaggcggcgacgccgcgcccgcggcccggggtaacggccggcctgggcggaggcgcgggcggcggcgacggcatggccggggcggctccgtcggggggcggcccgcagtgacagaccctgcggcgcggggggagatgggggcggccgcctcccgggcgacgacgacgacgacgacgaggagcagccgccgccgccgccgcgcaccggccgccgctgggcacgggcgcggggaaggcgcctccccgtgagcggggggcccgaggccgctcgccgcccccggccgccccggccgccccgggcccccccggcgccccgcgcgcgcccgcccgccggcccctgacgggagccttgcccggccccggtccccgcccccgccccggcgcccgcccggcccgcggcgcccgcgcgccctcgcccggacccggccccggcccgcgcgtccccggtcccggcgcgccccggccgcggcccccggcgccccccggccgcccccgcgcggtccccggccccgggtcgcggcgcggcgcgggcggcagcatggtggagaagcgctgcccgctgcagagggacggcgtgtaccgctggttct

SEQ ID NO: 1886514 - DNA, 4001 bp, Homo sapiens
acaggctgcaggtcttgttctgggccaggcctgctagcctggtggtccacaaaggtagatgctgtcccgacaggtactccacttctaagagcaacttcacgccatcagcaccacttcgggcaagccatgcctctctctaggcctcagtttcgccacctacacacagaaaggcgagggctggcctcacagactccaatgtccaaatgcagatggataagtcagagcacaggtctccaggaaaaacagaacattactgatgtggcctgagatatcagatgtctgtggatcacgacgcagcctcctctgggcagaataattccagtttcccaagttaatcatcttgggagcaagtgtctgggcatcaagtcctgctcggtgttgtctctggagctccctcctaccttcccaaacccacagaggctgtcctgaccagttgacatggaatataaattactccagaagagatttccctggagacagctcagggtgggggaccaatgagagactcatgggacctttcctgacgctctgggctctgttctcctttgcatctcgggacaccccgaggtctcagagcaagagccctcttcccccttttcttcaaacgtccatctgccattgttagctgggcccatgccctctcgaggactgttaccaccttcatgctgagtctgacgatatgacagagagactctcaccccaagacacgtccaactttcagaatcaactctgcaaccttgtctcttggccaggatcagccgacagccccagctaaaacccacttcccctccagccctcagatcaccttctgttcccccagaaaatcctccctcacccacagcctcagagcagattatcagtgtgaactgaatcatggattttcgcaaaaccacccagcggggcccacgaacacagctataattagcagcacagtcccggtgcagaggctgcaggtcatgcatgtccagaaaggcaggccctgtcaccccctgggccgcctcctgcttttagctctccaggctgggggattttgtttgtgcacactgtaaaaattcacgctcatctgaaggcacgttccatgcacacgttatttattgtgagatcagcgtgcgattacaacacagccagctgtattctgagaacaggcggcttgcgaccagagagccgcgccttgaagcccatcacctcctcgcccacatgcgtttcccgtcagatctgaaaggcgacaaggggagaaagacaagcccatccatcagcctgcacctctggggcctacgtggcccagagttctccgaactcgtccagtgtccacagcccagcaacacgcatgagggctgaagaaagagagaaataccgttccctgggacagcgacgtggaccagccccaccgattccctccccgcccgggtaactcactccatgctgtgtccttggcctcctctgacgttacgaaacccaaccctgcgcttttttctttgctgccttttaaagacagaagaacagctgacacttccctttcagccggcaccgtcctggcatggggaaaaagcagatggaggcaagtcaattgacatgttgacaaaccagtggatcggaaaataaatctaccctgatcaagtcacaaaagcacggggaaggagacgccgggggcagcgcgaaatcccgggcacggctgcctcccgccccacgcccaggaccgggaagggccacgcagctgtgatgtttttctctccaaagggaattaatcatttccagacgccggcccagcacctggtgcccaaagccataggcctgggagctgtgcaggtcttgcaggcagacgacaccacttagcggacgcgatttcttccctggtcccactgcctggtgcgtgcagagaaactactcccaagtgggaagtgagtggcttgttgaggcttgggacaaagctcaggggtgtcccaggtgaacccccttctctaaaacaagcaggtccctccctgctccgacactgaaatgacatcacggggcactgaggacgtgaggcccgtccccggctgctgcagtgcagtgccacctgcaggccgtgtggcctgagcaggctgtgccatctccaggcctgcagtctctcgtctgtaggaagaggatgatcagtagcccagccttggaggtttgtgtggcggaggggggaataaaccaagtaaccaggggcgggagcttaaagagtgattgcaccaagccacactctgcaggtgccgggccacgctgaggcctgagtgtttgtgtccctccacattcatttgttgaaatccttaacctcaaagtgatgggattaggaagtggggccttcgagaggtgacgaggttaagaagcagagccctcattaatgggatgagtgctttataaaaggccctagaaagcccccttgccccttccgccatgtgagggcgcagtaagttaaccatctatgaggaaatgggcctcaccagacactgtctctactgagatcttaatcttggacttcccagcctccagaactatgagaaagaaacttctgttgtttataagccacctaatttatgtttttttggggtttttttagagacagggtctcgctctgccacccaggctggagcacagtggtgagatcattgctcactgcagcctcaacctcctgggctcaagctatcctcctacttcagcctcctgagtaactgggactgcaggtgcacaccaccacacccagctaattttaaaatgttctgtagagatatggatcctcctgtgtagtgcccaggctaatctcgaactcctggcctaaagtgatcctccagcctcagccttccgaagtgctgggattacacgtgtgagccaccatgcttggcctccaatttacggtattttgttaaagcaacccagatggactaagacaactctcataatcaatatcatcatccttatcatcaccaccgtcaccaccatcatcaccatcaccaccaaccccaccaccaccatctccaccaccaccatcaccactaccaccatcaccaccatcaccaccaccaccatccccaccaccaccatcaccaccatccccaccaccatcaccaccaccaccatcaccaccatccccaccaccatcaccaccatccccaccaccatcaccaccatcaccaccaccaccatcaccaccaccaccatcaacaccatcaccaccaccatcaccaccaccaccatcaccaccatcaccatcatcaccaccaccatcaccaccatcaccaccaccaccatcaccaccatcaccaccaccaccatcaccaccaccatcactaccatcaccatcatcctcatcatcatcaccatcatcactatcaccatcatcaccatcacctccatcatcaccaccatcaccaccaccatcatcatcatcaccaccaccgtcatcaccatcattatcatcattgtcatcaccaccaccaccaccatcaccatcattaccatcattgtcatcaccactatcaccaccatcatcaccatcatgatcatcaccactgtcaccaccaccattatcaacaccatcatcaccaccattatcacctttatcaccaccatcatcaccatcaccaccatcatcattaccaccatcactgccatcatcatgtgatgactctcaatactgtcctcatcatgtgtgacttggactgtggaccagcccctcgggctctgctctgctgacctgtattctttgtctcttgctcctgagaagctgggagttgagacccagtaaggtgttgtagagacacttgtgaccccaaattccatgagacagaggacctcccattttcttttccttattaccgcatgtcatcttcctgcacaaagtagacaagaccttgatgtctgtctccgtttcccaaaagagttaccaagggggtgttttccgaactacctggctcagacttctttcccagcatggcctggtgagtgccaaggaaaggaagctgaggctctaccagcagcct

SEQ ID NO: 1886515 - DNA, 4001 bp, Homo sapiens
tccatcccctccgccaagagggctgtaccttctatctctgtggggctgtgggtagacctgggcccagggcccagttccctgaagccacctctaatggccccaacacactcatccaggcatcccgttacctggctggctcctggcctcagcatattcatctccagcctgatatccaggcttcaagccggccccccaggcctggagggtgggccagcgagagttccacagcaccccggcctgccctgtggggaggagagctggcaggggtacccttgcccacaggagctgggacccctggcccctgttgggcttggctctgctcccagaaggctcatttcttaccatttccttcaggggctagagctgctgctttggggtacaccagagcttccaccccatcccctccaagagactctggtcattcccgcctagcccctgggctgttgtctcccccactccactgcactttgtcccctgggtctgactcactattcctaaaaccattggccccatggaaccctggaggaggaaagagggtgtcagaggctgggctggggccctgagcccaactctcccaccccgacccctgctccccaggcacctggctgtgggtgggcctcggggaagaccctggctcccaggacaccattcccataacctaaacctgcaggacagagattggagaggagctagggacaggctagtggaacagggacagcatcaggagggccaggtgaccagctcatagacagggggatgcggacagacagactgactcaggcatgagggagatgccagcttccgctcaacatgggtcgggggcccaggaggactcaccaattttctgtggctcgaggccaccattaaaacctgggggagagaaaactgtgactcagagatgggggtcagcgagagccacagccctggcctcccctcttcctgggatggcagaaggaagaggagggaagaggaagggaagggaggggaggaactccaggaagggcctcctcacctggttctgctcccggtccatagccatttggaggctggtgccctgtgaggagaaaggaagtcagtgcgggggacccaggtctcccctgactccttggaggccaaagatcgaccttagggactctgaaggggaagcagagacttttcctgtccacagggaatggaaccagaagaaatctggagagcagcaagagactgggcgcagtggctcacgcctgtaatcccagcactttgggaggctgaggtgggctgatcacttgaagccaggagtttgagaccagcctgtccaatgtgacaaaaccccgactctacaaaaatacaaagattagccaggtatggtggtgcgtgcctgtaatgccaactacttgggaggcgtattttgcagtgagccaaaattgcaccactgcattccagcctgggcgacagagcgagactgtctcaaaaaaaaaaaaaaaaaaaaaaaaagagcaagagggtagactcggggagggacttcctggccttcgggtgcctgaatagcttaggcagcctagggaaaaagggtgatggaggggtgaccctgatctggggtggagacagaggatagacctagctgagagtttgtccctctgggatgtggggcctgggggcagacagactcacacctgctttctgaggtttcagtccccactggatggctggcattggtgctaggaggaaggttaggggcaggagtgagcccagccgagggcttgagagactgcagatgccatggggcagggatggaaaggactcccatactggggaccacatggggtcccagggccagagttcaggcttctcctcagcagatcactgtgtgacaagtcactgccctctctgagccttggcatccgaggacagagtgggatatggcagccaggccctgaccctcatagggccaggtgcttcccagtgccccctaggcacccccactccacactgacctggtaacttgccattctgcactgcggaagggggctgggatttcaggccccagccaccctctttgtccgaagggacccctggagtgggaagcctggggaggagcatcggagcgaccctcgcattgcagggacctacgatgggaaggaagggaggggtggggctatgctccaggccagtcctcaccgacgccacccaggaggccttggcctggccaagccaccggcctgtagtggcttctagggcagacccagcaccttagggggacattagccaggctggaaaaagcccagctcccttggtccacactctcctggggggacctggggatccaggcaggggatagagggatgtagggatctggcagggatggggctcctgatggaggcccctccgtcttccagcagcctccctctcccttcctcctgggcccccacccctggtcccagtggcctcacctggccagggcccattttcatggccgtgtcctggagagggaaagcagagatgagtgtggcaacactgggggcagaggctagaagggctgagaggcagaaggaggtgtggggcagagccaggggtcccccactcacctgacttctgaggcttcaaggtccctcgcaggcctggggagagacagaaagaggccagttcagacatcagcccacccgaggagtgtagtgaacccctctctcccctgctgatccccctagccccgtcttttcacctggcaggagccccagccaggtccctggtgtgtatcctgggagggagagcagggcatgagggcggggttggagtgggggaccttggagaaggcaggaagaggggcagagagcaactcggctttggaggtttctggctctctcccaggccagagacccatggagaataatggacaggcccaccccaccccaccccttcccccactgagacccaactctgtccgttggagcctgtcctccttcccctctgctccaggtcccacccacctccctcacctggctgggctccttcccacaggaaggctccagctccagcccgttcttgcaccatggggagacagggtacagcttgggaggggaaaagggtggaggggtaggcagtttctgcaggtagggagagtgaggagtgggaagggcttacctggcttctgaggtttcatgccctctccagcacctggagagatgcgagtaggtgagggacccatgcccactcctcactgaggggtctcttccagacctggcatctgtcccccacctggtgcccatgccaacctccccttcctggtccatgaccagtgggaactgcagggtctgtgggggcggcatggggagaggttggggtacagaagggggctggagcctggcccccctttcctcccaatttaggaactggagctcccagcacctccctcccccttgtgccgcctcctctccagactctaccccgtctaaggctgcaggagcccccaagaaaaccctcagtacagggtcaggggagagccaggcccccacctctttcctcctttctgcactcccagcaactccagccccccagtacctgctctgtagccattctgggctaaggggcctgtggggagggaggggtgagcagggggtttgggattctagctaaggagagggcgaagggcctttggatcccctttcagagccaagtcagaaaccagggatcctggcgccacctctcctccctcattttggtgtccacctgctctggaggcctgggagggagacagggacatcagcccgacaccccctcactggctcggctcccagccccctcctgaatgccgatggagctgaggtggggtatgaatgagggagggagctcagggtttgggggaggcagagggacaggcggggcagggctcacctggcttctgggccttcataacccccaaatagcctggtgaagagaaagggagcaagtgagggacccaaggcctccgctctggacctcctggaaccccagccctgccccttcctggtccatagccgtttgga

SEQ ID NO: 1886516 - DNA, 4001 bp, Homo sapiens
gagatgtcttcgggtgatgtgtacagtctaagtcatgaataaccagtacttgttcaacatacttccattcaccatccagagttcatgaaagacatagctaatcaagcacaacactctttcctgctgaaccacaacacagtctcagaatatttctcaaggtgacactgcatgcagactctatcagttgatcagagttgcaatgcaagataagataacctgccctcctaggtctgggctcagccagtgatgtggttcctcttcttaggatgagtggccagatatagaagaaaaccttagtctgaaagttataaatattcaacttttcctgcagctccctcctccttctgcttctagtgaagcattccagatacagcagggacacctttggcaggcaaacacagttttgtctgtctcattccaggccaccacctcccttatgtccttatgccttctctctgcattcctcaaggatttgagttgctttctcatggtgcatcctctaatccctaataaagttctgggtccacagccatggtaggcagaattttgagatgcctctcacaattcttgcccccctagtgttcgcgctgtttactctcatgattaggttgcatactatgataaaggtgaagggattctgtggacgtaattaaggtcccagagaagttgattttgagttaatcacaagaaagattatcatggatgggtctcatctaatcaaatgagttcttcaaaggccaggacatttataaagaaagaaacagaaattctgcttgtcttgaaggattaaacagtcacatgctaaactacctgtgcaaagggccaagtgacaagagcctgagagcaacctctagctgctgagagaagtccctggccaacaactagcaagaaaatggaaacctcagtcatacagtcacaagaaaataaattattccaacaatctgggggagcttggtggtggacatttatctggttggtctccagatgattatgtaaatgaccaacatcttgttttcagctttgtgggtacccagctaaaacatgtcaggctcctgacccacaaaacctgtgagataatgaatttatggtgttaaaccactaagtttgtagtcattcattatgtagtaacagaaaatgaaggcactagatacagaattatctacctgaccctttctattgcctctcaaaaccagcaaatggtttcttttgagtgtcttactgttttttcctataggaaaattagcatagtataagaacatgaaccaaacagtgataatattgggggaattaaagaaatttcacaagctcttatgtcacaacacttatttctagtccatgtgaagactagagatgggatcatccctcccactcttcttcattcccctgagacagacactgctagtccaaagatggaatgggtgaaatccctgccttaggaaatacccagtggtgatgtaaggtgagacttgtcttagaggaaatcttaacagcctccaagccctccttggtgaattctcttatttgcaagtgttaaagtgatttaccctgccttttattccactctctgctcctttctatgtataccttatctccctcatgaaggggcactgctttcttcaaggcatttagtaagaaatgaacattattaatcatttacagtttgaaaagctccagacaagagtctgttttatcactgtgtcattcattgcttggggtagccaagtttaacataaataactatcacagaatttcttacaatggatcaaatggatcctctccctttttttggaaaaggctttttgagttatttttatttgggactttcattaacttatactctaaattggggaatgataatataataattttacctacttcataaggtttttgtgaagattcaatgagtaaatacatgagaagttcttagcaccataaagcacatagcagatgcttaataaatcttagccattatcatggtgattacattaaatatctagtaggcttccagcagtgttcaagaccttcaagagggcaagcaaacattcttttgtaccagctacgtatgtcacaatagagacctttaggttcaacatcacactgcccctggtcattcagcagtgggtggggcttggagccagactataaattgggacagctgagcttgcagaatccagacaaccaaactccatcaatcaagaggaacttaatccagggaggtagggtagggggttgagatcaggagcagtagtttagaaaagtctctattttgggcttttactagactattggggaaagaagggggaatagagtagatggttataaaatttcagaatcaaaaaagtttaatctgagagtcccagttgatgatgaataccatgggatgttggtattgggtacttagaagaatgccaaattggaaagaattatgggcttagtcagagtttcttctctttctaggcatgtagaagagcctatttacatcattaacttgccaactttgtgtatatacatgtgcagacacgcatgcataatataccataaggcagcataactgatagtggaccttaaggtatgtttctgtgtcctttctatcagttcacaaattacaagtaggcaagaagcgctgccttagaccttggattttcagttttctgctgtttggtctgtatgttttatatttttagccctttgaaaaaaatgtcatccttttcccagggttcttctgctcactgggtcagaagcatccgatttcctgtcatcggttgcggttcagccatgttaatactgaaagtataagaatatcataatcccagagtgatataaagacctttccaaggaagatgagatacccggaggctgtgaaggagaagtctgaaggatttgaacgcgttcaaatgaaaacctttggttcagcaaaacaccagaaacaaattcaaaagataaaatacactccggagaagcccattctctcaacgcatctgacagttcacaaagagcaactgcagtccaacttaaaaaataaagaaaatggtaggaaaatgggcaacatgcactgaggcaatatataagaagaaggaatgcgcaattaatcaacaaaagcctgctctttcctaacgagtgaagatacaagcttagtaaatattaaaatttattgaagataaaaatggacacttccggccatatataaaagcattgttggtaagagagtggggtaattgacatgctcctgggaaataatacgcattcagacaacctctaatgagtgaatccactgggggtatccactaggaatagaaaacgaccaccaatgcccaagtttgtggtccagaatttgagcagcgatctaacaaagtagagtctccccctgtgtcatgggccccacttcttaagcaaagaagaatgcctcattttggtaactcacccaaataaacagaaattttttttgataatcttatcgcatttatttggttaagtctgaggcagaatatttttctcctttgtatctttgttttgttttgttttaatccttgaagtttattaccaaactacatcttggtgtttcttcaggatgtgaacaggcctttctattctcaattaagtgtttctttcctttaattcaggaatcttctaatcatgtattttaatttctttttctgtcatccctccccacgccataagctaccagtcactatacatgttggagctctctttattgtgccatagatctctgatgtcatgtctttagtcattattttgtgtcagaaatttttgttcttccggggacatctggcaatatctagagacatgctactggcacctatagaaatgctagtgacttattatgggtagaggctaaagatgctgctaaatatcctacaatgcccaggacagccactgccacaacaaagaattatgcagtccacaatgtccatagtgctaaggagaagaaaccctgtcctagggtcaaggttggatgctgacaagactaatttcaagtgatt

SEQ ID NO: 1886517 - DNA, 4001 bp, Homo sapiens
ggggatgggtggagtcgaaaacctctcccttgctgggcgatactgtcttgtgttgacgttcaaaaatatctcctttaagttatcaaaagaaccatctcttaggtgctgtctgttagggtaggaggtgggcatgcctaggtcttctcctgctgcgaagggaagaaggaagctagctggggcctttctgctgagccttttagacaatagcacagtgagtacagacacgtttcccttgactgccaggctcagagcaagggcgagggtggcacacaggcatctgctaagcagaaaaatgtcatgccaggggcttcttcaccagccaaccctgttcctagctggcaggccacttcccaggcagtttccaaacaacaaaacagaagggatttcatttctcacttcatttttttttttttggcttctgtattcccagtccctacattctgaataaacaaccttttgttgtaaatggataacttgtaagccataggcactcagggagagcaaagaagctagctaaggtgtggggagggggaggaagaatctgtgctccaagactgggcctgcctactgtgttgttatgtgtctgggctacatgtgtctccatgtctccgcgtcctcacctggaaagagggataattctgcatgccatattgacaaccacaatggtgaagatgaattagaaggaggcaccttgaaaaaaagaaaaaaggaaactgtataagaaaaaaagccccacacagttttaaatatgctcaacttgataattcttcataaaattagaatcacagtgacttccagtatgcagctgagttcacgtgaagtctgcagtcacttgttagagaaatgcttttacggaattgcttcaccaagcagagaactggctctgctgtctcacagatgtgggaagtgaccagctttgatcagagtagccttgatccagtcactttcctctctgagttgtggttcccacattagttgaggggaagctgccgaggtggatgtgtgttgcaggatgaagataagatgttccccaaacacacagaacatgggtcttttctactcattccaggattattgaggaagatccacctaagatgcaagtgttaaatacagtgatggggcaggatgggccaagggtgataaacatgctcattctgagaattggtagttatgcataggactgcataaggctggcatagccctggcgatgtaggttctactgagacctatccccagatgggggccataaccacatgggcagttgtacagccatgcaaccacaccagtaagtggatagaaccaagagctccaaagttacacagacagtttccagtcctgcttctgcctcccctgctcagtgcctctgtttacccatgggcacaccaagctctaaataggattaagcatggcaactactcaacacagtatctggtagaaacccctcagaaacgatagtattattaacaatattattactaaccctaagtacctggggctgcatatatctcagctctcttttcctcctgggcaatttccattttctaaaccgaggtcctgctttttcagcaaggaaactgtgctaaatgctcccgcatcagcgtgtgtgtgtgtgtctctctctaggggctgggggctcaagtgttgaagttggttcagcgtgtgtgtgtgtttgtgcacgtgtatgggtgtgtgtaagggctgggggctcaagcattggcggtagctcagcgtgtgtgcgtgtgtgcgtgtgttcaagggctgggggctcaattgtgagaggtggcccaggggccggttagagactgggaaggacgacagaggcaagacacgcagcgagtgctctcgcgagagttcaccgagttgataaaattattaaaacacaaaatacacatttgcgtgagggggaaaaaatacccgcttgtccgtcctgtcccttcaggctgcgcaacgctggagggcgatgggagctccacacaggtgggacgagcctagcaggtaaaccttccaccggcccgagctccgcgacgccgcgcccccagccccgccccgccttaaaaaaaaaaaaaaaaaagaagaagagaaagagccgccgggagaagcgcggacgccgccgcttcccgggctccagccgcggcccagaagaggaggagcccagacgcccttcgcgcgccattggtccatccgcctagcaacagccgcggccggaccaatgggagccgcgaagcggccggccccgctccagaaacttggctgcggagaagttcgctgtcccagccaggaaaacaaaccaagagacccttcacaccccagccctaagttttctttcttaccctgcctaccctccccctttccctttgcaacttgtcaccattcccagctcatgcatgctttagtcgccaaattctgacgcggacggagggccttttcagaaggtcatctcttcccacccaaaggagaagtctcattagaggcaaaagaacggacaggttgaaaacgatttgtcaggtttccgaatctctcttggtcttcaattacaatagcctcacttttaatatatagtgtgtttttgtttgaactgatctgcaagatctgtgcccaaaatgaagggcaatttggaacatttattatgtaccgggctttgacctcgaattttgtttgctttctatgccttattgcatttaatcctctaattaattgtaattcggagagtgggttgccctgtctccatttaatagatgggaaattgaagttcaaaatggtgagtggaagtgtcagagaaattctgttagtacatggttacacaggattcaaacccaagccagtctgattcccaagacactctggtttcatgatgccaggaacctctgcaagcacttttcagaaatggccataaagaaattctctgacctaccttgtgggttgtaggtcctgccccatactggagaggaagacgtgctacatagagaagctaagaaaaatttgaacagacaggccgtgctgggttttctgcctcagtctcttgctattagatcagactcttctttgtctaaccctatttctacctggctatccatgcttcatcaaacttaagcccgggtaaaaacagatacccggggtatctatttttatctgggacttgcggtcttcattttgagggctcccatgtcacataaaactatgattgaatagctttgttatggcttttctcctgttaatttcttgtcaattcattcagcagacttagattagagccttcagagggaaagtttgaactttcctaaagaaatggtgtatattgcaaaaatcgaatccagactctctctatgtgttatcctcaaaccccagcttgctttgtgggtgtgtgaccagcccaaatgcacagattctgtacttagaaggtcttacacttggtttactgctctgctgttgctgttttgaagttattaatacgatttgaagaagaggtcccgtgttttcattttgcactgggtctgcaaattatgtagccgcccctatgaatacagcttatttaaatgtcccagaggaatctcacgttttgagaatgtcgaacctcaagggaaggaggaaggttgtaagcttgccaccccaacccacatcacacacacacttagacttctgcacacaccctacagatagttttatgacactataactgtaatttgaatctccagtctattaaatgggagtgtatatatttatggctgtgtttatgtgtgtgtgtgcatgcacacgtgcctgtgagaactcagagagggaatagaggtttggggcatttacaacacacagatacagtcctgattattgactctatcctttcactttggagacattacaggggatttggacaggccctgcttttatgaaatacactcttaggaggttttcgagtgcctgtaaacactggactgtgagtgaggttggtgtgatgccggctatccctggagggaacaaaccttgaatacacttccactgggcctggc

SEQ ID NO: 1886518 - DNA, 4001 bp, Homo sapiens
cctcccatttcagaatggtgcagcagaattgcattattttgaatactgtaatgtataatttgtgattattccaatattccaataaaggttgctttgcatgaataaactatagtgtacaaccacgtgtggacaaatgcacaagataattaagaacagaagtgttaataaaagaggagtgtaggctgaacgcagttgcttacgcctgtaatcccaccaacttgggaggccgaggcaggtggatcacctgaggtcgggagttcaagaccagcctgaccaacatggagaaatcccgtctctactaaaaatacaaaattagccaggcttggtggcgcatgcctgtaatcccagctacttgggaggctgaggcagaagaatcgcttgaaccagggatgcagagtttgcaatgagccgcgattgtgccattgcactctaccctgcacaacaaaagtgaaactcattctcaaaaaaaaaaagagtaaattctgacacatgctacaatatggatgaaccttgagggcattatgctaagtgaaacaagccaaacacagaaaagaaaaacagtatgtgattccacattatatgaggcacctagaatagtcagattcacagagaaggtagaacagtggttgccaagagctgggtcagaggagaatgggcaggtgttgtgtaatgggtaccgagtttttagttttggtgagatgaaaaagctcaggaaaggggtggtggtgactgttgcacaacaaagtgagtgtagttaaagccactgaattatacactaaaaaatgttaaaatgctaaattttactttacatatattcaaccacacacacaaaaaaatggagccatgaagtttcaagtatcttaataggacaaatcaaaatcagtctttggaatacactattttcatttttcctttactttctgccaagatgtgtaagttacaaaacaaaaatgcatctttatctgtatttagttcttccagtaagtatatggtctgttggaagtcatactcttcccaaaccgtcaatcattaaagggtgcagttctaaaaacacagatataaaaatactttttcctgaatattcattttttaatttatattttcaccttccgatttggtgtatcacctaagaagtgagtatgtctcatggttaagaatgtgggctctggtgctagaaggatttatcacgaatgtcccggagtaactctggggctttaccacttggcacttaatctcagattaagggaaacacttgcctctcataaaaggagaaagagaaaaaaaaagataaaaagaaagtgagactcagaaaacgcgagtttctgtcataactgattttatctagacaattaaaaaaatgaaggaagagagaaatcaaggaagtttctaaatccacatgctttatctttccatttatgcacgcgatgataaacttattaaggcacgtggaaaagtaactccttctgtattccttacaacattgacctttgagtgttcccaacaggatgctggtcatgcttgcagttcagctgatttttttttttttaaacaagacttgctcccttttctggtttctccccagcctctttatgggtgcgcggtaaaataacacttacctaccggcttccatttacttccttccatgccctgtcggacccgctgggcaagatcccccgcctctccggcccacatactggaaggtgcagtgcccagggcgcacagttcccgtgtgcagagggactcacgcacaagaaggccatccccgcgctaagctgaggtgtttctggaacgtatccctctgcctaggtgccggcagcggccgtggaacgcgcctccggggacagagcgcatcatcaaggtgctttggccacgttgaggcctccttctccccctggcctcgtttcccacatgccctacccacagcgaccttcctggagctcggtattcacctaaggtgttggcggcggcagcctttagcaggcgcgctatctccgctgtgtctctccgcactagccgctgaccgagccaggtgcgcggtggagggcggggcgatccggcagggggcgtggcgaaggccgctgatttcctactgcatacaacacacccactttacctaaagcagaaattaaagccaggaggcctaccccttgtgggcccctgaaaagtacaataagaagtttggagacagttcaaaggcgcttgggtcgaccagtggtaatttttgtttcccgcccccctgcacccgcgaaagcgctggcgctgccattggctccagctgggggtgagtctggaacctgtgagccgtggcactttggactctgagctccaagctaggcgcatccttgctgtgaggtttcccagcggctttcttgccttgcttgcagcttgtgtcgggagttgcggacagccatagccccgcgggcctggcgctgacggaccctggagcggtgtctgacagaggtcggcaaagccaccggctggccccagtgcatcctcacatatgcgcgcagatccctggctccggtgctactggggtcgcacctggacgcgggttgcagacccctggcaaattgtggagctgggggaaggtaaggggaaatgtaaatcgcttttccccacatttcagagattatactttcctaggctatcacaattttcaaaattgttaaaatttttacagtatggctctctcagttgaatgttattgaaatccaccaaataacctcagttattaacgcctagaagctcccctggaggcttattactgccgccatacccctacacacaaactgttttggtttctccttccgcctatgtactcctaaagcactcagtatttacctgtcatcatactttattgaaagtacaaactcgtcacttgtctgtccaccccaactaagcttcttgagaattagaactttcctgtctcttcccagcacaaaagttttatgggtattctgttgaagaacttcaaatatgatctataaaattatgactcatttatatttcaaactccaacctctcccttgagttcctggctcacagcgactacagactgagcttagttggaattcagtagcacacaactgggatatccgcactgtacggcttttaacaatttttaaaattttggtactctcagcatcgcaaattcactgtgtccaaaatagagtagaatgttgttctacccacctatactctgccatccgctgaagtcctttccccatgctccagcactcaagccttgcctgtcacagtaaatggcagttctgtctttcctgttgctcacacataaaactaggctgctattttgatgtcttcatttttctctattctgtatctaattccttagcaatcctgtcagttctacctccagactgtactcagcatattcactgctctaactccagcttaaatcaccatcatcctttgcctggaatgctgcatcaaccttctaatcactctactttcctcctcctccttcctccctttcttcttccttcttgtaaatcatcatttcatccttctgcttaaaatcttctcatgttttcttattacacttaaaatggcaaactcttacccttgagccctgtagaatttggctcccatcagtttctccaatttcaccttctgcctccttcacactctagctgtgctcacttttttattcctcaggcctaccaagctcaattgcatcttagagaatttgttcttgctgtttcttctgcctggaatacatgtttcccaatctttataagactatccttatctgtaggtttcatctgagatgtcacatccaaaagaggttttccttgaccactgtagccaaagcaaatgttgatcactgaaggaataagggaatgaatgaatggagtggtgtataatatagcagagttgataatttaaggctaattcactatgtatctccaagcaaacagatttgtaatgcttttcctgcctaaaatctatacagctgattcacaaatacttgattgacaggt

SEQ ID NO: 1886519 - DNA, 4001 bp, Homo sapiens
aggaaaaagaaggaaagaactttggtattctaatttctttttcacttaatatgtgttttcctgaagaatctagtgttttctcctgttattaaaagctctttacaaacatttcaatgggctacataacatcatacagttggatttttttttttttttttgagccagagtctaggtctatcacccactctggagtgcagtggtgtgatcatggctcagtgcagcctcaacctcctgggctcaagtgatccttttagcctcacaagtaggtgggatcagaggcacacaccaccatgcctgactaatttttaaaattttttgtagagatggaatctcactgtgttgcccaggctggtcttgaactcctgggctcaagtgatcctctcgcctcagtctcccaaagtgttgggattacaggcgtgagccactgcactcggacatgatgttttgatattcaattgttgcttaacattttgtttccaaattttcccagtaataaataatgggcacatctataaatctttgtcaacattttttctccttagaaacagagacctaggccaggcgtggcggctcacgcctataatcccagcactttgggaggacaaggtgggaggatcacttgaggtcaggaatttgagaccagcctggccaacacagcgaaacccagtctcagctgggcgtggtggtgtgtgtacctgtaatcccatctacttgggaggctgaggcaggagaatcgcttgaacccgggaggcagaggttccagtgagccaaggtctccccactgcaatccagcctgtgcgacagagtgaaactccatttaaaaagaacaaaaacaaaaaacaaaacaaaaaggaaacagagacctagaagtggtattacagcaaaggttttgaacattttaaggcttttgagcgccagattcagacactcagtagttttacatgagagtgctacaacatcctcactaagtagtatttgggttcatcataattttaaattattttggtgtgtcaatttgaacactagagtgatataaaaactaaaaacttgaattcaataattttacaattgtattccatcttaaaatattttatggtaaacttggataaagtatataaataatccaagggtgtaaagtagaaagtgaaagctcccttctcccagttccagccccctgatgttgccaatattaaacgttgtatatccttgcagacacgcatctttgatttttgccctcatgtacattactcatttaaaaattatttcgttgagtagattcctaaaagtaagactgctgtattatatgatctttttaaagtatgttgctaaatttcccctcccttctcaaaaaattccaatttgcacaaatatacatgcatacatgcacacagtacattaaggtggataccaaggataaaacatgttctctgtttctgaaaatagagaaaagaccgggaagaagtttaaagttggctttcagcccaccaatagagataacactatataacaccattaaccatgtggtgcatgtaatttagatatacatataattttatttatttatttatttttcagacagggcccaggctagagtgcagtggcagaatcacggctgactgcagcctcgagctaccgggctcaagctatccccccacctcagcctcccgagtagctgggactacaggtgtgctccaccagacccggctaatttttaaaattatttgtagaggcggggtctcgctatgttgcccaggcttactattttaaagtagatgtaggatacaaataaaaaaaaaaatctccttccacgtaggtaaagcaggaaataccgtgccttgttaataagtaattccctcatgatccttttccccaggaacttgggtgagaaatcataaccttgtcctgatctttctaaacagcaatttagcattttcatctccctggcaacccaaggcgccttggccttggtcttccgagtgattgacagtgaccccacccaataaaatctttttatttgtcgtatctaaccaatctaacccctagcgcagagctagggggcgttcccaccggtgcgcgggcgagctgagccttccttacgtctgctgtgcgtcatcagtccgagccaagggcactattggccagttccgttcaacgaagtggttgctttttttagttccggcaatgagttgcgccggggcggcggcggctccccgcctttggcggctgcgcccgggggcccggcggtccctctcaggtaaaaggaggcgcgcagtcacagtcctgcgccggtctagcgagctagggaattttcgcttgaggtttgggtcgaagaggtcacgggggagaggttcgtaacgtcacaggcctgcgacggagcgcgactgcgtgacttcggcctccggggcgctggcgggcggggcggggtctgtagttagcggcgagagtgacaggaggacaggggttgtttcggcagtgacgcctggggagtgacgcaattgcacccctgtgcagtgatgtcacggcaggtgcggccagcgttccgagtcgaggacagttggcgacactgaaaattcagcgtctccgggagtctctctctttgtagtctttgcccagggccttgccaggcaaagggtagcccgacgaccagcagcctccgctacttctgggcgctcgctagaaatacagattctcgggccccaccccgacctacttggtcggtatctgtgatctgtgaacaggacctttaggtgatttgcatgcactgtaaactgtgaaagccatcagtgtagtggaaggagcatcgaatttagagtagagagacatggttttggaccctggttcctgctttccttgtttcatctgtgctgccttagaaaattgtcatgagcccgggcgcggtggctccggcctataatctcagcactttgggaggccgaggctggaggatcccctgaggtcaggagtttgagaccagcctggccaacatggtgaaaccccgcctctactaaaaatacaaaaatttgccaggcgtgatggcaggtgcctgtaatcccagctactcaggaggctgagacaggagaatcgcttgaacccgggaggcagagattgctttgaggcgagattgcaccactgcactgcaacctgggcgtcagagcgagactttgtctcccccgcgcaaaaaaaaaaaaaaaaaagaaatttcatgaagtcgttttctcaacgttaaattaccgtgtaccactttcgggatttttgcctaatggcagtactgcttgaacttttgattactagatgtgtttttttgtatagctatgtcccatttaaaaattaaattaatttccttgaaacaaaatccttatggtgaatgggaagccagtgccacttgccacaaatgggtgagtaatcattaaaaaaaaacaaacaaattaaaaagttatgaaattgtattaaatactgtctttctgttacaaaggggaaattagcaagtgttgggaaagtgttaaggctataccagctgtaaatggagttatcttccttaatgaaagagattgcaagagattttgaaagagtaccccttactacatggggttatttgctgcatatccataagccacttaatattttgtaggtaccacactggcatgtttcacactttgggaaaatatggacataaagtgatgcatttgagagctagcaccgagcctcaattttactttaaagtatatggtaatgcaggcaaaactccgagggttgttgaatgtgaattttaatgctgctctgttcagccagtgagcataacagaataagactcatttctgtttataaagttactttgcttcttatatcttattttatcctcataactcagtaagaaaagtttattattgtatgttttcccttaaaaaggaaagagcctgattattgcctttttttttttttttttttgaggcagagtcttgctttgtcgcccaggctggagtgcagtggcgcgatctcagctc

SEQ ID NO: 1886520 - DNA, 4001 bp, Homo sapiens
tggctcagtgcagcctcaacctcctgggctcaagtgatccttttagcctcacaagtaggtgggatcagaggcacacaccaccatgcctgactaatttttaaaattttttgtagagatggaatctcactgtgttgcccaggctggtcttgaactcctgggctcaagtgatcctctcgcctcagtctcccaaagtgttgggattacaggcgtgagccactgcactcggacatgatgttttgatattcaattgttgcttaacattttgtttccaaattttcccagtaataaataatgggcacatctataaatctttgtcaacattttttctccttagaaacagagacctaggccaggcgtggcggctcacgcctataatcccagcactttgggaggacaaggtgggaggatcacttgaggtcaggaatttgagaccagcctggccaacacagcgaaacccagtctcagctgggcgtggtggtgtgtgtacctgtaatcccatctacttgggaggctgaggcaggagaatcgcttgaacccgggaggcagaggttccagtgagccaaggtctccccactgcaatccagcctgtgcgacagagtgaaactccatttaaaaagaacaaaaacaaaaaacaaaacaaaaaggaaacagagacctagaagtggtattacagcaaaggttttgaacattttaaggcttttgagcgccagattcagacactcagtagttttacatgagagtgctacaacatcctcactaagtagtatttgggttcatcataattttaaattattttggtgtgtcaatttgaacactagagtgatataaaaactaaaaacttgaattcaataattttacaattgtattccatcttaaaatattttatggtaaacttggataaagtatataaataatccaagggtgtaaagtagaaagtgaaagctcccttctcccagttccagccccctgatgttgccaatattaaacgttgtatatccttgcagacacgcatctttgatttttgccctcatgtacattactcatttaaaaattatttcgttgagtagattcctaaaagtaagactgctgtattatatgatctttttaaagtatgttgctaaatttcccctcccttctcaaaaaattccaatttgcacaaatatacatgcatacatgcacacagtacattaaggtggataccaaggataaaacatgttctctgtttctgaaaatagagaaaagaccgggaagaagtttaaagttggctttcagcccaccaatagagataacactatataacaccattaaccatgtggtgcatgtaatttagatatacatataattttatttatttatttatttttcagacagggcccaggctagagtgcagtggcagaatcacggctgactgcagcctcgagctaccgggctcaagctatccccccacctcagcctcccgagtagctgggactacaggtgtgctccaccagacccggctaatttttaaaattatttgtagaggcggggtctcgctatgttgcccaggcttactattttaaagtagatgtaggatacaaataaaaaaaaaaatctccttccacgtaggtaaagcaggaaataccgtgccttgttaataagtaattccctcatgatccttttccccaggaacttgggtgagaaatcataaccttgtcctgatctttctaaacagcaatttagcattttcatctccctggcaacccaaggcgccttggccttggtcttccgagtgattgacagtgaccccacccaataaaatctttttatttgtcgtatctaaccaatctaacccctagcgcagagctagggggcgttcccaccggtgcgcgggcgagctgagccttccttacgtctgctgtgcgtcatcagtccgagccaagggcactattggccagttccgttcaacgaagtggttgctttttttagttccggcaatgagttgcgccggggcggcggcggctccccgcctttggcggctgcgcccgggggcccggcggtccctctcaggtaaaaggaggcgcgcagtcacagtcctgcgccggtctagcgagctagggaattttcgcttgaggtttgggtcgaagaggtcacgggggagaggttcgtaacgtcacaggcctgcgacggagcgcgactgcgtgacttcggcctccggggcgctggcgggcggggcggggtctgtagttagcggcgagagtgacaggaggacaggggttgtttcggcagtgacgcctggggagtgacgcaattgcacccctgtgcagtgatgtcacggcaggtgcggccagcgttccgagtcgaggacagttggcgacactgaaaattcagcgtctccgggagtctctctctttgtagtctttgcccagggccttgccaggcaaagggtagcccgacgaccagcagcctccgctacttctgggcgctcgctagaaatacagattctcgggccccaccccgacctacttggtcggtatctgtgatctgtgaacaggacctttaggtgatttgcatgcactgtaaactgtgaaagccatcagtgtagtggaaggagcatcgaatttagagtagagagacatggttttggaccctggttcctgctttccttgtttcatctgtgctgccttagaaaattgtcatgagcccgggcgcggtggctccggcctataatctcagcactttgggaggccgaggctggaggatcccctgaggtcaggagtttgagaccagcctggccaacatggtgaaaccccgcctctactaaaaatacaaaaatttgccaggcgtgatggcaggtgcctgtaatcccagctactcaggaggctgagacaggagaatcgcttgaacccgggaggcagagattgctttgaggcgagattgcaccactgcactgcaacctgggcgtcagagcgagactttgtctcccccgcgcaaaaaaaaaaaaaaaaaagaaatttcatgaagtcgttttctcaacgttaaattaccgtgtaccactttcgggatttttgcctaatggcagtactgcttgaacttttgattactagatgtgtttttttgtatagctatgtcccatttaaaaattaaattaatttccttgaaacaaaatccttatggtgaatgggaagccagtgccacttgccacaaatgggtgagtaatcattaaaaaaaaacaaacaaattaaaaagttatgaaattgtattaaatactgtctttctgttacaaaggggaaattagcaagtgttgggaaagtgttaaggctataccagctgtaaatggagttatcttccttaatgaaagagattgcaagagattttgaaagagtaccccttactacatggggttatttgctgcatatccataagccacttaatattttgtaggtaccacactggcatgtttcacactttgggaaaatatggacataaagtgatgcatttgagagctagcaccgagcctcaattttactttaaagtatatggtaatgcaggcaaaactccgagggttgttgaatgtgaattttaatgctgctctgttcagccagtgagcataacagaataagactcatttctgtttataaagttactttgcttcttatatcttattttatcctcataactcagtaagaaaagtttattattgtatgttttcccttaaaaaggaaagagcctgattattgcctttttttttttttttttttgaggcagagtcttgctttgtcgcccaggctggagtgcagtggcgcgatctcagctcactgcaacctccgcctcctgggttcaagtgattctcctgcctcagactcccgagtagctgaggctgcatgcatgcaccaccacgcctggctaatttttgaatttttggtagagacggggtttcgccatgatgaccaggctggtctcgaactcctgacctcaagtgattctccctccttggcttcccaaagtgctgggattacaggcgt

SEQ ID NO: 1886521 - DNA, 4001 bp, Homo sapiens
tgtccacaggacaatgccattccttccagaactactgagttctgaacatcacagacacttcctacaggaaccactgaactagaggatacaaccccactcacctgccaccaccatgtcctcccatgcacgattgccacctgcaaggtccgtctggaattagaagacgggagtcctgtttgggcaccttgggaagtctactctttgagttttcacatttcagaaagtttcctagatatagacctcattctctaatcagaatggttctttcactcagagaaggtggtcttaccaagttaagcctgcttgtcgtgacttcctcttcacttagggtgagttctttcctgggagctcctaaacatgcatgcaaacgtatttctgatagagacagcttattcatcggctagatgtgcctggatcccagtgtgaacacaacctgggctcaaaccaggttcctagagcacgtgtgcaacgcagtgtagagtaaaggagtctatgctttgttatagttatttatgaatgtcaccccacttgatttcaaaattacctagcctggcaggccttattaatcccatttttctgataaggaaaacgaggttcctatgagggcagtatcttgctcagagctgcactgtttgactcaaagcttcttgagttcagaaactaagccttatttctcactatctgtctccccagaccctgtgcattgttcagtatctgcacttcgtctgtgctcagcaaatgtctgttgaataaaagagtaaacgaattgtgaatgtggccacaatccacatcggcagtggtggggatgcaaatagggacacatgctttaaatgaaaacactcatcactgggagctccaccttccagatcctcgggacatctgggttctcttggacctatccctttccacctcttcccagaccactgaccctggtgtactttctattcctgtcaatacagaagacaagatggtccacgctcaaggttaggataatcacctccaacacagccagaaactccctcacatgtgtttgtgggcatatttgtttgtgtgtgcacacatgggaacattttacaagatatacatcaagacaacattaatcatagtgatttcttttttgtgggggtgggcagagtctcgctctgtcacccaggctgaagtgagtgcaatggcaggatctcagctcactgcaacctccacctcccaggtttaagtgattctcccgcctcagcctcccaagtagctgggattacaggcacccaccatcatgccgagctaatgacagtgatttctgcgtgagtgggattatgcccaattttattttctccctttccacctttacacttttcttcttcaatttaaatttgtattgaggcatgacatgcatataaagagcacacatcacttaagtacctagcttgagcaattttaacaaactgaaactattcgtgaacccaacacccaaatcaagaccctacacatgaccagctccaaaaaggtacatttggggctccctttcggtccctaatgcccacccccaagagtcaccaagagcctgatttttatcaccagagaagaattttttctctgtgtgtgtgtgtgtatgtacttggtataaagagaatctcactcttttgtgtctggcttctttcaatcatcagaactctagtgagatttgtccatattatgctggagccataaatcacttgttctcattgctatttattgcttttttaggcataaaaactaacataaatatttttaacaggaaaaagaaaccagagaagtcaatgctttcagccactggtccccagataccagcaatccagcaatctcagtggaaaaaacaaacactctggaatcataggttcaaatccagacccggccactcacctttccagagagtgttatttcacaatgtgagcctcagtttcttaatctgaaaaatggtgatcttcatagttccatgtgcaggcactggtgacttccacccagatgtccttgtattctgtttattcctgctcaatgttcatctgctggccttgggtatttttgcatccaactgcccttgggttgctaaagccttttacaggcacagatgggaaccacaggtgcctgggagtttatttatgctgagcctcaaggcccagagccagtgactgtcgggtgcaggggtatggaactccagctttctggcatgcaggacaggtgcactgtacgctccagggttcccctgcaggagcaaactcaagctcccctccacaggtctcggcctgaaatcacactcttcttgggcttctctctcttttcacccctctccccctctcctctgccagttttccctgggagttcctccttaataagtcacatgcacaggatttttttgttttgttttgttttttgtttttttgagacagcatctgtctctgttgcccaggctggaatgcagtggcatgatttcggctcactgcaacctccacctcccaggttcaagcaattctcctgtctcagcctcccgagtagctgggattacagacacctgccacaatgcccagctactttttgtatttttagtagagacagggtttcaccaggttggccaggctggtctcaaactcctgacttcaggtgatctgcctgtctcagcctcccaaagtgctgggattacaggcatgagccaccgcgcccatccataggaatctttatacagggtccacttctagggtacctggtccgatgttccctaaagattgttgcaaggtaaacatggatagttgtgtataaatcacctggcaccgacaggtgctcacacttgttaaatctgttccccatatcaacagcaggctggctttgctctgtggccacaggcctcaaatcataaaattccccagggttagaaggaaccataaatgtcctggactcctggagccctgaattacttaaatcactcttatctctccctgaagagtattacgatggcttctaaatgaaataaccagggacagcattctccccgcaaaactccagctttattgcattacaatcagcacagccatctcgagtggagatgaagctgtgaagagcggatattaaagccaccagctgctttgagtgtcccccagatcggcagctagattactggcctgggcagcacctgcaccctctcccattctaccctagctggctggaggaggctctgtccttgggcaaaagtgggcaccccttgtgaagcactcacttttcctgggaaagagggctacctgcaccataatctaaaagtacagatagatgttaaaaataggaaggaaaaacatagcaaacgcggaattatctcttttcttaaaaaaagaaaattcattgtaactgaataatccgtggcactgatctgtattctaagagcaggttttagacttgtttccctcaacaggaagcgaccatcagggccagatactgacaggaagcagttctttcatattaatagttgccgtttatgtgccgtgcactcctctaaatgtttaacagtctttgaagaagctatgttcatctttgatttgcagatgaggaaatggagatgtcaaggaggtaaacagcttacctccgaacccatgcagcaggtggtaacagagctgagactcaaaccccattctgtctgcttccaaggatgtcctgttaagcagagctatggccaggaatttggattcaaaagatgttttagtttccttgagttttactgcaaattgggtggcttaaaacaacgtaaatgctcctcatcgttcctgaagctaaaatccctccttatatctttctagctctggtggtggctggcaatcccaggcttgtagcggcaccactccaacctctgctcttagggtcacacggcattctccctgtgtgtctgtctttgtgtcatcctccttcttcttactaggacaccagccctactggattaagagcccaccctactccagtgtgacctcatcctaactaattacatctgcacc

SEQ ID NO: 1886522 - DNA, 4001 bp, Homo sapiens
tgtatatacatattaccttgtagttatatttgtaatttatgtgtaatacataattatatatcatatacataatttatgtaatagacattagcaccattctatagatgaagaaactgaggttcacacagttaaaactatctcacagtaggtctcacgactactaagtgatatgcatggccccaccctggcacttttcttgctatatgctaaggcagcaccaccccatttatctccaggaacaaactgtgtcatcacaaacaatgcatgaaagtgctgaggactaagcaagttgtcaatgatgggggatgaagcagaggaaacccaaacttgcaaatctggtctataagaaaactttccttccccctaggcagtctgtctccaggaaactgctagtttgggtaaataaatagcaaacggatgccttggcagccagtcatagagacgctaatttggaaatttgcctcaaaagaacataagaaacagaaaccaatgcttcaatccgaaagcaagagaacgtgaaattgtcagaacaaccaccgatcacaccattctccccgagaaaagcaattttctaggtttttgtttgtttgtttgttgttgtttgatttttttacaaacaagtcctcaaagagacctccttgtgctttggtaatgcgaggcaaaatatccactcattctaaccagggcacacccttgagagggtagcaacgctggatttttacatgggaatccaagccaagaagactggtaccaggatggtggtgtttctagattaaatctgccgttctgtgtctgtaactaagccctacctttgcttggatgatgactgtcgtgccccagcccctcctcgtgccagcgggacagcatcctcctcctgaggcttactagcacctgaaggattgttctgtgaaaaacagggacccagcacctgctgacatccctcagcatcctctctgagtttatccccacggagaagaagcaagtcgatgttaccctgatgcagtcatagttcctgtgcttccccttatcaaattttgtaaccatgttgtttcacagcacacgcaatgtcttcaccctttggctccctgccttctttcaaggcaggattttctaaactttaatcccaagggaatatcgtccctatttagccgtctccctgtctcatctctcagcaccttcactaactctgccacactgaaatgccacctgtaccatcagctacaactctagttttaaactacgtaattttacatttataattttggcttgaatttattttaaaagaagctggtacattggccgggcatggtagctcatacctatcaacccagcatttggagaggccaaggcaggtaggtagatggtttgagcccaagagttcaagaccagcctagacaacatggcgaaactccatctctacaaaaaatacaaagattagacaagcgtaatggtgcatacctgtcgcaggaggattgctggagtctgagaggttgaggttacagggagccatgactgcgccactgcactccagcctgggtgacagagtgagaccctgtctcaaaaaaaaaaaagaaaaaagaaaaagaaaactctacattataacaacatgaatgaaaaaccagtatcacttggaatacaataaagcagcagtaaaaataaatacaatgaaaacaaacaaaaaagcataattaccttttagctggatactatgtctacttaaggtctgcgtatgaaactctctgtattaaaatgagagatagataaggattagagaggtctcaaagacacagtaatatccacctgagaccctctgcttgtcaggatcactcaaagagaaatgaaaatggaatgaatgaatgtcaaccgtgtgagtcaggcttttgtatcacctgtccacacagcacctagaaccattttagtagaagcaaaacaagcaaagttgcatgaacaggaggtaaggaagtggatcaagtaactaagacaataagtccttcctttctagaagctcccctatgagcagtagctcaacaagggcacacagtcagtggaggttcaccctggttggactggtttccattttctatttgttttttgtgcagcgggggtggggcgaggggttggtcacttttatgtgctgagaaggaggaatcattggaaaaaagaaaatgaatgcaggaagcaagttcctggagttgaggaaagagaatgggatcagggcccaggtctctctgccttagacaaacgcagagccctgtgcgcgaggaagaacactgcttcctgagacagaaaggatcgttagctagtgacacgggggttaatgtaggaacttaggaatgcacgcaggacgggagttaaggggttttgatggacagtctccattttctccacaaaatagaatataaggtcatcctctgagggtgaaggggataaagtcctggatttggggggaccagaaaggtttggaatggctactgaagggccagggctagggcagcccaggtcactagaaggaaggggcacccttcactgaccctgctgtggcaccgcccatcaggtgaaggttgctcagcagcagcatgaggcaacctgggaggaaagcaaaccaggggagcagctgctgggccccagggctgggcctacagagctgacgcaggtgcaactaggcaaagaacattccagttcctccaaggccccgctaggatcattccatcgctgctcacacaaggcaaacgcacaaagcacctcattgcatgtggtcacatggacagaccaacaccttccatagtgtattttattattactgttttttgagacagagtcacaatctgttgcccaggatggagtgcaggggatagatctcggctcactgcaacctctgcctccccaggtcaagcgattctcctggctcagcctcctgaatagttgggattacaggtgcacgccacctagcccagctaatttttgtatttttagtagagatggggtttcgccacactggcgaggctggtcttgaactcctggtctcaagtgatctgcctgcctcagcctcccaaagtgctgggattacaggcatgagccaccatgcccagccacctatcatagtacagatccaagaaaggaggcatgtcaaaagaatggcccagagaaccaaaaagcaattataaaagtaccataataagcgcacgtaaaacaaaactgtcttgaatggaaaaagggagttacaacatgcaattaatctaggaagagctttaaaaaaaaaatgccaagaggaggtaagacaactatgacacttaaataaaggttaaaaatgagagttgttcaaaaccgaagtttaaaggttaattactggtgccttacacgtaatacattagttttgttaatgggacaatattcagttaggttcggtgtgtcagccccacaaggtgagtatgtcagccatgagtataaattagtgaagcttccgtgaaaagcagccctttaacagaccttggtctccacacagagaaagcatactgcctgtctgtttaagtgcaaaaaataaaggaacaaataatgcctccactaaaagagtatcaagtttgtttgttgttcatgtaaagcaaatttccaattggaatttgaaaaaaaaaaaccacaagtgtcttaccagaaaaggaaagaaaaactccagattctcgtgctaattcatgttcctgagttgcccacagccataagacaggtttgctcagagatccagggtgcaggcacccagctttctttgctgagtgtgggagtcccagggattggggtctaaagtcagaagcctgagggctttcttcaccttggctattcactagtttttaaggagttctgaagttttatgaaaagtcttttacgattagctgggcatggtggtgctcacctgtaatcccagctactcaggaggctgaggcaggagaatcgcttgaaccggggaggcggaggttgcagtgagtcgacatggtgccactgcactccagcct

SEQ ID NO: 1886523 - DNA, 4001 bp, Homo sapiens
aggcctcctgctcccctctctgctgccagacactctgtgtggggccccccaaaacgtgcctggcaccccagtccctcaagtgttccctggatatggggaaattgttgactaacgactttataagtcatggacatttcttggctgggtgcagtggctcatgcctgtaatcccagcactttgggaggcggaggcgggcggatcacgaggtcaggagctcgagaccatcctggctaacacggtgaaaccacgtctctaccacaaaatacaaaaacattagctgggcgtggtggcaggcgcctgtagtcccagctactccggaggctgaggcaggagaatggcgtgaacctgggaggcggagcttgcagtgagccgagatcgcgccactgcactccagcctgggcgacagagcggactccgtctcaaaaaaaaaaaaaaaaaaaaagtcatggacatttatccgcaaacgtctgctatcagggatatgtaaactctaacagccatgagaagccattggacgggtgttgctgtggccaaaatccagagcatggacagcaccacacgccggccaggaggtggcgcatcttttcatgtcagtcatgatttatccaaaaacagcacctcccgtgatgccagtgctgcgcagaggttgggatacagcgggtgggtgcctagaagccaactcccgccttccaggaagtatggttaggggacatactcacccggacaccgacgtgaacctgcagcctcccccggggagcacgcatgggtcccagttgccttacagtctgatcacggatgctgttgcctaggcaacgtgagggtggccctggctccttgatcttcctggtggctctgggggaccatgacggagatgcggataattcaggtcagggcagcagccggccggcagggggcgacaagcacactgctcatgaacggttggctctgcccacgtgcacacggcgtttccacattaacattcatttaataataataaaagaataagcaacgagagagaaagccagagatctacatgactagacttgctgcatttctaaattaccaggtacgacgtgagccgagcatctgcccccttgccctgaccaggtccccatttctgactctccactcccagccctggacaggaggagtcaagggtcagaaatggtccgggtctgccaatacattccttggtaatagtatgttaaaagtagcaagtggcaatctgttctctctctttctttctttctctttctttctttctttctttctttctttctctttctttctttctttctttctttctttctttctttctttctttctttctttctctctctctctctctctctttctttctttcttcttcctctgtctctctctttctctctccctctcgctctccctctcgctctctctctctttcggaacagggtctcgctctgtctccccggctggagtgctgtggtgccatctcggctcagtgcagcctctgtctcctgggctcaagcaatcctcccgcctcagcgtcccaagtacctgggaccacaggcgtgtaccactacgcccggctaattttgtaatattttgtacagagatggggtctcattatgctgctcaggctggtgacaaactcctgggctcaagcgacccacccacctcggccccccaaagtggtgggatcacagacgtgagccagcgctccctgtcagcgtttcattccctcttcatatcacatcacttgggtctgtggtccaggtgcgctgggggcagcgcaggccgggttcaggagagctcggctcagcagcagccgatggagctttcctgggggctcctacctggccgccagctccagaagccaagccaggggctcttcgagacatggtcccaccagaggagagaccgagcctcggagaaatgaacgtcctaggccatgggactcggacccctcaccccacccgccacacctgccaacttcccggcctgcagggtggcaggaagcctgaggcattattcagcttccttagggcccgttggctgatgcaacacagctcagaagttgagtccaagcaccaagcccgcaatgtctgcgtcggccgccaggggtcactcctcccgcgcagaaggcggccttggagcctcgcaaccgcagtatgcgaaggttgcatcaccctcgcggggtctaagaggaaggatggggaccagcccgcaggcgggcctgagcctcctggcaaagccctttgtcaacgtcaacagaagcatctggcgtcctttctggtcgcggacgtcagagctggctgctccggcactcagccgggtggttggtccccaggcagccgctggggccctgccaccaggtctcacctggccgagagggagtcaggatgccctctgaagcaatgtcccgaaatcccaaattcacccctacccccaggtcaataatgtacaagaagctacattcctttttttttttttttttttgagagggagtctcactcttgttgcccaggctggaatgcaatgccacgacctcggctcaccgcaacctctgcttcccaagttcaagcaattctcctgcctcagcctcccaagtagctgggattacaggcatgcgccaccacaccctgctaattttgtatttttagtacagacagggtttcttttttctttttttttttttttttggagacgcagtttcactcttgttgcccaggctggagtgcaatggcatgatcttggctcaccacaacctctgcctcctgggttcgagtgattctcctgcctcagcctcccgagtagctgggactacaggcatgcaccaccatatctggctgatttttttgtatttttagtagagatggggtttctccacgttggtcaggctagcctcaaactcccgacctcaggtgatccacccgcctcggcctcccaaagtgttgggattacaggcgtgagccaccgtgcccggcctgagacagggtttctccatgttggccaggctggtctcaaactccagacctcaggtgatccgcctgccttggcctcccaaagcattgggattacaggcatgaaccaccacgcctggccgttgaagctacattcttgttccaaagttttaagcagggactttggtgcagacatagcaatcttttgggaggattaatggagggaagaaatagtacctggtattcccactgctctcacccacagccccgggatccacctcctctttaccgcccgggccacagagagcacacgtgggctcctttccatttgctggtccgacccagcagtggtcaccgctggagccctgagaccccaccaaggtgttctgcccagctctcctcatccacagaggacagagggggtcaggggaaataatatgaatctgacgctggggacatttgcaacccgcagagtcaccgccacctggtgtctcttcagtgtctatggagaccagtaaatgactgtttgctccactgttctgaaaacaaatgagtgcagaaacaatcttcttttgcttcctgcctggtgagagacatgattgccaagagctcaggccaggagccgagggtttgcttttcatcctaatcttcaaggtggtcatcttcaaaggatgtgagagggcaagagctgagctctgcttcctgcaaagagaaccacacatgtccctcagtggagcacccagtctagctttcctgtgtctgccttcctccctccacccacgccttcctccctctgcccacaagtccttcaccctctccccacaggctcagccttcgggagctatttcctgtggctttttattcacttcctttttttttttttttttttttgagatggagtctcactctgtcgcccaggctggagtgcagtggcacgatcttggctcactgcaacttctgtctctcagattcaagcgattctcctgcctcatcctcctgagtagctgggattacaggcctgaactaccatgcctggctaatttttatatttttagt

SEQ ID NO: 1886524 - DNA, 4001 bp, Homo sapiens
ctgcctggtattctagtctatggatggataaatatttattgatggatatttaggttgttgctacacctcagcttttgcaaacaaatgctgcaaagaagaacctggtgcatgagacattttgcatgttcgggcagatctgtagaagtaattcccagaagggcgcatgttttttacattttgacagttcttgctaaatggccctttatagaggttacaccagttttaattcccatcagaatttatttccaaacctatcatgagatacgccagcactgacaagaatcctcactgcggcattgttcatcgcgccccaaactggaaacagctcaatcgatcctcagcggaacggagaaatcatggcctcttcacgcgatgaaatattatgctgcaatgaaaagaaacaaaattctgctgcacacggcagggaggaatctcctaggcggattgatgagtgaaagaagccagacacagaacggtccttactgcatgatttctgtgatatgactcaaccccgaagtcaaaaggaagacgcaatctaggatgacagtgatggaaacagaggtgacccttgggcggcaaagggagtctgctgagcgtctagaaacgtcgtatatcttgttcggagtgatagctgtatgggtgcatcagtgtgtgaaaactcaccgagctacgtgcactttactgatggaagttgcaccccaacaaaaacttaaagggtttaaaaatattgcccacactgacgcgcaaacaacacgaccgccccagcaggcagactcctccgatgcaaaagcttaggtgacaggctgtctttcttttgtccagtcctgagccagatgtgggttctgggccaaggaggtgaagcacgaggctccctctgctgcctccagagctgtccagggttcccctctgcgcccccaaaagcgcagggtcacaccagtcggggaggaaggaccagagcgactctgcgccctcaccccaccgcctccttctctgtttgctctctgaccggtgccgtttcattgttcccttcctggacgccatcccctcgtccagacaattccctgcaccagctgccaagcagctgcctggctatttatagcctctgtcatcagccccttcctcccgcccttggccctactcctgggaccactctccctacccccacccactttccaagggtccggctgtgtccagccaaccaggagaagagtggggacagtagaggctgagttcgttgacaaatatcatacaacacaatttttaaaatgtttctggaacattccaggacccgttgttgtggggaggggcctgcccttgctgagctggtcccttggtctcctgaggtgatctcaactgtgtccatggcttttggacaaggtgagacgaacttaattctttttttttttttttttttttttgagacagagtctcgctctgtcgcccaggctggagtacagtggcgtgatctcagctcactgcaacctctgcctcctgggttcaagcgattcctgtgcctcagcctcctgactagctgggattacaggtgtgtgccaccacaccctgcctgtttttgtatttttcagtagaggcaggatttcaccatgttggccaggctggtcttgaactcctgacctcaagtccacgccccttggcctcccaaagtgctgggattacagatgtgtgccaccgcgcccggcctgtaatcctactggccgtcaaatccactttaaaagcagtaaaggcatttgactccttcctgtttctcgttccttctcacccccactcaggccatctcccctcgccccaccacttcctccctgcacctacctttcttccttcctttctcggtgaagtgaagggtcacctctcattgtggaagaaggactagtaaagccagctttaaatgaacattactgggttggcctatgccaggcaggcgcgaggtctctattccccatgtgacaatcaagctgggtgcgttcacgcccaggatgctggggttgtcccacctctaggtttggagtgggacgacgaggagaagcaatttgttcaggagcagagaaagttcgcttggctgtgactcatcgcctctccattgagagtctccggcgggtccgtgatcatcggacacgatcatgatccgtcctcaggccccgcctgtgcagagtgcgcggaggccaaggagttattggcagaaaagcaagagcggaatgagcttgcgtacttgaagtctgtggccgtctgccaacatctccttcaaatatgaacattcttattttcgctctggaagtttttgtcaggtttattgcaaatgcaagggtggtgagcagacagaaagaaaatggtatttactgagctggaaggactgttttctcaaccgtttctcaagagcacgcaaggagacgtgcactttcctgggtgacatcaggttctccgtggggattttaatccaaatcagatatggccttgttttacgagggatcctcttgggtctcagggtgtgaggattcataataagtacacgtccatccagtacatggcgaagaccattgtaagccacccctggaaacacatacaagacagatgggcacgcagttcacaggatagcgcagaattctaatgaatttcattggcatcaaatgttatgttcctgtaaactgagagccatgaaattagaatgagtgcctcacaatagttcaaaagtgactcacttcattgaaaaaacgtctcggaaacataaattggtaaatcaaaactaaaactagtaccctttaaaaaaaactgagaatgatgtccctaagtttttttttttttttttttgagacggagttgcgctcttgttgcccaggctggagtgcaatggcgtgatctcggctcactgcaacctccgcctcttgggttcaagtgattgtcctgcctcagcctcccgagtcactgggattacaggcacccaccaccactcccagctaatttttgttatttttagtaaagagggggtttcaccatgttggccaggctggtctcaaactcctggcctcaagcagtcctcctgccttggcttcccaaagtgctgggattacaggcatgagccaccgtgcccggctgggatgactattttaatctcaagagagccatctgggttccttccagggcacaattctatttaaggatatactttcttatttttacacaagtttgataactggataaaaaaaagacgaacttttttttttttttttttgcatggaccaaaaaatgtagccataagagcatttgttaatacgcacgtctaacatcctccttcccacctccctgtgcagcacaaagtggtaaagacagcaagaattttctttctaaacagttgggctgaaattaaacaacaacaacaacaaaaacccaaatgcccattctcctcccagcggaagtacaacctctctttgtatcatgttactcatccgctgcacacacctgttcatccaacaacagctaacaaaagtcagactccgagttaagcgatgtacacatcacagtttgtgctggaaatctgatccaagcacatggacagaactttctatggttctcggctcctaagcttggcagcttgttttcagcgtattcttaaaaacctaggaaactggcaatcatacttctaagttaaaagattgggaaatcaggccagtgaataaatacttactttggatctgcactattgatgaaaaataaaaaatcactggaaaaaaatgagcccctttcttctatttttgctcaaagcagtccaaagaaaacaagttttggttcactgctgtctgtgagctcagtgttgaacaaattccagcaaaatcacagagaaagttggaaccagatttgcagcgctctatctcatacatgtttcttcttcttctttttttttaagagacagggtctcgctctggtgcccaggctggagtgcaatggcacaatcacagttcactgcagctttgaactcctggattcaagcgatc

SEQ ID NO: 1886525 - DNA, 4001 bp, Homo sapiens
tttgtcccctctttttacaaaacgatgaatgctcagtgcccacgtttcaggcatcacaaagaaatgacttaagttcaaggtcaagagacagttctgtccccgctgacccagagatgtcctttgctgatgctctgggacgccttttcaagatgctgtctggggagggatgaagtcagagttttgatctctttaaagtttgatttctttaccaaagtaccacgtttctataccatctgtcctgaaagtgtctttggctgggctcaccatgttccctggcctgtggtcctctgattggaaatgggttttcatgaaacaaacggaaggggagggtgggcagactggagaagtttgtagcctgtttctggttttctgcgactttcattctggcccctcctggctctgtcatccccggtcccatcagcaccgtccagaccagacctagcgtagcaggtccacacacccgggatggctcagcactgaccctgccttctcttgctccccagggagggctcccggagtaaagcctgaggaactccacctttacaaggtgatcttcagcgttcaacaaactttgcttctctggccacctccttaatcaactgcagcctttttctatttctagcctgaaacaaactccacaaacactggctctttcttcatcttcctccctttccaatgataatactggacaaaaatgggacaatctgtaatttttgcccattttcttaggaatttttcccctctagttaaaaatcaatcaatcaatcacacacacacacacacacacacacacacgcacgcacgcacgcacgcacaccatgaattgagtcagggttccctctgatcatccccaccgcgctcttccttttgtctgaaaggggctgggcaatgataattgtgcttctggggtgagaggtgtggtgtggggggattcgcagcagaggctgcggcagctggtggggggtcctccttcctggtcctccgatgactccgacgacgacgaggagctctgaagggagaccaggaggcgtctccactgaccatggggcccagcagcgcggggcccggggccagccccgaccttcccctccaccagcggacggacccacagcctgaaggcggctggcaccagaggggccccggcaggagccgatgggctgcgagcgcgctggcgaggggcgcaggagaatggaacggggacaggggagaggcagaaggaggaggagagggaagcctggagaagaggagagcgcagaactgaggagcggggcagaaaacagagggagagttgcagaccgggctgagctgcagcggagcgcgggagtgagcggcggcgggaaagctggggttagggggccaggacgtcgcgggcgaggggcggtggtgagtgcagcccaagggcgcaccgtccctgcaacagcttcgcgggcgggaacagcaggaaggagtgagccttgggcgggcggtgggtttcagaggagggagggccgagcagctgcaggggacagaggggcagaaagacagggaggcggggagaaggtagggagcggttctgggtaactacttcgcttcggaaaccgcccgggtctcaggccccaagggcatccccctcctcccagatccccgtcttgggtccctggacccaagtcccgtggaaggcgacacccgcgtcccagaccgccgcggcggctgctgcccccacacgtctggttcggctggctctcccctgcgagggtcggggtttctggagccctgcgcactgggctccccttgcccgcagcgcccctgcggcccctcctcccgctggcctgggatcccggagacgcaggacgacctcggtgcgcgaaggggcggggggcgcgtggggtccctgggggcacacctgctcactcatcccttcccgtctgaggtcttcgctgatgccagcttcacaggcacgggcatcaaggccctgagacgggagaaagggtaggcctcgcaggtgcacgtgggagaggctgcacctaagcccccgcaccagccctggaccaccagggcgcagggcccgaggtgcgtgacaaaggggtgacctcacctgtaacaagtgaacaagcgttgacacccgcgcaggctccagtgttccaacggcggagtcatatgaatcatcctgatgcttaataaacagatcccagaaggagcctggacatattagatcagaacttcccagggagcggcccagggatctggatttccagtgcatgccctgcggtgaccctcactccagaaagctcaggccccactgagctccagtgttctatctccagacatggattacacccggggctacacagcgagacagcgaacctgtgctgggtcaccaggttgagggtggtggtgaggttagtctcaaagcccagcctagtggggcttcatggctctgttttagccaaggggctcttggattgtccccggaggggtcaagggtctttccgctgtcctattcaaagtgttttagggtgaaataatcatgataatagtcacagcacctgctacgaatgaagcaggcgcttatagtctagagagctacggacttttgtgaatattctgttttaatcctcacaattgaccttgggaggaaggtactatttatcatcgcacttcactgatatgcaaactgaggtgcgaccaggttattttattttctccaagtcctgaaatggtgcgctggggctccccagctctacccacaggtacctgcctccctccggaaggtgtggacagcacagtggtgggcggcccagcccggaggggggactttgtgcttccataggaaggggtctcagagcctagcatctgggtgtccacccaggaaggtgggtggggcacaaggtggtctctgttgtccctgcagcttctgggaacccagatgaaaggcaggagtgtggagcacagacctggggtctctgtagaatgtgctggagggtaccaggagctaaaactatgtggagctgggtgggcccaatagaggagaagggaataggggagggagattcatgaactaagtccagaggtgggggatgggaaggggaggaaagagctgatggctttggaacagtgctactgagagaggcaggcactgggtctcggcaccacagcgtgcctttggtggtctcaggttccatacaggaaccctgaaacgaaacagggaatgccctaaagtggcacctcatatactctccaggtttctggcagctcagcagttgggctgggggtgctttcctgtgcccaatccctggcacccttcccacaccacccccacccccataatgcagcagcagagaacctccatctcaccgatgggggaactgaggcccaaagaggttgaacagggagccgatggcctggagcttgcctccttccaaggttgtgagttgaatggaatggtccgaaagccggaggtgtccgctatggatcaccaccctaacactaaaacagcagcggtatgacatttatcagattcctccgaaatgccaagaactgtgctggcaactttgcatttttatctcattaaattgtcatgacaatcctatgaagtactcttagtctccctgtttcacagagggggaaactgaggctccacctggaggacatttcttgcgctggctctttaagagtctatgccggtgcttccagcagatgtccaggttctcctcttggcatcttaccctgcctcccccatgaccagctgagttctagttggccaactttcatgagacagggtagcagatgggcatctggtacccagatctcaaagctagtcatgcctgcctcaggggtctcgccataccccagagtttctgcacctgggacctctggctcctactctttaatttcctccacagcctcttacccagatatttttaaatggggagatttaaaaaaattttttaatgggaagagttaaaaattttaaaatggggccatttaaagatggggagaggagacagaagaggattccgcct

SEQ ID NO: 1886526 - DNA, 4001 bp, Homo sapiens
aaagtgctctgtaagctgtaaagcactatacagatgaagcggattattattagtcttttacgaagcccagcgataaagatgcaaagtgacccagaaaaagaaaactgagtagacaaacctgaaatacaacatctatagcccctagaacagttaccctgtacatggtaggtaggtgcttaataagtagagtgagtaaagaaaaacgcaaaacaggtttgtgcctccatcatactaggtctgataccaagaagaaataaatatacctaaggtcaatgatagtttcattcaaccatacaaacccaaataatccaagagcctaagattttaaattaaaaattacttcaaagaaagagcatggaaacgtgaaatgtgacccggaatccgcaattaaatcggtatattcttacctcttcagtctttccaacgcagtcttgcagggatacaggacctgggtgagggtgtggagtgcttccctgcacctggtagatctacataactgttcctagcaacctcttgaggaaataatacattctatagaatgttgggtacctaagctctctgttttggatttgaaaggctgcgttttagtgatttttaagccaaacaagatttatcccataacagccccccaaaaacacgcacagaaaagaagaatgagaggggcgggtaggtagagaagcagttattcactttataaaacaattctctataggattcttttgtcagtttcctagactatgtaaaatgtgattcaaattaaaatatttaaatcacatacccacatcttgacatgggcagctatttgtaaaatgaggcaaacccacactgggaaataccaaattaaaaaaaaatcagggaaaaaatattttcttctgggtggccctaaactgctttctttttccccattgcaaatgtatttttatgctgggttacatttccaaaacaggagtgttttttttctatcgttgaaatgaaacaaacaagtttgctttcagagctacagaaatgcccaactgttaggaaaaaaaaaacaaaaaaccgttttccactggccgcttgcctctcttatccccatgcaaccttgcctattggcccctttccctaggagagcccctggggctgtctgatggaactgattgtaaaactattttgtgcagtaaaaaagtcgtttcttcaaaatctgagaccacccagaacatgcccaatctttggcaaatatcgactggtttcctcagtatttgactagctgtacaccgagtaactgtcccgggtttctgggtctttatctgagaagaaatgagggggaaatgtttcagaagatgaaaaaaggaagaaaacctctcatccaaaatctgttcaaaattcattttgtgcgtttcgaagggggaggacaggagaatttagtgcaaagacggcctccaccaaacgaaaccgtccaacatttgcaaaagcttttaaaataaactgctcagggatcaggggtttgctggaaactcccggtcgcttgaagccctgtccctccactccgggcaccctggcctccccagggtgggcacccctcctgcacggagagcggcggctgggatctcggagcagggtcggctatggccctggaggcagcggctcacagagaaaaagctctggcttttctccgcccgctgcgttcctcttcttacagcctcgggtgtcacatattaggtgctcaataaatgtggacataggaaacgaaaagtccgaatctgtccttacgcccccaaggcgaattctggggcgcgcgggtttattccgacccactaccacatcgcgtttcctgaggtaacccggcctcggctctgcggccccagcggctggagagccacggagaaggcgggctacgggcgacaagatggagagccggcccgagagggacagaggccgcgctggcagcgagctggggggcccacctgaccgtcctgcgggcagcccggccccgcgctcccattgacaaggaggtccgcgccgccggcgcgtggggcgggggcggaggcggggtggggcgccccggcgcgcgcccggccccactccccgcccccgccagtcccgcaagcacccaccccgggggagccgcgggccgggagggcgctggggggaggggcaggccgctccgcgagcgcgtgtgcgcgccgccgccggctgacgcgaactccggcgcgcgcctcccccgccccgcgccctccccgtcccgggggcccggcgcgcggccctgctgacgtcagctggcggcccgcggagccgggtgcgcagagccgctggcgcactcgcgcgctgcgctggcctcctccccgccccgggcccaggcgcgcgcgcgcttgttcgctctcccattttttttttcccctccctccctgcctctctctctctccctctccctcgagctcccggctggctgcggctccctggcgctctccctctctctccggtaggctcaccgagcgatgcgagctctgggagacagcgacgccgcctcccgctagagacctgcccctcggcccggccccctgcccaaccctgcccagcgcgcgggggtcggcgaaggcgccgcggacgcaccgacggctgaagagcggcgatgcacatgcactagcagcaccccctaactcactccctccacatcccgcgccgccgccgccgcctcctccacctcctcctccgccgccgccgcctcctcctcctccggcagccgcggcagcaggacccaccctgccccccaccccaccctctgtcggctccggctgcggctccagcctcgactattattttatttattttgggtcgtgcacaagcctcagtgcctgcagtccgcgcctcctcggcccgcgggcgcctcctcccttggctccggagccccagaccccggccaccctcgattcgacaaccccagacccctgccagctgccgcgagtctccgctgctggaatcttgttagcggctgtctttttggagggttctggtttcccgacatttttgtttccagcccaggagaggatatcgtgattttccccccttgagcccaggctctgctctctgggggggtggggggcgctccaagccggggagccgtgccagccgagtcgtgcgggctgtggcagggaaggggccaccatgggatgtactctgagcgcagaggagagagccgccctcgagcggagcaaggcgattgagaaaaacctcaaagaggatggcatcagcgccgccaaagacgtgaaattactcctgctcggtaaggaccgccgctgctacccccatcccccgaccccggccactccgcaccccctgccaccagctcccccaccccactcgcgcccgggagacctggtccccaagttggcaccaccatgtgcccaggatcgcccaccccctcgcatgccttagtccccccctccccctgttcccttaagctgacactcaccagtttttccccactgtctgtgtcccaacaggggctggagaatcaggaaaaagcaccattgtgaagcagatgaagtaagtccctgtggcattgggattcgtacttttattaagaataatttttaaatcgtttttattacattgcttactccacattgctctccaggcctgttttttaattcgtgcacacacacacacacacacacacacccctatatttgactcccctcccccactccctacgttggttctgggtcctccaccctaactcctgggtgggtgttttttgggagggggaaggggagcgcctgtagttgtatgaatgacagtgtccgccatattgatcagaacatcacactattggcatgattatgatcattactcttgcttgtggaatattttctgtgtctcactgcctccatttctgtctgtgtctctgtttcattctgtctctatttctttctcctcttccctccatacctccctatcccccaaggtccgtaatcccacttccccctgctcttttcctggggcagtgattttgaacttggcta

SEQ ID NO: 1886527 - DNA, 4001 bp, Homo sapiens
ttagccaggtgtcgtggcttgcacctgtagtcccagctactcaggaggctgagacaggaaaattgcttcaaccagggagatggaggctgcagtgcgcagagtcgcgccactgcctgggtgacacagtgagactccatctcaaaaaagcccagggtgcttggcgccaaaaaagggatctctgaccttgtgttcattatgaccttcaaaagagtgaagtggtgagggcatgagggcagaggaaaagaagggcttaagacaacgaaggaaaagaaggcaccagagtctagtgcctttgccgccaaacctaagcctataaggttggcagcaaaaccaaagcacaaactgatagcaaaggaggtaaagccaggggagaagaaactgaagacgtcaaagacagaaatgaagcacatcatctggtttaaaacaaatgatagagtttttacagttctggaaaatgaccgtataatattctctgctaagaagaataacttctgctaaacaaccataagactgcagctggctctactcagatctgcttattccaacaagaccaaggtgctagttctaacttcgagtagtccctctgtatggctgcagcgttgcgcacagtggactgccggtcacaaggaagactggatgagcgtgggttcacacatttcccacacttgcctcagcaaaagaaccacctgggacacttgtttaaaaatgacagattcccacggtccacctcggcagattctgatcctgccacgccagggagctgtatttttcaacaagtacaccaggtgatcacgcaagtttaagaaattagcacaagttggccgggcgcagtggctcacgcctgtaatcccagcactttgggaggctgaggcgggcgaatcacgaggtcaggagttccagaccagcctggccaacatagtgaaaccccgtctctactaaaaacacaaaaattagccgggcgtggtggcgcacacctgtattcccagctacttgggaggctgaggcaggagaattgcttgaacccaggaggcagaggttgcagtgagccgagatcgcgccactgcactcccgcctgggcgacagagtgagactccgtctcggaaaaaagaaaaaaaaagaaaaaagaaaaaagaaattaacacaagtccctgccactggaaacgcatatccgttgggctggctcctcctccaccaccagcccccatcccggtacatcacgtttacatgcatgcggaaaatgggcttggagattcttgattcaaatccgaggtatcacacatcggcccccaaaggtcaaacattaagaaggaagcttactgccctgtcccagacttttctaggtgacttcttcctccggactctgcagcagtcttactagttctgaaagcacaagcggaccgcacgtctcaacgcgggaaaacagttccatctgcagggatggaggaccgggctagacaagctggagttggctctgcgccgcaggggtgtgcaagcccaagactggggagcccgaggtcaccccggccgccctggcatcggggctgaggtgcaggctcctggaggagcggtgcgcaggcccaggggtagccgaggacacaagccaaggcacgagcggacaaccttacggggacgagtactaccgcccggacgcgacttcgcgagaggccaggcggaacccactggaagcgtgagctagcggggaccacccccgggcgaaaccaaaggagaaagaggggaacccaggggtcccggggcgcttaggcccgcgcggacggggaggccagagttgccccgaagctatctccttacctcaccggcccccacgggctccgcgctcagctacagcccggcgggagcaatgcggcagccacaacagttgccggcggtcgccgcgggccggaaagcggggttcggggatgggaagggggcggggcgaagcgagcaaaaagttccggggaagccgagaccgcgaccttccgcgctttacggcccccgggcacgggtaccgccggcgcgtgacctcagccgcgcccgagcgcgccgtgacgccctcgcggagccccgcccctgccacgtgggcttgtttgggtctcgcgaggcaccgcccccgcggcctctttgccaccctcagaggcgagctgtggaagccttgactcttagggccgttttagaacccgggcctcggaccggcggggtttctgcacgtggaaccggaacatctgagatgatcgcaggccctgtggagtgtggggagcgcgggggttctttcttccctcgaggcccgtgccagggcttactccaaagccagtgggtccccagtcctaagccaagcagtcccgggggaaaacgcttctcatcgccgtgggagcgcggatcttggaagtggctctgggctttcttgggcgaggctctcacagagtagatcggaaatccattctgctggcccgccccacctcggaggacggactaacggacctgagttcccggccctatcttactcttctcagcttctcagcttggctcagctcagaggaagaggaatcactgaagtctcagagaagtctccactcatcccttcctcaccgtcacatcagccttttctttccttctagaagtcatcactgactcaaggatataagtttgatgactgtcttttccactggtgtgacacgatctctgtcgacagaaccttagtcttatgcatagctttattctcagcacccagaacagtgcctggcacctcttccactgaatattatatgcataagggtctcatgctgcagccaccattgcatcttgggccacactatccagttcccgtttgttggattcaatactgtctcaccacacaaaccaatcttgtgttttattaattaaaaaaaattttttttttttttgtagagataggctcactgtgttgcccaggctgggcctgaactcctggcttcaagtgatccttccatctcagcctcccaaagtcctgggattacaggcgtgagccactgtgcctgccccaatcttgtgttttattgctggccacctgtagccaggcactgtgcaggatgatgggatccagcagtgtacaagaaagaggcggtttctgctcttagggagtggcagtcaagttccagggacccctctgtcacaaggccaggccacagcctacatagtttataccccatttactggccagtcaaatcacacaaagacagcccagatgaggtctgccagacagtggactgaaactatgccataggctcctgtgctagataaatacttccatattttagctaggattgaatgcttggggacacctacctgtctaaaaaaagagaaaacggctgaccaatttgagacattctcggggaaggctttcctgatgcccagatgtggcaatttcatgaaaaatatcacaggttttcctcatgaaccatttggttcaagccatttccaggcacatgaatttgggagaaacctggttgtctgcaggagatggtggatgaaatcaagtgaaatacttaatgtgttgatttcattctgtttacgtgcagtaaatagcaaacaaatggtatagatctgtccctgatttccttctccatcaccatgatcggcctccactccaaaatgctaagtcaggctgggtgcggtggctcatgcctataatgccagcactttgggaggccaaggcagttggatcacgtgaggtcagaagttcgagaccagcctgatcaatatggtgaaaccccatctctactaaaaaatacaaaaattagctgggcgtggtgacacatgcctgtaatcccagctacttgggaggctgggacaggagaattgcttaaacccaggaggcggaggttgcagtgagctaagattgtgtcactgcactctagcctaggtgacagagcgagactgtctcaaaaaaaaaaaaaaaaaaaaaggaaggaagtcctaaggcccctttcattgtcaaagatgggtcttgtccttagtaggttctcata

SEQ ID NO: 1886528 - DNA, 4001 bp, Homo sapiens
agctgcggccccttcgaccctgcggagggatcatggcccagctgttctaacatggccagaccaggacactctggccggcccgagaactgaaccgggaaggaggcagggaaaggggagggaggaagacaatggggaagcagtgacatccgagatgtagccagagacggacatcctggactgtcgtgcagggcaaggcgggtgggcgggagccaggtggcctgagagcccctccctgcccaggggtctctggtcaggcagttccttcccgggctgctggatcgtgtgtgcagggaacccgtcagcctggctgcccaagggcccagatgtcctctcagtgcccgggggtccttgacagccccagcaggagccccacgtgcctgtggggcaggccccgcaggtccctctctgtaggactcagaataccttctccaatgccacgtgctctccctgagtgcccagtgccacagagggccccgctggcgaggttacttcaacgtcaggctagagggtgcagcgagcaggactcacagcccaggttcccaggcaggtgtggcaggagcccattccctgggtcggtgttctcatgtcaccccacggtgaccctgctgtacagaggcgggggcgcggggcccctggctggtgccctcctgctgccagacttgtgctctgctgaagaggggctggcgcggcaggtatgagcccggcacggaggtcgtgagcagtgagaagcctggcacctatgggttcggggcagggaggccctggaaggtcctgtcctccgggagccctgcacagcaccccctggtggtggctcctgttcgtgtcggggctgcagcctcccttcctggacggttttccattcctccttcccactctccctgctgctcacccctcccatcctccacaggtcagaggtcatagctgcagggtcagcaggtcagggcctggggcaaccctaggaaggtgtgagtgtgagaagctggtccaaacctgcctcggctgcctggtggtgcggacagggagtcctgggcatccgtgagggctgcttcacggtcaggcttagggatgtgcagggtgacttggacgtgggtcatgagtctttgctccagaaagagggggctgagtgtccaaggccaatcccgagtctgtcacctaacaccatttgtgctcaaaaaactgaacagagtggacacaggccctgagtttgcgccccgaggccgagagagggcagatgtggtggtgacattcaccaccttggacccagacccagatgctacctgtccctgagctccaggaagttgtgagaagggcctgagctgttctgcactttctcgtggccgggcgtggctggtggtgcaggagttgctgccccagggtgagggcccggaagctcctgccagcacgtgccggggtggaaagggaagctgtccacagccctgtcaggactcagaacccggtgggtcaaggactttggtccggacccctgctgaagggtgagctgtccacatgtgcgccgagagcagaggtgaagccagggctcctgagtgcccccagccacagggtgcgcccgcccagcccctgccctgcagccgaaggcctccctgctggggggctgagtccagtggggccacaggcagctgggagcaggacaaggctgccaggcaaccagatggtgctgccgcttcctgccaggtgtgggtgcacagagagagagaggatgccggtctggggcctgacctggtgcacagcaggtgcctgaaatgccagggtggccatggggactgggtaccatgcataggccatgcatcgggatgcaacttctccttgcagcccctcagccccagggaggcagctgcctgccccacttttctccagagccatcatggccctgctcccaccccagccacggctgctcaggggcgctccgcatgctctggtctccatccacctgcagcccccactggggtgaggtggagcttcttgcctctccttgtgtctatttcctctgcttccacaactgaacggtgacaggtatttgctggatgagggagcacaccccaggtggtttcctctgagcctgggaggccttttcctgcctgtgggccccaggcccatcctgctgccacccccaggaggatgcccggctccttgtgacaagagtgaccctcgggaggcgtggggagtggggctggccggcctgcctgatggggtcctgagtccatggcgggtttgcatctcaggcctctgggctctggccgggctgggggctattgtccggctgagcggcctgggctgcggcccctccccgtccccgggaccagcctcacccactcgctctgccgcaggtcacacaggccgcctcctgcgggcattgctgggcctcagcctgctcttcctggtggcccatctcgccctccagatctgcctgcatattgtgccccgcctggaccagctcctgggacccagctgtgagtcgctgagggggcggggtagggatagccatcctgggggtcagggagagggccctgcagtgaccccgagtctcctgggggggttgactcagcctgatttatgtctggcctggatggtccaggtgaaacgctccagggatgaccaggccacggtgctggctgggcagagcctgacctgggttcccccgtctttctctgcaggcagccgctgggagaccctctcgcgacacataggggtcacaaggtaagaccattcctcccacccccaaccagcaagcctcccttggggatttcaggccccaggaagtggggggacccaggagggacagagggggacctggagactcatccacactcccacccacacctggagacccatccacgctcccacccacacctggagacccatccacactctcacccgcacctggagacccatccacactcccacccgcacctggagacccatccacactcccacccgcacctgcagacccatccacactctcacccgcacctggagacccatccacactcccacccgcacctggagacccatccacactcccacccgcacctggagacccatccacactcccacccgcacctggagacccatccacactcacacccacacctgtcctcttggtctgaccgcggctgctccctgctctccgcaggctggacctgaaggacatccccaacgccatccggctggtggcccctgacctgggcatcttggtggtctcctctgtctgcctcggcatctgcgggcgccttgcaaggaacacccggcagagcccacatccacgggagctggtgagggcagctgcgtcacccgtgtgtcagggaggtcattcgagagctgtggtctcagccattttgagggttattttaatctttttaaaacagatgtagacgttttggttgtaagttggtgttaaagagaggaggaagttccaaatcccaccccggggcccagcctgcagttccatccgttcagacctgtttctactcgggctctgcctctagtcagaaacctccacgccccgacatggcatctgtgcccttaggaactcttcacaggggaattatttggggccacgcggtggtggaaacctgcagtgctgggcagtgggtctggctggagagccactgcagaagggctgagaaggggcggccccagcaggccccatgcacttacaggcaaacaggctgtcggcccagagccccagcaggggcctggaccccaggagcgacgggcctgaagcagggcctctgtcctcggagtgggaggcagagtgaactttagctgctacaagacttggaggtccggccccgggaatctctgagctatggccccctcacacggacagggcatgagctggggcctgcgacacccaacgttgactgctcagaccctctcgtccctgcctgggcccacacttgccatccccaggctcagccaggatttatggccacctgggtgtcctggcccacgaactccctgccccgggcacccagcctcct

SEQ ID NO: 1886529 - DNA, 4001 bp, Homo sapiens
caccagccccttcctcgcagctgctgccctcacttgtcaccaggcttcccaatccacaggggcagggtcatggccgactgctgcagcagggtcatcagcacccctctgcgcatggtcttccggggtggctccaagtcattgtagagacccgcgatcttggccactgtgggaagaaagggaggcctgaggccccagggacaggggctggccctgaccccccagcatgctgaactgagctgctggaggagcacctgggagcccccagctcccgagtgagcccgagggcacagcaggactgtgacctgatctgccaggtgtcctacaggggctgctgcgctcaactacatatgggtgagacggcagcacaccaggcacccaggggaaggaaccagggagggacaaagcgggttctgaggtgctggtgaggttctcttcttgatgtcggtgctgacacagaagtgtgtttcgttagtgaaaagttcctaaaattcgaagggtcccgcgggaatcggggcgaggccgggtgcctcttcagcgtccagctgctctactgcctgaatccctggtacccgggccctgtctacgtggggctcactgtcaaccctgttcgtccagcagcacaatggtggccgcaaaaaaggcggggcttggcggaccattggccgaggtccctgttaagagggggagggtctctgtgcccggaggaaggctccctggaggaggcggaaccggggggcacaagcctgctgagagggacccactaggtctgtgacgtgcgcgggacgtcccgggcgaggcctgttggtggggggaggctgtcgcaggggaggagcctaacggggaggcggtgccctgggaatctcggcgttagaactccggagagcagctggctgaggcgagggtgatgatccaggctggggtccagcgcaggggtcttggggggcacgctggggtcgggtggagcgcaggagggagaggaatgagaacaggtgggtacctgggctggaggcgggacctgaggtgggcaggtgcagggggcgtgccttcaggcagttgcggggccagggctcggctgaagctgggagtgaggaccccgttctccggtgggataggaggggacccgcgatgctgggctgcgctggcggtagggcgcggcggggctcacaggaacattcctgttgtcctccccatggagattgtgctcgtcgtgcacggcttcccatccgccgcggccgcccttcgggtaaagaagaagaccgggcggcggcctgtggcctggatttggggtccgacccccgcccggagccgccttgactccaaccccgccgcggttggagggggcctggcacccccgccctgggcgctcctcccggtcccgttgcgccccgacctccgtcagccgcacggcactggccactgaccgtcgggcctcctccgccccagggcgccgcgcaggtccctttgctgacgccgagcctgagcctgagccggtcccggggtccaagagggctgtgtgcaccctgcgcgtccgcgcgctccaggggaggtgcgctccaggggaggtccgccccaagcagagcggcacatcctccagacgacttcggatcctgctgttgaggagccaggaaacgccctgacactgttgcggccctgtccacatctctaagatggggatggatgatagtacttctggccattcctgagcacagcaggacctgccttttccctttgactggaaggttcttctctacatcttcagtcttgataacctgccacctccacagggaggtcttccctggctcccaatttaaaattgcagctctgagaagccgggcatggtggcatatgcctgtagtcccagctacgggggaggctgaggtgggaggatcgcttgagcccaggagttggaggctgaagtgagctatgatcactccattgcactccagcctgggggaaacagcaagaccctgtctctaaaaaaataaaatacaataaaattgcggctctttcttgtgcacttccctgcccgcccccctttcctgaacccttattattttctgccatactacaaattttatgcatctcattaaaccccttccgaacctgtgtactaaactgcctgggggcagctctcatcactgctgtagaacaaagtcccacatagagccaatggccaagaaacagttaataaaataacagacgatggtcctggcctctactgtgagtgagtaaagggcttgccctgcagagattcagtgatctggcgggggttgctgagctatgaggaagttcagatctggctgcaggggtgaggctgtgactcagtcaatcactgcccatgctcacaggacactggccagcttagtccctgggggcaaggattttacccccccccccccacctccatttcctcatctctaagatgtgaataatcgtcgcccctgcctcacaggattgagctgtgtaacccccctcccaccttttttctatgccatccactgcgggtctggggctttttactggaatgcaatacaaagtctgagtcaagggtgccttctgttggttgctgagggcggaggcagagctagttgcctgtggtcctgccagtcaaggggcttccagaggagggaggaggggcctgtggccctagcatgtgagcagcttctcctctgcctggaagccggacgcctcagcttctcccacactcccacctgcccgcttgcctctgaattcacacaattcttggaaggcttgggagactcacctttactcaaatggttacctgtctcgtgtctcgtgcccagcttgaccttttttttttttttttttttttttttgagttggagtcttgctgcgtcacccaggctagagtgcagtggcgtgatctcagctcactgcaatctccgcctcccgggttcaagcaattctcctgcctcagcctccccagtagctgggattacaggtgcccaccaccgtgcctggctaattttcgtatttttagtagagacagggtttcaccatgttggccaagctggtcttgaactcctgacctcgtgatctgcccaccttggcctcccaaagtgctgggattacaggcgtgagccaccatgcctggccccagcttgaccttgaactttaaatagtgaagacaaagaatgaggagggtggggggatgccctccttccacagggccctgtggcttccaagcctcaacctcctctggtctcttgtctgtggagcctccttcaaacccagggaaacaaaagcacctgccacgggctgctgtttttctaggatcttctagcgaagctctgtaacttcccctgagagccatgaaactgggctggctcccagggtgatgggactccagcgtctttgttctttcttgttctatgcatccatgctctgctccaccgctgccccttcaactctgcccacacatattactccagactggccctgtggtcagagcctggaatgcctgggctgctgggggcttgcatgcaggctgcactggactagaagcattggcgccttcaagactgccctgggaaacatgacctgccctgtttctgtctagtgagtacccatttttccccactcaccggctcacttcccttggctgggtcaattagaaaaagctcttctgttggcctgccctgcagggtggagttcagagggcagctcaagagcccggtgacagctcaaaaaataaaaaaagccgccaggagcagtggctaatgcctgtaatcccagcactttgggaggccgaggcaggcggatcacctgaggtcaggtgttcaagaccagcctgaccaacatggtgaaaccccgcctctactaaaaatacaaaaattagccgggtgtggtggcggatgcctgtaatcccagctactcaagaggctgaggcaggagaattgcttgaacccaggaggtggaggttacagtgagccgagatcctgccactgtactccagcctgggcgacagatcacgactccat

SEQ ID NO: 1886530 - DNA, 4001 bp, Homo sapiens
caccagccccttcctcgcagctgctgccctcacttgtcaccaggcttcccaatccacaggggcagggtcatggccgactgctgcagcagggtcatcagcacccctctgcgcatggtcttccggggtggctccaagtcattgtagagacccgcgatcttggccactgtgggaagaaagggaggcctgaggccccagggacaggggctggccctgaccccccagcatgctgaactgagctgctggaggagcacctgggagcccccagctcccgagtgagcccgagggcacagcaggactgtgacctgatctgccaggtgtcctacaggggctgctgcgctcaactacatatgggtgagacggcagcacaccaggcacccaggggaaggaaccagggagggacaaagcgggttctgaggtgctggtgaggttctcttcttgatgtcggtgctgacacagaagtgtgtttcgttagtgaaaagttcctaaaattcgaagggtcccgcgggaatcggggcgaggccgggtgcctcttcagcgtccagctgctctactgcctgaatccctggtacccgggccctgtctacgtggggctcactgtcaaccctgttcgtccagcagcacaatggtggccgcaaaaaaggcggggcttggcggaccattggccgaggtccctgttaagagggggagggtctctgtgcccggaggaaggctccctggaggaggcggaaccggggggcacaagcctgctgagagggacccactaggtctgtgacgtgcgcgggacgtcccgggcgaggcctgttggtggggggaggctgtcgcaggggaggagcctaacggggaggcggtgccctgggaatctcggcgttagaactccggagagcagctggctgaggcgagggtgatgatccaggctggggtccagcgcaggggtcttggggggcacgctggggtcgggtggagcgcaggagggagaggaatgagaacaggtgggtacctgggctggaggcgggacctgaggtgggcaggtgcagggggcgtgccttcaggcagttgcggggccagggctcggctgaagctgggagtgaggaccccgttctccggtgggataggaggggacccgcgatgctgggctgcgctggcggtagggcgcggcggggctcacaggaacattcctgttctcctccccatggagattgtgctcgtcgtgcacggcttcccatccgccgcggccgcccttcgggtaaagaagaagaccgggcggcggcctgtggcctggatttggggtccgacccccgcccggagccgccttgactccaaccccgccgcggttggagggggcctggcacccccgccctgggcgctcctcccggtcccgttgcgccccgacctccgtcagccgcacggcactggccactgaccgtcgggcctcctccgccccagggcgccgcgcaggtccctttgctgacgccgagcctgagcctgagccggtcccggggtccaagagggctgtgtgcaccctgcgcgtccgcgcgctccaggggaggtgcgctccaggggaggtccgccccaagcagagcggcacatcctccagacgacttcggatcctgctgttgaggagccaggaaacgccctgacactgttgcggccctgtccacatctctaagatggggatggatgatagtacttctggccattcctgagcacagcaggacctgccttttccctttgactggaaggttcttctctacatcttcagtcttgataacctgccacctccacagggaggtcttccctggctcccaatttaaaattgcagctctgagaagccgggcatggtggcatatgcctgtagtcccagctacgggggaggctgaggtgggaggatcgcttgagcccaggagttggaggctgaagtgagctatgatcactccattgcactccagcctgggggaaacagcaagaccctgtctctaaaaaaataaaatacaataaaattgcggctctttcttgtgcacttccctgcccgcccccctttcctgaacccttattattttctgccatactacaaattttatgcatctcattaaaccccttccgaacctgtgtactaaactgcctgggggcagctctcatcactgctgtagaacaaagtcccacatagagccaatggccaagaaacagttaataaaataacagacgatggtcctggcctctactgtgagtgagtaaagggcttgccctgcagagattcagtgatctggcgggggttgctgagctatgaggaagttcagatctggctgcaggggtgaggctgtgactcagtcaatcactgcccatgctcacaggacactggccagcttagtccctgggggcaaggattttaccccccccccacctccatttcctcatctctaagatgtgaataatcgtcgcccctgcctcacaggattgagctgtgtaacccccctcccaccttttttctatgccatccactgcgggtctggggctttttactggaatgcaatacaaagtctgagtcaagggtgccttctgttggttgctgagggcggaggcagagctagttgcctgtggtcctgccagtcaaggggcttccagaggagggaggaggggcctgtggccctagcatgtgagcagcttctcctctgcctggaagccggacgcctcagcttctcccacactcccacctgcccgcttgcctctgaattcacacaattcttggaaggcttgggagactcacctttactcaaatggttacctgtctcgtgtctcgtgcccagcttgaccttttttttttttttttttttttttgagttggagtcttgctgcgtcacccaggctagagtgcagtggcgtgatctcagctcactgcaatctccgcctcccgggttcaagcaattctcctgcctcagcctccccagtagctgggattacaggtgcccaccaccgtgcctggctaattttcgtatttttagtagagacagggtttcaccatgttggccaagctggtcttgaactcctgacctcgtgatctgcccaccttggcctcccaaagtgctgggattacaggcgtgagccaccatgcctggccccagcttgaccttgaactttaaatagtgaagacaaagaatgaggagggtggggggatgccctccttccacagggccctgtggcttccaagcctcaacctcctctggtctcttgtctgtggagcctccttcaaacccagggaaacaaaagcacctgccacgggctgctgtttttctaggatcttctagcgaagctctgtaacttcccctgagagccatgaaactgggctggctcccagggtgatgggactccagcgtctttgttctttcttgttctatgcatccatgctctgctccaccgctgccccttcaactctgcccacacatattactccagactggccctgtggtcagagcctggaatgcctgggctgctgggggcttgcatgcaggctgcactggactagaagcattggcgccttcaagactgccctgggaaacatgacctgccctgtttctgtctagtgagtacccatttttccccactcaccggctcacttcccttggctgggtcaattagaaaaagctcttctgttggcctgccctgcagggtggagttcagagggcagctcaagagcccggtgacagctcaaaaaataaaaaaagccgccaggagcagtggctaatgcctgtaatcccagcactttgggaggccgaggcaggcggatcacctgaggtcaggtgttcaagaccagcctgaccaacatggtgaaaccccgcctctactaaaaatacaaaaattagccgggtgtggtggcggatgcctgtaatcccagctactcaagaggctgaggcaggagaattgcttgaacccaggaggtggaggttacagtgagccgagatcctgccactgtactccagcctgggcgacagatcacgactccatctcaa

SEQ ID NO: 1886531 - DNA, 4001 bp, Homo sapiens
ctggggccgtggctggggaaggacggggtgcttggggaatgcagtgggtatggggatgtcggaggacactcgggttgtgcaggagcctcaccagggatgtgggtgggggacgctgtctttcgtttcacagccccagggaggcttctgatgtctcagccttgaaccctaattggggggctcctagtgtcagtgtgggaagctgagggtcccagtcagaggtgaacccctcacttctggcccctcactcccatgaccatgggctccagctcataggtgtgtgtgaggggtgtcctgaggtggtgtggggcagacatgctctcccagatgggctccccggagcttggggcagggtggggcctgcaggctgtggctcccagtgtcacttccctgcagcagccacagtcagactctccggccctgcacctgtcctgttgttggggaccctgacccttcgcagacccaggtgggggcatccgggaattcaggggagcacctggtgacagaggacaccttgggggcagcagccatttccctgggaggtgcggccagtctacccactgcctggagcccgcaccgtctctcctcaggggtcatgggaccaccctgtgcatccacctccttcacagccacagctgccagtagattaacggggcgtgtgtgctgctcttggggtggtcccggcccggcccggccctgccctccccaccaagtgcccagggccgccctgcccgcctgtgccctgccctgtagatgctgccacctccctttcctgggggagcattttgtcttgtgtgaggacggggtcattcccatggtcaccacctgtgaccctcccctgcctgcagagggaacagagctgggcctgggcttatccatgtcgggtgcccctgggggacctgggggctcgtggcctcccctgcacacagggctcctcctggcggggcctccgaacaccctcatttaggtgtcgctgcacgtggctcccaggtgtggacgtccccactctggcgagggctccttccttctggggtcgtttgtggaatgtggcctgggtccatggctctgggagggaacagcccaagggtggggacccctggctggggaggaggccccgcagagaggcccagactgtatcccgatgcatctggcgtggccgcggtccccctccagcgccgacgtttgtaaattctgaaaggagccatgctgtggctgagggagccaagcccgtgactgaaaaatcctccaaacattcattcaaaaatacaagtgtgatcgccagaaacgcttttgtacatttacacaaaacattcatacaggccatggcggaggctcctgtctaggactggcaaggcgcccgggagccgccggtcacccttgtgcctacacagaccctttccagaaagatgcaggccctggaactgaggccgggtcaagtcgggaatggcaagtgccagagggtgtcagtgtgggaacctgtcctgttcacgagcggccctacatgtcccccgggcacagagctctaggcaggtccagccacgaacccacagcggcaatcaacacgcttctgtgaataaataaaaatttatcattccatgcaaacacactcattttccacaaaagacaacagtttttacacaagcggcggtgtcccagtggtggccgtggcacgtgtggagcggccccgcagcggcgttctcatgggtggcgtcacagtggctccaggtcctcatccccgcatgcatactcgtacaggtccacggcgcccaggggtgagggcacctcgaagaagggcctctgggccagcggggactgcagcgcactcagcttctgctccacaggtctgagctcggcctcgaacctgcaacgaggggatggtgaagacgtggacagcggcgtggagcaggccctgggccctgttttccgagaaatgcaggctgctccgcagccaacctccagcacgagaaagtcccctgagccgaccttgagctccagccgctgaccccgcaacaggctcctggctgagaaagccggctccaccaacgctcccgggggaggggccagcggtgcaggtgaaaacccacccaggacgggacggagccccaggcatgaggtgcacagagaggaaccgggcgggctcatcttttccccaaagcgacacgacggtgactctcagagggcagcctctgagctgcaaggggcctgtgtttacacaactgggtcatggtgtctacacaggattggagaacaaacgggaccacagtttggacaaattctcccaaagcacagaagctcctagtggaggccaccacttccattctgaccagaacacacagcagtgcgaggactggacgcgcaccttccgttaaggtctcggcagtgacatcgggcgctactccggggaaaccagcgcggccaccgacaacacagtctcatagagatcctgcagggacacctctgctttccaagatgccccccacagcctggcactgagctcccactgccggagcaggcatggacacggtgaaggcagtcaaccccagtgtggtgctggccactggtcaggtgtggagcagaggtgacagacggtggtggggacaggtgcatacccatccaggctatgtctgggggacacagctgcctcagggtgtctggcaggagaaggcagactgggaagttctgggggagtggggacccagaggtgggctgccaggtcagagccactgtgcaaataactgatcacaaggaggacagacacacaggacagatggcccagggtaagaaatttcctcaggaaaggctctggtagaggaatcacagttagatgaaccaaagcttcaaattctacattttcatacatatatatatatatatatatatacacacacacatatacacaactttagcaataaaaaacaagtagactttaatactcgtatactttataattcattttggaactgcctcattctccctttagctggtcactgtgcacctcgtgttctcagtctctccaccaaaaaaaaaatttcctcaggaaaggctctgagagaggaatcgtagttagatgaactaaagcttcaaattctacatatatatatatatatatttagcagtaaaaacaagtagactttaatactcttatactttataattcatttaggaaaagaaggaacacctttgcagctactcctgctaagttaccaagagttttttcaatactaatcttcacaattcatattcaaatactaagaatccctaatcccttttaaaatacatttgtatttccaataatttgatataggctctcaaaaagtcattacattttgagggtaaaatcgaaacaacctaaacattaatgccaagtaatgaatataatagttcacacatattaaacagttaattcatatgtgtaatacattgttacatatatacttatacacaaaaacaaacatgtatgtgtataaaatctcaacaaatccgataagaattattagaactagtaattagacactgttgttctacttctgtaacccatgatcttaaaccattatagaataaaccttaaaagcaatcattattttcaaagacaattttgaaacttgccttgtgcgagttagtaaataactgtgctccttggtttcctcatctgttacatgggtagaacctacactgttacataaagattagagcagttaatagatagaatattttagtatttatagatctagaatataaaaaggaattaataagttttaaggagaaaaaataagggaaaaatagtctcattttcaagcctactaaacataaaatgtttcttacatttaatttatacatgcagggtaggtcactatactaaaaataaagcacatttaatttgaaattttagaaagggtagattgttcttatttagagaattgcaatacattttaatttgtgagcaggaggtcatggtgttatttagaaacagtgacaagaaactttttttggctattataaatgga

SEQ ID NO: 1886532 - DNA, 4001 bp, Homo sapiens
tggctagggaaggacggggtgcttggggaatgcagtgggtatggggatgtcggaggacactcaggctgtgcaggagcctcaccagggatgtgggtgggggacgctgtctttcgtttcacagccccagggaggcttctgatgtctcagccttgaaccctaattggggggctcctagtgtcagtgtgggaagctgagggtcccagtcagaggtgaacccctcacttctggcccctcactcccatgaccatgggctccagctcataggtgtgtgtgaggggtgtcctgaggtggtgtggggcagacatgctctcccagatgggctccccggagcttggggcagggtggggcctgcaggctgtggctcccagtgtcacttccctgcagcagccacagtcagactctccggccctgcacctgtcctgttgttggggaccctgacccttcgcagacccaggtgggggcatccgggaattcaggggagcacctggtgacagaggacaccttgggggcagcagccatttccctgggaggtgcggccagtctacccactgcctggagcccgcaccgtctctcctcaggggtcatgggaccaccctgtgcatccacctccttcacagccacagctgccagtagattaacggggcgtgtgtgctgctcttggggtggtcccggcccggcccggccctgccctccccaccaagtgcccagggccgccctgcccgcctgtgccctgccctgtagatgctgccacctccctttcctgggggagcattttgtcttgtgtgaggacggggtcattcccatggtcaccacctgtgaccctcccctgcttgcagagggaacagagctgggcctgggcttatccatgtcgggtgcccctgggggacctgggggctcgtggcctcccctgcacacagggctcctcctggcggggcctccgaaccccctcatttaggtgtcgctgcacgtggctcccaggtgtggacgtccccactctggcgagggctccttccttctggggtcgtttgtggaatgtggcctgggtccatggctctgggagggaacagcccaagggtggggacccctggctggggaggaggccccgcagagaggcccagactgtatcccgatgcatctggcgtggccgcggtccccctccagcgccgacgtttgtaaattctgaaaggagccatgctgtggctgagggagccaagcccgtgactgaaaaatcctccaaacattcattcaaaaatacaagtgtgatcgccagaaacgcttttgtacatttacacaaaacattcatacaggccatggcggaggctcctgtctaggactggcaaggcgcccgggagccgccggtcacccttgtgcctacacagaccctttccagaaagatgcaggccctggaactgaggccgagtcaagtcgggaatggcaagtgccggagggtgtcagtcagaacagtgtcagaacctgtcctgttcacgagcggccctacatgtcccccgggcacagagctctaggcaggtccagccacgaacccacagcggcaatcaacacgcttctgtgaataaataaaaatttatcattccatgcaaacacactcattttccacaaaagacaacagtttttacacaagcggcggtgtcccagtggtggccgtggcacgtgtggagcggccccgcagcggcgttctcatgggtggcgtcacagtggctccaggtcctcatccccgcatgcatactcgtacaggtccacggcgcccaggggtgagggcacctcgaagaagggcctctgggccagcggggactgcagcgcactcagcttctgctccacaggtctgagctcggcctcgaacctgcaacgaggggatggtgaagacgtggacagcggcgtggagcaggccctgggccctgttttccgagaaatgcaggctgctccgcagccaacctccagcacgagaaagtcccctgagccgaccttgagctccagccgctgaccccgcaacaggctcctggctgagaaagccggctccaccaacgctcccgggggaggggccagcggtgcaggtgaaaacccacccaggacgggacggagccccaggcatgaggtgcacagagaggaaccgggcgggctcatcttttccccaaagcgacacgacggtgactctcagagggcagcctctgagctgcaaggggcctgtgtttacacaactgggtcatggtgtctacacaggattggagaacaaacgggaccacggtttggacaaattctcccaaagcacagaagctcctagtggaggccaccacttccattctgaccagaacacacagcagtgcgaggactggacgcgcaccttccgttaaggtctcggcagtgacatcgggcgctactccggggaaaccagcgcggccaccgacaacacagtctcatagagatcctgcagggacacctctgctttccaagatgccccccacagcctggcactgagctcccactgccggagcaggcatggacacggtgaaggcagtcaaccccagtgtggtgctggccactggtcaggtgtggagcagaggtgacagacggtggtggggacaggtgcatacccatccaggctatgtctgggggacacagctgcctcagggtgtctggcaggagaaggcagactgggaagttctgggggagtggggacccagaggtgggctgccaggtcagagccactgtgcaaataactgatcacaaggaggacagacacacaggacagatggcccagggtaagaaatttcctcaggaaaggctctggtagaggaatcacagttagatgaaccaaagcttcaaattctacattttcatacatatatatatatatatatatatatatacacacacatatacacaactttagcaataaaaaacaagtagactttaatactcgtatactttataattcattttggaactgcctcattctccctttagctggtcactgtgcacctcgtgttctcagtctctccaccaaaaaaaaaatttcctcaggaaaggctctgagagaggaatcgtagttagatgaactaaagcttcaaattctacatatatatatatatatttagcagtaaaaacaagtagactttaatactcttatactttataattcatttaggaaaagaaggaacacctttgcagctactcctgctaagttaccaagagttttttcaatactaatcttcacaattcatattcaaatactaagaatccctaatccctttaaaaatacatttgtatttccaataatttgatataggctctcaaaaagtcattacattttgagggtaaaatcgaaacaacctaaacattaatgccaagtaatgaatataatagttcacacatattaaacagttaattcatatgtgtaatacattgttacatatatacttatacacaaaaacaaacatgtatgtgtataaaatctcaacaaatccgataagaattattagaactagtaattagacactgttgttctacttctgtaacccatgatcttaaaccattatagaataaaccttaaaagcaatcattattttcaaagacaattttgaaacttgccttgtgcgagttagtaaataactgtgctccttggtttcctcatctgttacatgggtagaacctacactgttacataaagattagagcagttaatagatagaatattttagtatttatagatctagaatataaaaaggaattaataagttttaaggagaaaaaataagggaaaaatagtctcattttcaagcctactaaacataaaatgtttcttacatttaatttatacatgcagggtaggtcactatactaaaaataaagcacatttaatttgaaattttagaaagggtagattgttcttatttagagaattgcaatacattttaatttgtgagcaggaggtcatggtgttatttagaaacagtgacaagaaactttttttggctattataaatgga

SEQ ID NO: 1886533 - DNA, 4001 bp, Homo sapiens
cacatccagcaacagggacatgggctggggacagtggctgcctctggggtgggaaggggctcttcctcactgttggtattgctgggggactgtgtagcttttgtcactagagcatatgtggcttgaagactgtatgtggaactgtggcaggtttggaaggaagcaaagctgaagcaggctgtcgtgttacgtagaatttgcatcagaaacagagagggaagagcgcgcggcctccaccagcactaaaacacggaaaacagtagatgagcagggaggttgggctgtccaaggcaagtggccgaggggcgggcggcacccaccgtctggttggtggcctcctccttgcggccggccttccacacggtgaggctgaaggtgtactccacgccagccgccagccgttcccgtggaatggtgaccgtgctgctcccgcggggcccaaagttcagcgcacacccgccagcctccctctgcaggccgagaacaaggggcgacgtggcccgagaaccccatccagttttaaagcagagcccggcccaggagacagcgcgggagaccccctccccatgctgggacggggcccaccaggcactgaggacgggccagccctggtggcaagctgggtgttctctgggctcatgggtgtggacgggtgaggggcatggaggacggccctgccacgcactgacctgtgtcgaagccacacaggcccactggaaactgagcggcgtctggtcgccatcctccaggttggggtcgtaggactcgctcccatccagcaccaggtcctgtgtgtctgaccacacgcggtatgagccaccctcagtgatgggcaccaggcgctcaggggccaccgtcacattggcctggatgctccgtgccagtggcgtgtccccaaatgacacgacaaacacaaagcagtagtgccccacaggcagcgccagccgcggcagcaccagctgaggccggctcacgtccacgccgggcagggccacacgcgccgggcaccccggctggtgggcccgagccagatgcagtgctcggctgtggctgggtgtggctccccgggcagccagttctggcagctctccaggctgaaggcctcgccctgcggcgctgggcccacctccacccgctgcacagtcgagaagccgatccacacgtctaggctcctgggggcgggtgtgggatgccagggggctcagggcactcctccatcctcccaccctcacagcagcccgctgggagccccatcactgtccccctttccagatggggaaactgaggctcagagcctggagagcagggcccaccaccccaggctcacagcagcacccacccacggggcctgtgggcaccggcagggatccccgcgcaggccacctcccgtatggcgtgcccaggagtgtccggaggctgcccccagctcgcgtccacctctgcatctgcagagctgacaggaacggccccaccggccggcgccacctgctcaccagggccggcccagctcccacctccctcctcctgagactccccagccgcaggctctgccccactgcttcagagatctcccaacctatggcccctcggggggtgggggcaggcacctggtgacccgggagaccaggaagcgctgcacggcgggactgtccaccattgccagggcggccccggcccaggcccgacactgctcctgcgcctgcagccaggccgccttctccaccaccaggcggtagcagtgcccgttgccagagaagatctccgtgtccgaggggcagagcgggtgcaccgctggagaccggtgggaatgagggtgtcaacggtcagtgtgggcccaagacgggggtaccaggctctgccccatctggatggccctggggaggaaggggagtgggcagcagacactcacctcgggccggctcctcgcccagggccacgatgctgtaggcagcctccaggcctgaaccaccgcggttctggatgctgaggtcgaggctctcgtcactctgcaccgaggacgggcacacgagctccagggcggcaggtgccgcttccacctgcacgtctgtccccagcagggctgagccggcccccagggccagcacggccgtcacgtgatagcgcccaggcagcacatagcgatgcgaggcagccggcccagcggcatccacctcgggggagccgtctccgaagtcccagcgtgtggcagtgacagggagcggggcagcgatgtggaaggctgctagctggccggaggccaggggtccgtggggccccaccaggggggcccctggggaggcagggaagacgtgctggaggagggtggggcccctacaggtgggggcaggaggcggcggggggccggagcagagggacaggcaggcgaaggaggcactagagggctgggccgccccacacaggcaccagccctgctccgagagggctgcgaggccctggccggtggagaagcagaaggcgctgcaggcctctggctgaagcaggccttcgtgggcagctgaaaaggacactgctgccacggtgcctgagctgttgtcagggaggcaggcgacatactcctcacctagaagaggcagccactggaccccgggttctgctcctcctggctccaccccacacacccccatccgcccgccgcactcacaggctcccatgctgttcccttggcccggagcccccccccagagaggccttcctgagccctgcccagtgtctgcagggcccaggtcccacctggctgggaaggacagagctggccccacccaccggcactcaccacagccactgtccagcaaggggatgccaagcagaggctggccagccagggagtcaggcccagcacacgtggctgcctcgggctgcaccacccgcacctgctgctcctccgcccatcgcggcagccacgccaggccacagtcacactcaaacgggttcccactcaggtttctgcggggcaggggcaggtgttggggaccaggtctggtgggaagggtctatgccagccccccactggcaaccaggccctggagccaccctgacagcaccgcctcccctgccccaaccaagccggcactggggggctccaagcaggtagtgaactgcccccaggatctggtctcaagcctggaaggggacacagaccaactgggagggcagaagggatactgggggcctggggtccagccaggaccccacccaaagaaccacaacttacatttcacttaaattaaataaattagcaaatattccttcttctaacgtagaaatcttgttgttgcttatatccctggaagagaggggggattcggcaaagctgacggaagcccccacagctgagcagcaagaggcggtgccgccagcccacccggagtgagccccgcatgctggcacgactgggggacactcacagctctgccagcgccgagaggttcgccaggagcccaacgtccagcgcccggagcaggttgtgggagacgtctctgaggagtgagtggccgtgggtcagggccagagcccttagtaggccagaggccatccctgggcccatcccacacattgccagcatccccaagctatggcctcccacccttgagctccccactcccagaggtcaggaggggcctttctgatggaagacccaaatgaacactcatctggggaaaccaagccgggagaggcctgggggcctcagccctctgcacccatctcagccctatgccgagtgccacctggacctgtccacccagggccaggaagggcacggacccccaacccatcccacgcagggccaaggccccccatcccctgtccacagtcccccacagagccaaggtctcccaaccctgtccacagcccccacacagactcgaggggcccccatctcctgttctgaacccaacagggtggtcccactgtgggaccacaaccaggtatgactgtgtgagaagcaggctcactaccaggctaccagggagcacagggga

SEQ ID NO: 1886534 - DNA, 4001 bp, Homo sapiens
ggtgggatagatagagacacaggtgataaagaaaatatagcaaaatgtgaatcctacaatctgggtggtggatgtaaaccctgtagtagcctcacctggggaaagctgccttgcaacaatgaggctgcccattctccaaacccaccccagccaccgagcaggctccactaaaaagtctgaacccaggagggagtaccatggaaaccaagttgcaatgccctggttaggggcccagcagaggggtcatcccagctctacgccattggatactgagtttcaggagtgggagtgccatcctcagggtcacacagcgtgtcggttccagcctaggtcttccagtgtctcattaatcttttatccactcagcttctcttctggcccatgaaccttgctctcctgggactcttttttttttttttgaggggtcgggggtgggacagagtctcgctctgttgcccaggatggagtgcagtggtgccatcttgcttcactgcaacctccgcctcccagattcaagcaattctcctgcctcagcctaccgagtagctgggactacaggcacccaccaccctgcccagataatttttgtatttttagtagagacaggatttcaccatgttggccaggctggtctcgagctcctgacctcaagtgatccgcctgccttggcctcccaaagttctgggattacaggcgtgagccatcacacccggcctgggactcttcttgcagtgagccagggccatgggacccttcaaaagttgctccaccctaatccccaaaatatctttttctcccgcctgtcccaagtgcctggcatcatactatatgggtcaactggccatgtttgccatggaagcccaattgtaggaagtgggtcttttatcacccggcatagcagagctgtggaaactgcactgggaaagatcaggatgtgaattaaagcgttgggaatgggaaggcagagaccttggattagctgggatgctccatgcactcgctgagtgaccttggacaagccccttagacacactaagcccgtttcctcatctacacgacgggcatcccatctgctactgcaccaggttcttgtggcaataacttgaactcacacatgcaaacaggctttgtgagctccataaacacaggtggctcggccaggtgtggtggctcatgcctgcaaccccagcactttgggaggccaaggtgggaagatcccttgagcccaggagttggagaccagcctgggcaagacgatgaaatcctgtctctaccaaaaaaaataataataattagccaggcatggtggcacacacctggtcccagctccttgggaggctgaggtgggaggatcacttgggcccaagaggtcaaggctgcagtgagctgagattataacactccaacctgagtggcagagtgaaactgtctaaaaaataaaaataaaaatacatcaaaaaacaggtagctattaagcattgctaggacccacacgcagtgaccctgagggtgctgggtttctgtttgagggagaagaaactcctgagcccctaggtattgtgggggacatgcagttccagaccgccttcatggcctgtatgcctggcctcatccccatccctggcacccatgacgatagccacattccactggtgtttccccaggaaagccaaccctacctgcatctcagcagagcttccacggagttggaaccccgctccgagagggtgtgggctcaggggccaggggtcacacaaactccagaaggaggacgtagttggtttgcaaggctgtcctttgccctggttgaataacctttggtcttccccgagaggaacgtgggcattaggctgcagcccacaggaagctatgtattttctgagaaacttggcccatggtgcagatctgctccagctcactctggtgggatcacgccagccacggccgggccacggcacatcatggcaacgtgctgcccacctgctacgccacctgtttttctagaggcggacgtgatcccagcaggactggagtcagcccagggcatcacgtgctctggtccccgcctgctttgactcctcctgcctcactccccccctggcctgtagtcacgttggtgagggtggtgggcaccggggctgggcccagcccccgaccctgcccagacagactttcctaaggcacccttttcctcgtgcaggtgcggcctcagcccacccccctttgagcccacagattgcacccctctggtgtgcggttacctcttgcctatgtttaattcatggctggggggttgggacgagcttcccaagaaaggaaagaactcccctggggtcttgcccagtttctgctcaccagaaggaccatagccgaggtcctcctcccagggcccggggctggggagcggaagccatcagtgggctcggaggacactgtcccagccaggacacggccatcggtcactaatctgcagcactggaatgtccgcaggccaatcagcggggtctctgggggctccccaagggtgctaataatcccacaatgattagcaggggccgcgggtcagtgcacgccactctgcctgctgtcgggggcgggctggccaggccgaggccggagcaggcaggcatcccccggagttgtctcttttcatgccagcgccaacaggaggctgtctggacacactgattactcactcaccagcctccctcttttgtccaccagcccagcctgactcctggagattgtgaatagctccatccagcctgagaaacaagccgggtggctgagccaggctgtgcacggagtgcctgacgggcccaacagacccatgctgcatccagagacctcccctggccgggggcatctcctggctgtgctcctggccctccttggcaccgcctgggcagaggtgtggccaccccagctgcaggagcaggctccgatggccggaggtaagggacacctggtgaggaggtaggtggaggcaccattatgagctctgaggagtgggtgctaggagacttctggaagcccggtcccaggcctgagccccaggccgtgcgggtggtttaatgaggaagccctgggacagcccgggggcggtgaggggtggatgctggactggggaggaaggaggaggaaggaggaccagggctggggtcaaggaggaacgccgaggagcgctgtggctggggcctggagaaatccgtggcccggaggagccccagacaggggcctgcgggagccagggctggcccctacacccagcccgcaccgctgttccctcccgccaccccaaccccagcactcagcccacgcctgctgtacctggtctctctctcagcctcgctccattgctatgccccacgtcccctgcacccaccacactcctctcccatcttgttttccaagggcagggacacatgcttattctgccgtgtgttgggttcaggtccccccatcctcgggctgcctgaccttctctctccaccccagccctgaacaggaaggagagtttcttgctcctctccctgcacaaccgcctgcgcagctgggtccagccccctgcggctgacatgcggaggctggtgagtacccgacccagctgggctctgccaggggggtggccggaggcgcggaccccagagggcggctcaggaggccacgcctgtccaggtgcccttccacttgaccagggtgggcaggcacagccagccaccttgcccctgagggacggaggccctggttgctgggggtctctgcagtttcttaaccccccaccctcagttcaggaggtcgggccccttggctcccactcgcctgaagggcaggaccttgggccttccctggcatcttgttgccacagagaccaggagccacaggaggagccggatcccctcctccagggaaggggagcttcacgaggagccctgcaggatgggcggccgggccagggagggagaaggtcgtgctgggctggggaggggcttctgtgcggc

SEQ ID NO: 1886535 - DNA, 4001 bp, Homo sapiens
caccctcacccccaacaggactcggccaatatttgagaaacaaatggatgagtgaagggacgtaggccttctctgccatgctgggtttgaggaggccagggaccagaacccctgcccacgcccccctgagccccttcgtctaccggcctccccaggctctcctggagacatgttacccagtcacgtgcagaagagatgacgcttttaaacaaaacaaacatgctttcaagtggcctggggacatggtggctcacacctgtagtccctgtcacgtggcctggtgttggcggaggtttcagcaggtggcattgaagggagccacagacggatggacagagggctgggcaagcaagcaaaaccaccagcctgggtcacagctctgctgaggtccgagaagtcctctctgcaccgtgtctgtctcaaaagtgtctgcaatccatcagcgtcaggggagctaggggcctgccactggtggctgcaggcttggctctctctgttgaaatgctgtggacactgggcatggtggctcatgcctgtagtcccagcacttttggaggctgagagggggaggatctcttgaacccaggatttcaagaccagcctgggctacatagtgagatcctgtctctaccaaaaaaaaaaaaaaaaaaggaagaagaaggagagatagagagagaaaattagccaggcctggtggcgcatgcctgtggtcccagctaccggggaggctgaagtgggaggatcacctaagcccgggaggggaggctgcagtgaactgagattacatcactgcactccggcctgggtgaaagagggagaccttgactaaacaacgacaacaactaaaaggatgcaacccatgacgtgggcggggggtgggcaagagcacagctccccccaccaaccccatctttagaagcggacagactgggcttttccaaaaccacatcatttgttcaggctcttgcctttcaaagggacatcttcagaaggcggtcttcaagcaggaaagagaaaatgttgtgggaaggagaggcaaggagagaacaggaaagaaaagagaaggaagggatggagagagagagaggaaagaaagaaagaaaaagaaagaaaggtagggagggagggaggaaggagagaagaggggaaaagggagggagagagaaaagggagaaggaagaaaatgaaagaaggaaggagggaggaaagaaagacagagagagagagagaccaaccgaaagccagagagacgggagaggaaggaaaaagcagagaaagaaagaagaaaaagagaaaggcaggaggggcaaggggaagaatgagcatgcacatcagccctcaatcagaggagccccagccccctgtccctaagccaccccagaggcccccgtctccccttggcagaccaggcttgctggtgggaccccacccaccgcccaggcccgccccgctcctggacacggcggttacacaacggcctctgtggacaccgtccagaagctggaggtcacatggggcagcttcgcccgggactgggaggcgcttcccagacccaggccacccctcctgcccggcgagcttggccgggagtcagctctccagcgcactggccagagtgttcccagatgtgcaccgcgggtgataaaaggcgcactggttcctgtcagcagcagggaactccaggaggggacccccagcagccggccggggcagatgtttgcaacgtgtgcgctggcggcagggaggggaagccagaggcaccgggatggcctggctggctcgcaaggggaccacacaggggtgtcgccacaccccctctcctgggacgcacatcagacaggatggggtcaggtgcagttaggaggagacaccctgcccttcccacctggctgctcactccaccgtggactgccctgggagtggcatccggtttggggttacctgggcctctactgcctgccctggaactgcatcccggcttggaaatgggctgctcctccctctgcccctgagtttctggggatggtgccagtcccagtactttgcccttgacccttggtaacaggggaagcatgtaacccagtcccgaccaatcacagtttcccattcccctggccactgtgattggtgcagggatgggcacgggacctgaacaggaccaatggagtccttccctgagaatgaagaatgttccctcctgagtctcagaccgtgcgaggagcgattccggaaggtcgctcgtggccactggactcttctgcagaccaggagatcgggatctggaatggggcttggagttgagctcatgcagcaagctaggggcagggtgagtttaggagaagaatcagccaggctcctggccggctgggaggggctccggcagtcccagcagcgtgggcgaggagaagggagtggagcagccactctgggcgacccagtgaccttgaacatttgagccccgtgaaatcggggcagctggatgaggagtgcagaggcagctggggctgcgcacagagcacggggagggactgcccccgctgggtcctcagagagaggccgctttctgctttaaaatgcaggcagaggccaattaaaccaaagtaccgaggtgcctcccggcagagatggccgcaggaagggggttaaacaagggcacagctgactggccagcttgggacaggaagtggggcccagctgaggccaggccagggaggaaatgcaggactctctccctcaaccctcaaactgaccttttcagatcacccaaatcttcttcctttttttcctaatatgtctgagcgccaagcagccctgtgatttgtggtcgtggtttctgtgtctcaggacagctgccgggggaggaactatgttttgctcactgtacagatgaggaaactgagggtcacagtggtgatgcagctgctgataactgacagggctgaggctgaaatcaggcccttctgacccccaggccagggctctttctgtcttttttatttttcttttagagacaggatctcactctgtcgcacaggctggagtccagtggtgcgatcactgctcactgcagcctctacctctcaggctcaagtgatcctcccacctcagcctcccaagtagctgggactacaggcatgcaccagcacacctggctaatttttttaacgtttttgtagtgatagggtctcactatgttgcccaggctggtctcaaactcctgggctcaagtgatcctcccacctctgcctcccaaagtgctgggaatgccagatgtgagtgccgtgctgggcctttccagagctctttccttgacagctctgtggctcccactgacagggctctgccagggagctgaggagctgcctctctgtcccttcgccctatgctggggtgactcacagatgccctggtctcgtggtggcctgactatggcctccccactctctgctcccatctcctctctcacagagcccagctgtgagtggatatctgtccaccatgtatagctggtgaccacacacacacacacacacaccacagtctgtcctggagaaacttcagaaggaagggacatcacagctttgagcctctgctcctggaactgctatttgggccaagtcccttctgactttctggcccatccagggcattttgctggatagtttggagccgtagctgagggaagggctgtcctctctgattccagcacttcccagtgcttcctccaggtgtgagggtcacaggtacagcttcagggaggggctggagcccaccaagccctgtggtgtctgcagcggggggatggcagtggctgtccctgttgaaggcagatatgcctgggctcaagccttgccctgccttccccccggtacactcagttgtgtgaccctgtcaagtcgcgtaacctctgagagcctcagtttccccatctgtgaagtggagataatgatgcccttaggactgctgagtgactggtggaccgttgcctgtaggctgttata

SEQ ID NO: 1886536 - DNA, 4001 bp, Homo sapiens
gtggactcaacccagatgtccttgggtggactgatgcctgcttacccaacatgtggtctctccccaccgaggagtacgactcagccatagaggaatgagggcctcacccatgctgcggtgtgggccagcctggagaacgtcatggaagcagaaggagccagatgggaggaccacacatggccagctgcatccctgtgacatggcagagcaggtgggtctgcggagacgggggccctgggtggttgtccggggctggaggggatgggcagtcattgggtggcctttggggatgatgaaaacgctttggaagtaaacagagggcatagtacagcatgcgcctcatgccacctacagtgtcatactttaaaacattaatttgatgtgcagtgagtttcacctcaatttaaaaaacaggaagagaagtaccagaggatgagaattgtttactccctgtgtgctctgtgcatgtgagatgaatgtcacactccacacacacttgcagactcccagccgggtgccgttcctgcccttctggggttgacgacctgtacaaagcccccaaaagaatgggatggtgtcccggcagcctggggcttcgaggggggagggcgtcgcccgggtggaccctgccccacccacatgttctcgaggtcagacccctcacttaggggtggccgagggtgcaccaactggcagcctgggtctctgtgttccgaccacagcgctggggccctttctagaagcttcctggaagcgagagccagtttttgtgtaggcgcggggaacgcagtccagaggccccgtaaggacgggcacatctccctcccattgcctcagtggctgcacctgcttcagggtagcaaagggggctgctggagtgctcgggctgtgggaggtgcccgtcagaaggcgagcgtgaaaacagcagtgtgtgtggaagcaatggaaggggggtctggggaaaatgagggggcggtcaggacgggcttctgaaacagtttttaaatgtctgttttctgattataaaggcaatgtatgctcattgtagcaaactgcaaaaatacaggaaagtagaaagtgggaaaaggtgctgcgaatctgccgtccagacctaaccgagaaggcatggcatgttgccgccctcagggcatgtgccgatggctcctcctgggcccacgcctcctcctgcgcccaccctcacatctccccatctggcatgaagcctctcagtagctatttgtgggctaaattttggccatgattaaattcctgtgactcggcttccctggaagctcataagagcccaggacgccttaagtggatggaacggcgactcggggctcaggggaaggcaggcagaatcactgatgcacctgcactccacctggcagtagcctgcctcagtggcagcagctcagttttgggtgctgtttatctcctacgaacgaggaaaccagggctctgaaagcaccaaggctggctaagggtccccacagggaattgaggagtgggctggaattcccccccaaccagtgccccttgctgagcctggagtggggtctgagtgttaaaatctccaggggaacccccactaagggtgacccccgcagagaccggagggcttgacatcccgaattccttggagcaggtgcacccctctgctgcctaggaggaaaaaagcccagtgggttagaaaacacccgctcacccttgcaaagccgcagcagcatccagggtcttggccgctcgttccagtttatggcgaaagccaggtgaagccaggaacagactctgtgcctctgaggcagccggacgcggctgttgacgcagaaggttgattttgtctggatctctcttgaccagacaaggtagggttaagtgtgtgaagggggagaagggaatgcagaccgcctggaacttgaaacttcccagcccagagccagccagtgcgcagagacgcagccccaacgcgctgctgctgctgcggacacctggggcgtggagccggggcacggggcagctgtccctctgcagccacacaccacaggggatgggcgccggcagacacgcctgctcgctccagggtaagtgcagtgtgtggcgtctggggtggctctggtgttaaggaggtcagaagtgaagtgttttcacgcaggctggattcgatgcgattgggccatccggattgacgatggtgacgatcgcgatgccttcaggctcgcaaccgagggggtgcacgcaggggaacgtgccatccgggaacatctttcaggcaaaacaaagcattttgctttccagttgatgatagggagtgctgaacccaatgccaagagctcaaaggcgaattcgtttggtgggaagagtccgcctgcatctttgatctgatgtggttaggggcgtcctccccaattaatgatttctattagctgctggctttgtcttctctcctttttgtggcacgctccaggtgaccggcttatctctcagcgcccgggttgggatatgctgtggacagactcaattagctaaacatgttgttaaacgtgcatctcattacgcttttttttttttttgagaaaagaaaaacaaagtgtggaggcagaagggctgggtgccccggccacccaggggcaggacgagtttggggcttgcaagtccacagcgaatctgaggcaggcaccgtcaataacaaagtgcctttacgatatttataagaactaggctctcctcaatcctttcatttgaacacgtttcagagcagaccccttcctggcacttcggtgaggtgtctgtttcccattataaagctgggccatgaatgaaagtgacaatcgcagcttccaaacataaacttcctgaaactcctttagaaggttcctccatgacgtgtagacataaccagaaagccgtcacgctgggaggtcggccgcgggtgcgtcttggctccgtcaggatcctggtgagggtggcaggtcaggattgtaaactccaggaggggacttaagcgacggaacagggaagaaaagtggctgagcttagcgacaggccggcctcagaagtgacattcacccccccacccccgccccccgcccagtgtccttacgctttgtgcagaaatctggcgtgatctaagatattggtgcagaattcccatgtgctggtgatttatcacaccttccagtgtcctgagcaggaacgggacagagggcgtcggtggctttttggataaaaacaggcagggccatgccaggccaggcttggtggctcacgcctgtaatcccagcactttgggaggccaaggcgggtggatcacctgaggtcagaagttcgtagagcagcctggccaacatggtgaaaccccatctctactaaaaaaatacaaaatttagctgggtgtggtggcaggcacctgtaatcccagctactcaggaggctgaacctgggaggtggaggttgcagtgagccgagattgcaccattgcactccagcctgggggacaagagtgagacttcgtctcaaaaaacaaaacaaaacaaacaaaaacaaacaaacaaaagaacatgggcagggcttcttgcccagtgtgatggcttagggatgcagagcttcctggccacccttcggctctggtcccatccgtcctcacagcggtccaggggctaaatcacaaggtaccgacagccctcatcgtcctcccagacttcaaggagtgtttctttgcagacgccgtacttggattgggctgtgaaagaggagaaaccctccctggggtaggtgggggtggtgggtcacttgctaccaaggcgtccaccgcagggcccctgatcgccgcctccccgcctccatccgccgggacctggccccttggcctcgtgtctgtgcagcctctgtggtgacacgtggcagaatgcatgtgctcatggctttggttcctctggaaagggtgtcccaagatgagggtgttcaaagactcttcaaggacaggaatcgctctcctccaa

SEQ ID NO: 1886537 - DNA, 4001 bp, Homo sapiens
agggacttccgcccataagtttcccgtaagtttccccgggacagaggagacgcagctggatctcggggtgtggaggaagccaggcagtgtctgtagctggggccatcctggaccctgctgtgctccggctctctgggctcaggggtgacactgcccccacattcaggcaggccaccagctgcccctggcggccacagggggtcagtccaggtgggctcagaggagccccatcaggtatgggggtgccgtttttgttcagaagcccctgaccccccctgcaacacacatgaaaagaatattcgagaagtctgtttaaaacatcttgggcattcaaaacacacggacagacagacagacagacagacggacatgttagacaggaggggctgctggtgggggcggggtggtgctggccctcctgaggacctggggacagcaggtccctggagcctgacggtcagtcctggctctacggggagttgggcacagaggggtcagggggtggcgggcctgtctggggctccctcaggcctgtccctgacctggggaagtggggtcctgtcctgcccagccagcctgacactggttttgcgtcccatctccccacagtgacagaggagccaaccaggcactggctcaaggtgcagccgtaagagctcgggtgggctcaggactggcgggctcagggctggcggggtcagggctggtggcctggtggcccatcacacccgccagccccggcagggggcagtgtggctccagggatgccagtggaggcgggtgggggaagggcagcgggctcctccgattgctggagggtgttcagggcagagctgggaggggacgatgggctcttccctgcttccgtctccatgctggacatgcctgccccctccaggccggcccagcactgtcaccaagcgtggacgccttgacttcctgcccttggagccccaacccgggcagggatcagggaggccagcggccaggcatgccccaggggggggctgcaagtgtggtccatgcccaccaccctttccctggccctgagcactgggaaggtggggggcagctcacctgaggtctcacctggcgttggccctgagaccacccgagcctccccgatggctgaggcgaaggcacaagggtggccaggccagcagggactcctgaggtcgggccaggccccagcaaggctgaggctgagtgggcggagctggccacaggggtggggacgtgggacagcactgttgggggaaccagagagcagaggtcaccaggctgctcccgatgttcaggctttcacagggatccataagctgcaatggcccccagtcagcaccctccaaagacaggctgtggctggggatggggctggggctgacggtggagtggcccacaccccccaaggcccctagagtcctgaccatccccacgggtagtgccggagctcccagctgccttgtgagtcatgggggtgggagcctcatttggctgaacctcagaagggcaagtggggcatgagtggccttgtcctgccccagcccagaaagctgtggtcccggagagagtggctgtccagccccccacaccatgcgaacgctcccctccccagcagatcccacccatggcaggcccatctctacccagttccagacatctgtcctctcccccgctgcgtgggtctgtgtccccagcaaatcccacccatggcccatctctacccagttccggacgtctgtcctcttccctgctgcgtgggtctgtgtccccagcagatcccacccacggcaggcccgtctctacccagttccggacgtctgtcctctcccctgctgcgtgggtctgtgtccccagcagatcccacccacggcccatctctacccagttccggacgtctgtcctctcccctgctgcgtgggtctgtgtccccagcagatcgcacccacggcaggcccatctctacccagttccggacgtctgtcctctcctccactgcataggtctctgtccccagcaaatcccacccacggcccatctctacccagttccggacgtctgtcctctcccctgctgcgtgggtctgtgtccccagcagatcccacccacggcaggcccgtctctacccagttccggacgtctgtcctctcccctgctgcgtgggtctgtgtccccagcagatcccacccacggcaggcccgtctctacccagttccggacgtctgtcctctcccctgctgcgtgggtctgtgtccccagcagatcccacccacggcccatctctacccagttccggacgtctgtcctctcccctgctgcgtgggtctgtgtccccagcagatcccacccacggcaggcccgtctctacccagttccggacgtctgtcctctcccctgctgcgtgggtctgtgtccccagcagatcccacccacggcccatctctacccagttccggacgtctgtcctctcctccactgcataggtctctgtccccagcaaatcccacccacggcccatctctacccagttccggacgtctgtcctctcccccgctgcgtgggtgtctctgtccctccctcagtgccccaggcctctgtcctttatccccataacccaacactgtgacaggagggagggaggagggtggaagagggagcaggaaggggccgcagaggggaggaggggctccgcatgctctggggccctggaaggaaggtcgtgtgacggggtcctcctgagcatgctgggcccatggtagggtgggcatggggagcacagggcagtgcccccaaaacctgtcctccccgtcagccacaggcactgagcaccccggagagggcagtgagaactgctggctgcccagggagggcgggcgggggtgctgtcctttgcaaggacaggagcttctgggtagggagaagggcacggggtagggatgggagttaaagggaccccggctgcatctatagtccaggggctgcctcatccccagtgtccctgaaggtagcctgtgccatgggacagtggcagtgccctggccacccagcctggctcttggagctgggtggtgcccagactggaggaggccagggtggctgcctcctgaccaccatcttactgttcctaccatcccgtctcctgggtggtggttggcacctgtggagggcagggctgcctcaggagctggcagctctcagttctgatccctggacatgaagaaacttggggtaaggcccccagtcctcagagagaccctttgagcttccggcttcgtcatcggaggagcccagcattgccctgggtcattccacaccctgccctttgggggggccggccagggccacggctgggagatgacggtcccatctgctagaagcttctggaaggatgggccgcctggtggcaggcgcttctgggccagagctgggtgggagggagggcagaggccagggggcgtgtgctggacacggagggcaccaggtcctctccgctgcctcctgctcttcccagcacagctgtgcttggcacccctgcaatcggggcagagaggaaggggttaggggtccctgagtcagctcaggcagccccgcccctccccacctcctccatcgtctttcaatcaatatcaagtggacgggagacaaatttgggagcaaagaatcccaagcagccgtataaatcacagtaacgaccattcagattaaatcagtcgctgtaatagaatcaatttagctgacgctgccagtctccccgcgtttaatctccgtctccagctgctggtgggagagaggctgttcagcgacccctccgatgacccctccaggcctggcccacaggcagggctctgcggccgtcagggctgggaagaaaggctgggccgtcctgggggatcagggctccagggcccagccattcctgttatcctctttctccttctccagacagagtggacttggaccaggggaggcccagaaagaggcctgcacccaggatggttcaa

SEQ ID NO: 1886538 - DNA, 4001 bp, Homo sapiens
ttatccagagtttacaagggagcgggtgcggcatgggataactcaatgctacctcccaacaagtcaatgaggtaggaaatgtcattactcccatttgacaatcaaggaaactgagtccctgagaggttgagtgaaatttgcaaggccacacagctagtgtggagagttgtggggcaacagggatttgaatccaggctgtcagatcgaggaccacacattcttaactgggcctcatagtgctttggtaaataaatattggttgagtgaataaataagaagatgaaattgaaaaacagtggggtgcgatgtctgcagcgagagtttcagaggagggcagatttgggttcacacaggcctttactctcgtttactgatgaccggtaaattccttaaattttctgagcctcgacagtttcctcctacatgaaatggaactaaccatctttctttctgggttgggaagacttgagcttgtgaatgaaggacttggcccatagcaagtgctgaataaagggctgcattatgactatctctgggccagcccccaaagcccagacgtaagcgggcagaggagctgctgcccgtaacacatctctgactccaaccaactgggtgaccctggtaagtttctcagcttgctgtgtcttgcttttctcttctgtagaggatggctcactcttagttcctgcctggaaggcttgcatgaggaaagggggccaggcccaaagtcagtactgaatgatcgtccacttggaggttcacattaggcacttgtatccttgcggcactcacatgttgggatgcgtggcccactggtggctggcgggaatgcccgcgctcggtcatgcttcggtgcttttgcacacgctggcccttcgccctggagtgtttttccaaccagtgaatctcctttcaccacttaagtgcactgcgtcgctgaagggtaattatctgagtgttccaactctccctcttgccctttctgggctgttctatccgagagcatatttgtcacttagcgctgggtcacctgggttacccatctctctgactgtggagtgtgagggttaactcacgtcatcccagaccaacttggtaaaacgcccctggccacatttccctacggatacaagatgtaagggtgtgacattgtggtagaagaaggcatgagtgtgatagaagaaggcatgagtgtggcaaaaggaagctttgtttctaagatctccaaacccaggcccacgagcggcatccatgcattcactcttgcagctggttgccgttcaatcagcaaggagtatttattgagcacctgctatgtgcccggcacttgagtggctctaggtttaaggctatgaacaagagaccagggcgacccttacccctccacagcttatcagaaggacgacaccgcacgggcgatagcaggcctgggtgtggcaggcttggtggggatggtgggtgtctcaaggaggaagtttcagggaaggctttggagacggggcctctgagctgaggtgcaaaggattagcctggtgtagggacggggcagaggctttgcaggcacggggagtggagggtgcaagaccgcggcgagggggccggcgaggggggcgtgggagtcggggcaggaccctgctggacacctggtctgtcctcagtgccgctttccccagggccacacaggctggctctggttatacccattttacagacggagacactgagatcagggagcaccggtggccctgggaaatggccgggcctgctcgttaatccccaggtgagcgggattcgctggcctggggggctcctctcccaagagaccatctccagggacgtcatagttcatgtcctgagcaagccggcaggctggttttaccaagaaagtaaataggtaaataaaacaagtaatacaataaaacaaagaaaccgatcaacgacatcttgaccttagtatgcccgggtggtctgcttttcggtgtccccaaggagagaggaaatgttgtaattggatggcattgctgtcaatcatctcagattggcggaggctgcggaacccctgggcctgggaggttgttgccatggagacggcctgcggccatgcggggcgggaagccccctcctcctctcctggccgccatgcctgtggcctcaggagacaaggtgaatgccgcacctgtggactctcagcccgtctaggaggaggataaagcacaaatccgaaatgcagtgtccctggaagggacgccctctctgggcccgctggctcccgtctcattgggctgaatggggtcatgtgaccactctccgctgcaaaggagtctgggaaattgcattttgttgttgttggaactcattttgaagccaaatgaaacgagaatcgtgtcaacgaggaaggtttagggagggggtggatgtgtaggcaaccagcagagggccccgaaatccgtgaagatcaggtctgacggtggctccatgctccctccattaaagggcttcacaaaaacccttccgaaaaggtatttcttgtttaatattcggaatatttcactcactgcctcattagaaagacaataaattaatgtgttcacgacttagaaaaatcaggaggaattagaggaatcgggatttttgggccaagagtctccttgaaataggcgcgggtcgttgatgattatctttccacacggaaggaaatccaggctcaggaaggtctggtgattttcccagagtcacacaggcagagggactcagaccacagaacccctgcctggctccagaatcccagccgcgatgggcgatgcgggggagtcatcgcaggtgggggcctgggaggcctgggaggcctgatctcatcctccagtgtggccctgccatgttgcgccctggggtacccagggcttcctccccctcctcccgccctacccggcccacacctctcaggctcccggttggtcagggattttttgcaagtcagttatctgagctcagactgctggccgtggagggaacccttctcactgcctctggctgaaagcgtttgcctcacctctctaagccccgaggggacagaggaggctctattgcagcgggcgggcctgacaggtcacaaggagagcccagatgtgccggcagccgcctgtgtttacacccatccccaagcatcgcagcatcgggggcaagacgctaagtttctctcaggtcgtggcttcctcatcatgagagtgggcagcacacggccccccacggggctcttgtggggtctgagagaggagtgtggtcacatggcgcccggcctgcagagacagcatgagggctgtggatgccaaggccagtatctgccgtggcggccacagccctcatgcctccctgtcaggaggcaccaacaaggcagtgggacaatgcgcccctttctcagtctgagtcctgtaacctctcagccttggattcccggtctgcagtaggggaaaattccccagatctccctcataggggtgctgtgagcatgagagagaaaagcattgcaatgatgagtagttactgagcaccatgagtagttactaagcactgctcacttgccaggctcctggctggcccttcttctctcttctgcagagctgggcatcagagcacactgagcagcaggatgaaatgcccacagagcttctgaggccaagtcctgtctgacaggtaggaggtgggcccatgacaaatgaccttgccttcctaactccttgattaacttatccatccatgaatgcgcaaaggcagtcccaacacctcactagaacccattcctggaaactccgttgtaaagtaaggaataaaattggtcggcaggaatcagcttagaaataacaacacagtaaagtcacgttcctgaaaatggactgtgcactgatgaagtcatattgaagataaagggcctgctgttaaggcagagcccagggacacttatcctatgtaaccatttcaactggagaacaatttcacccagtcta

SEQ ID NO: 1886539 - DNA, 4001 bp, Homo sapiens
tttttttttttttttttttttttttgtgacggagtctctctctgtcttccaggctggagtgcagtggcgcgatctcggctcactgcaagctccgcctcccgggttcaagccattttcctacctcagcctcccgagtagctgggactacaggcgcccgccaccacgcccggctaaattttttttttttttttgtatttttagtagagacagggtttcaccgtgttagccagaatggtctcgatctcctgacctcgtgatccgcccgcctcggcctcccaaagtgctgcgattacaggcgtgagccaccatgcccggcctgtaacttcccctattttacacagccagtgagtggcactaagtttgacagagtttggttccagaatccatgctctgaatgacaacacttagtctccaggaacctacagaaagtgcaaggcttaattcaaaactttggttttccccactctataatccctacgtggcaagcctacgtctctcgcctagaaggcattctttgagatcctctaacagttcgtactcctctcttgtgttgtctgaacactctcccacattactattattattattgttgttgttgttgttgttttgacacagagttttgctcttgttgctcaggctggagtgcaatggcgcggtcttggctcaccgcaacctccgcctcccgggttcaagcgattctcctgcctcagccttctgagtagctgagattacaggcgcccacaactatgctcggctgatttttgtatttttattagagacgaggtttcaccatgttgaccaggctggtcccaaactcctgacctcaggtgatcggcccacctcggccttctaaagtgccgggactacaggcatgagccaccgcgcccggcctacacccctgttttttaagccttttgctctcagcttaaatatcactaaattacaaactctaatgacaccgcggtatttctcagtgcacaacaccaaattttaattatgtatctcatggataattatttcctgtcagtctttcccaactaaaccgtgagttccagtatgtctggcagcacgtctgtcttgttcttggtgtattcccattactgaatccccaccaaccagcccaaataaggccctggcacaaagtaagctctccatttttgtagaatgaatgagtgaataaatggaggacactcaagcctcatgttttctctttctgacacatacctgtgctccctacgaccccaccctcaccatcacacccttaatagtggagacttagtgtggtactggcttttcaaacaggtattatgtggccctagacaggtcatttccttcactgaaagtcatcgcctgagtttcaggtgcacaacggggatcatacctaaaagagagagaacctccacctctcatcctcataatctacggagacagtagttaggtgcatcatgtttgtctttctagcagcgtttagctccgagaacgccaagaccccgtccgcctggttcaggggcctgctcccatccacagtacccaggcttgctccaagcctggctcacagcaggagctcagaaacgattcgttaaataaatgaagccctgttctgtgcatttcacaggtgggaagcgagggtcgtgcgaggcgggggcagcaacctgccagcctccgagcgtattcttcagatgcaggcccgcctcccacctcagcccgcgtcccagatgccagccccgaatcccgcgcccgacaggcgcttcttgcacaaggaagcatcttcgcaggtgcagcccacgccctcgtcgcccgcgtcgcaattccaggtggaaaagcaggaggtgaaggaagactccctctgtctagtggccatgggcgtggaggttccggggagctgtgtccgccagacatggaagtggggtcgacgggcggtaggggacggcgctagtcacaggcagaaagcaggagaggaaagtagggctccacctggctcagctggcgcggctcagtgacaccccggaggccggctgccccagcagcctctccgcctattggctcctctgcctagtcgctcattgggcaattatcccttcctctcagcctacaaaggtactcattggataagttttttggccccgcccacccaacccggaagtttgccgacggagaaaggaaactaaaagtcagtggcggagtaccgcgatgctttctgggaagtgtagtcttaggtgcctggagaggccaccaggtttcttctgactcgtcacggaattttaagggcagagaatccagccagaagcaaatgtcagctgttacgttcagtctgggctcgttgtcactcaacagtttaacaaaattttgttaagtgctgtccatgccagggactgtgctaagagctttagagacataatcgcctttgaaatgtagtaaaggaagtagcgtgtggaaaagtaatagaatgggaaaccacgtggcagtaaaaatcaatgaactcgaactctcaggtagcatcaagggctgaatttcagaaacgtgatgttcagtgaaagaaggaagtctaacgacacttttgtaaagttcaaaccaagtaaaactaatgttgtttagagaaacatacatatacggtaaaatactgtacagaaaagccaagacatgagaaaaaaaaaaaagtcaggacattgatgacctctagggagtgggacggtagcatacgagagggtagggagaggcagggaaggagcacatagacacattctcagtttctcaggtgggagtgagttcacgtgtgtctgtttcattatgatgcatattcaagatgcatctatttttactagttttgttataaaatattttataaataaaagaagaactatgctactgtattccacttgattatctgtcaggtgttggacacaggcaatgggtatactttaagaactttgaatcacacctatttaaaaaagcaaaatagctctctctcttctgccgccacgtaagatgtacctgcttccccttccaccataactgttaagtttcctgaggcctccccagccatgcagaactcaacatccttgcgactgggggccattatcttaagtgaaacaactcagacacagaaagtaaaatatgcatgttctcgcttccctgcctacaagctgagcagacgccagcaccatgcttcctgtaaagcctgcagaaccacgagccaatgaaactgcctttctatataagttttttttttttaaagcaaaataacagaaacccagaatatacaccttggggtgagatcagatagcaaatgcttgcttagtattcagtggagacacaagatctcattgacagtcaaggcagaaatgacagtggggaatggctgaggttaggaagttttgccagggatagcagcaatgggctgaaatacaccattttgttggagcattcctctaccaaaaaggtaatacaaaccactgcgcaagcattgtctcccagcttggcagtgtctaaattccatgggtgttagtggataatgtcaaacagtaagtagcacaagatgttaatcccacaggtctggacggtgagactgaaggtgactagaagaaggtggaggcagatgtattggcacacctttgttattgggtgagccttgattcaaaacagctggtaattcagggaaatttggttagttggactctagacaaagtgaacttactgggtgtggaccacgacactagtagattgactggcattctctggaggaggaggatggctacccatagagcaggctgctggcctccctttcctcataacctctgagaagagtcacatgtgatctgatgacaaaaaaaccctgtaacttgagggaatttggacaggggtggggatacccttaaaacacctggaatccagccaggcacggtggcttatgcctgtaatcccagcactttgggaggccaaggtgcacggctcacctgaggtcaagagttcgagaccagcctggtcaacatgctgaaacccca

SEQ ID NO: 1886540 - DNA, 4001 bp, Homo sapiens
tgggcaacaagaatgaaactccatctcagaaaaaattaaataaataaaaaagtggggagacttggactctgacttgggatctgcccttcagtgagctgggctcctgctcccggcctcagtttcttctctggtaaactaggatcagcctgttgccttaattctgtcttttccttagaagaagttcccctgtttcatatattaaaatatataatatataaaacatatatataaaatatatataatttatattataatatataatataatataatataatatattataatatatattatatattatactatattattatatagtataatatataacttattactatataatataatatataatttattattatataatataatatatattatatattaaaatatataattaatatatataatatttatatattaaaatataatatatataatatttatatattaaaatatattatatataatatatttatatattaaaatatataatatatataatatatttatatattaaaatatatatgatgtatttatacatttaaaaaaaaaaaaatatatatatatatatattttttttttttttttttttgagacgaagtctcactcctgtcccccaggctggagtacaatggcatgatctcggctcactgcaacctttgcctcccggattcaagcaattctcttgcctcagcctcctgagtagctgagattacaggcgcctgccaccatgcccagctaatttttgtatttttagtagagatggggtttcaccatgttggccaggctggtctcgaacttctgacctcaggtgattcacccacctcggcctcctaaagtgctgggattacaggcgtgagctgccacacccggcctatttatattttttagagacagtgtcttgctctgtcacccaggctgcagtgcagtggtgcaatggctcattgcagcctcgacctcctgggctcaagggatcctcctgcctcagcctcctgagtagctggaactataggtgcccaccaccatgcctggctaattttttattttatttttcgtagagacggtatctcgccgtgttgctcaggcaggtctcaaactcctgggctcaaatgatcctgccgcctcagcctcccacagtgctgggattatagacgtgagtccccatgcccagcctccctcgttatttttatctttggacctgcagtttaaaagatgcctaccctgtaagtgatggttggttcatttcctcacaagcaacagtgccagcagagtcacgtgcaacgtgatgttttggttgactaggaaaggcagatttttggtaaatttgggaattattgaggttctaagctagggccttaaatagttcagctgtgtcagctctgagaaggagctcggaaacggagagcagcctcctggcccacatcagcatggctggtttctacccacgaaggccctgttcctgtgatgtagtaagtcagggggcatcccacatcccctgccatgggtcagtcccctcagcgcggtggaggggaagctctagggctggttggttcagcaaactgcgtgtctaggggaccagtcatcagagtctgggaggtaccagaaaataaagccattttattatgatttttttctctgccatgtggctgggaatgggaggtgagtggatgggtgtgaatggctgaccctgctggaggccctgcggggctctacttggcctggactgtctcctccagcctgtccaagcgcttctggagctcctgcaccgtggcctggagcttccgcatctcctcctccagccgagacacggcatcctggggacccggtgctgcattaggcccagctcctccctggctccccttaccccagcctctgctgagccccatccctagagccctggccttgggccctttagtcgctcagctggttgctgcctggagacctgcaggcctatcaatctgaaacctgtgttctgaggcctcaggattaccattcccggacccacaaagattcccaatgttgtgagtttgaggtgccccaaacaccagccccaccccaccctcccagttttattccctggcttcccagccctctcaccgagctgggagtgccactggcctctggtgctgccctcctgcgccggtattattataagaaataatatttcttataattttacttttaaattattgggtttccttttagtttttcaacatattacgaatagcacactataggagaagcctcagaaagtaaccttctctgagcataagatggaactcatatgaaaacttgtatatctttatattctttgatagcctgatatcaaagaacataaacaaattaaaaatgaggtagctagattgccacacttcagcagcctcaaacattagctgcactgtatatagcacatccaatgagggttcagtggaaaagacacaagaaatgaaccccaggcattgtactctgctttgaataaggagaaagaagcatgtgtgatacagtcataaaaaaattaatctaactgatgaaaattttactgttaggataaaactcgcttttaggagcatatacttttgctgaacatgttgctaaataaaataggatattgattatatagtaagttgtgtacttgagcagaaatgtcagaacttaaagataaatgaaaccagcatattggtattttaaaccaatatggtttcaaaatggtttaatatctttgcttcatttttaatgtctaaaaggtggttgaagactgtacagagttgaaataaaaagccgttaattcagacataaaataaaagggacataatttataggataggtgtatattgatttatgaggatcttttaggcctttgagaatggtagaatggtggggtttttattttttttatttatttttggagctggagcctcactctgtcacccaggctggagtgtagtagtgcaatcatagctcactgtagtcttgaactcttgggcccaggtgaacttcccattcactcagccctacaagcgggtgtcaccatacccagctttttttgtttttctttttaaagtggggtggtgccatcacgactcagtgcagcctctgtatcttgggctcaagtgatcctcccaccatagttcctgctaattttttatttttgtagagatggggtctcagtgtttcccaggctggtcttgaacttttggcctcaagcagtcttcccacctcagcctcccaaagtgttgggattatagacatgagccactgtgcatgcatggccaagaatggttccccctccgccctctctcccccactctttttttttttggagacatggtctctgttgcccaggctggagtgcagtggcacgatcttggctcactgcagccttgacctcccaggcttaagtgatcctcccacctcagcctcaagtagttggtgggactactggtgtgagccaccacgcccaactaatttaaaaacaaatttggtagagatgaggtgttgttatgttgacatggctggtctcaaactcctggactcaagagaaccttccagctaatcctctcaaagtgctaggatgatagatgtgagtcactatgcccaacctccaaggatacttttaatgaaaactatgggtagactaaataaaatcctgtatgtattggttgttaaatattatagaaatatttttaaacatttgctctgttttctcccccattttattagaaatttagtacacaattattggccattatagttaagtgggggattttgtttgtgtgtgtattggaaataatatgatttttgaagatattatgtggtaagcatgagagtgcttatctttcaaaagagaccatcagtagatagaaactttaataagcttaaagtgacttgtatgttcagttttgaaagattgattcccaaaagcccaagagctagcttgtagtatgtgtgggcaggctattcccatgctgtcaataccattactgtcgtggt

SEQ ID NO: 1886541 - DNA, 4001 bp, Homo sapiens
gcaacaagaatgaaactccatctcagaaaaaattaaataaataaaaaagtggggagacttggactctgacttgggatctgcccttcagtgagctgggctcctgctcccggcctcagtttcttctctggtaaactaggatcagcctgttgccttaattctgtcttttccttagaagaagttcccctgtttcatatattaaaatatataatatataaaacatatatataaaatatatataatttatattataatatataatataatataatataatataatatatattataatatatattatatattatactatattattatatagtataatatataacttattactatataatataatatataatttattattatataatataatatatattatatattaaaatatataattaatatatataatatttatatattaaaatataatatatataatatttatatattaaaatatattatatataatatatttatatattaaaatatataatatatataatatatttatatattaaaatatatatgatgtatttatacatttaaaaaatatatatatatatatatatatatatttttttttttttttgagacgaagtctcactcctgtcccccaggctggagtacaatggcatgatctcggctcactgcaacctttgcctcccggattcaagcaattctcttgcctcagcctcctgagtagctgagattacaggcgcctgccaccatgcccagctaatttttgtatttttagtagagatggggtttcaccatgttggccaggctggtctcgaacttctgacctcaggtgattcacccacctcggcctcctaaagtgctgggattacaggcgtgagctgccacacccggcctatttatattttttagagacagtgtcttgctctgtcacccaggctgcagtgcagtggtgcaatggctcattgcagcctcgacctcctgggctcaagggatcctcctgcctcagcctcctgagtagctggaactataggtgcccaccaccatgcctggctaattttttattttatttttcgtagagacggtatctcgccgtgttgctcaggcaggtctcaaactcctgggctcaaatgatcctgccgcctcagcctcccacagtgctgggattatagacgtgagtccccatgcccagcctccctcgttatttttatctttggacctgcagtttaaaagatgcctaccctgtaagtgatggttggttcatttcctcacaagcaacagtgccagcagagtcacgtgcaacgtgatgttttggttgactaggaaaggcagatttttggtaaatttgggaattattgaggttctaagctagggccttaaatagttcagctgtgtcagctctgagaaggagctcggaaacggagagcagcctcctggcccacatcagcatggctggtttctacccacgaaggccctgttcctgtgatgtagtaagtcagggggcatcccacatcccctgccatgggtcagtcccctcagcgcggtggaggggaagctctagggctggttggttcagcaaactgcgtgtctaggggaccagtcatcagagtctgggaggtaccagaaaataaagccattttattatgatttttttctctgccatgtggctgggaatgggaggtgagtggatgggtgtgaatggctgaccctgctggaggccctgcggggctctacttggcctggactgtctcctccagcctgtccaagcgcttctggagctcctgcaccgtggcctggagcttccgcatctcctcctccagccgagacacggcatcctggggacccggtgctgcattaggcccagctcctccctggctccccttaccccagcctctgctgagccccatccctagagccctggccttgggccctttagtcgctcagctggttgctgcctggagacctgcaggcctatcaatctgaaacctgtgttctgaggcctcaggattaccattcccggacccacaaagattcccaatgttgtgagtttgaggtgccccaaacaccagccccaccccaccctcccagttttattccctggcttcccagccctctcaccgagctgggagtgccactggcctctggtgctgccctcctgcgcccggtgtccaggccccggttgaccctcagctcccggctctttgggggtacgtagccatccttgagggagatgaggaggggcccagcatcccgaccccccagccactcctcagccgtgagggcagggtcgggccctgcggtgggtgggtacaggtcctcctggaacaggtccgactgtgggcaaggccagggatagtgaggaaagcgcttatgccaggacaccccccacaagaccgcaaagtcagtgcccagcctggagcccagggtggggcgggggagcatcacctttcgaggcactgtcatggcaatgggctcacacctccgctcgtgcagcttgtagaacctgtgggaaggggaaggtgagcggggcccacagtctggttgggtgggcttgggactgcccactgcccaaggagcatgctgcggtcagggccgggggtcagtcacctggcgatctcacacttgttcacctccaggccacgtttgggcatgtagcccatgccccgctgggactccttggaactgaacatggagagatagtgcaggaaaggggcctcggaagtgatctcaaagtaccggattgagctgtcaccctgtaggtggcaggtgtggagggagggtcaataccagcggatgcccactgccctggccctctccaggcccatcctgcccacctcccacccccaccccgcccgacgaggccaccttgccacagaggtagacgatgttggtgtcagggtcaaagaagggcagcaggacaccgctgctggtgtccagctcctgcagggacagcggctcctccaggtgcttctgtagacacaggtgagaggtaacatcccaggccctgggatggtggtcttccctgggcagtgacctgtgagggccctcccgaccaaccagtgggaacaaccatctcacgcctgggtaaactgaggcccatggccatcctgccaggtgagtggcagagcagggacgaaacctccagtcttggttcccagcctgggggccctcggcttcctgccccagcactcactgtgtcccacagcgccacctgccgctcactcatgcggctgaagcccgtggtcaggatcttcccctccgacacgaacactgcacgcacgggccgggtcccctcgtggggacggtccttctcctgcaaggaaagggaggtggtaggtcaggcacccgtacataccctacggggccagtcccaggtggaggcgagggagggcagcatccaagggcctggctgatggtggataagaaggataaaggctgtagggtcaaaggtcagggtagatggcgactcacagctacgacagtgcctttgcggggctcgatgatgcgcacgcgcttgtcacggcaggaggtacaaatgaggcctccatctcggctccagtccacactgtagatcgtgtctgggtgcacctctgggcccagtgtcagcatggccgccccagtgcccacgtcccacaccatgatcacgttgtcacaacctgcacgttccccacagtgtcagaagccatgagcctcctgccctcatccactgcaggccacgagccacccccaagcccctcctcccgcagcacctgcactgagcagcacgttctgggctgtggtgtgccaggccacaatgcccacacgcttggtgtggccctccagggtgacgacgggctcccgcaggggcagcatcaggcccccatctgggatctcccacacctgcagaggaggggccagtgagtcttcaggactccaaatgtcagatcccatcctagagcccctctcccagcccctgggtccccaccaccactcaccatgactgtgcagtcctcggagccactggcaatgacg

SEQ ID NO: 1886542 - DNA, 4001 bp, Homo sapiens
cacagggcacaggagagccatggaggatgtgcagcatgggcaggaaaagagccttcagtggtgtacatttccatagtttggggctgtttcttacctacagtgatacctagcccatcctagcaggcatgcaccatctactccacactctgtgatgcagactagcctgccgtcagaacacgaactggtggtcagacacaggtaggtttcagttccagctctgcctcttattgactgcaacctcaggcttaactttcagtctctgagcctcagtttcaactctgtaaaatgaggtggctataccatctcaggttgcagagagaattaaatgaaatataagtgcatgtagagcattgaacccagggcctggcacacacagtgagtacacaatgttagccaggtagcttcataatgcatactgattgtcaatattcagacaatgcagtaaagtgttaccaaaaataaaagtaaacttatttgcatatgtattctttcaatctttatttttaaacagggtaaaactatgcatattctttcatagccagtgtttttctcttcatagtatattgttaaaataattttacttggaccgggtgcagcggctcacacctaaagtcccagcactttgggaggccgcggtgggcagatcacgaggtcaggagttgacacgagcctggccaatatggtgaaaccccatctctactaagaatacaaaaattagctgggcatggtggcacacacctgtagtcccagctactcagaggctgaggcagaggaattgcttgaacccgggagacggaggttgcagtgagccaagattgtgccattgcactccagcctgggggacagagtgaaactctgtctcaaaaaatatatgtgtgtgtgtgtgtgtgtgtgtgtgtgtgtgtgtgtgtgtgtgtgtgtgtgtgtatctatataaatctcaaaaataaaagatcatttttgagattatcattttaaaagacaagataatgttcaacttaatgactaatttaattattactattggactttttgtagactaaacagagcattcaaaacaaatgaaggagaataaaaaatatgtattacatgttgtaaaataaatgtgatgtggttaactcttttattcaaagttatagaacatatatatgtactatagaatgtatttcttattatgagtcatgttaaaaagtagtttagaagctgttgatttgaatttccttttcaaattttgcaggataatttttttttttttttgacagagtctcgctctgtcgcacagtctggagtgcaatggcgtgatctcggcccactaaaacccccacctcctgaatctaagcaattctcctgtctcagcctcctgagtagctgggactacaggctcacaccaccatgcccggctaatttttgtatttttagtagggacgaggttttgccatattggtcaggctggtctcgaagtcctggcctcaggtgatccaccagcctcagcctcccaaaatgctgggattacaggcatgagtcaccatgcccagcctaaacttggcaagataataaatcacctttttaagtgtcgttgggcacttgtctggttgtttttctttaggttaccatgccagcaatgattccttttgagtttctgacagaagatagtggttttcatccaaataagtcaactactctaccccatccctaagccacttgtatggaaagaaaaagaggaagaagccagtactgtgactgcgtaagcttcccccagcatcacccgctatgagatgtgtggcagctgagacccgggaactgctcaagggcaccaggccccatctgtctgcactcactcaccttcctcaggtactcgcatgggcatgtcactgactttacatgctgctgcagctccttggtgagctggccctggtcatgggacaggaactgtggggtcaggacaatagagagcttcaccatttgcagaatgagaacaggggctcatgatgagtgccaacctattagataatttaaaaaaaaaagtgttgaatgagtggaaaaacaaggtgatgtttgagtctatagtggtcaagggcttcagaaaaggacagaaccaagttcaaattcctgtactttgaatttctacttcatgccatgcaaaattactttaccccttttaacctcagttttcttctgtgtgaaacaggaacaatagtttcattcgtcattcagtttctctcaaggtttcacgagatcatacctataaaacatccaagtcatttaaatgtatcatcatttctgtcataattagtgggatccatttcactattattggatatacagttctgtgcctgaaacctacaaaaaaagaaaatgttaagtctaaaaagcattagtgatttctcatttttatattactaattataaccctatttaatcacacaaggccttgtccgtggcaggtgctcaataaacacttgtcgaatcaatgcatgtgggctccggagccacactgtttagattctattctgcctccaccacttatcagctgtgtgatctgggtaagataattcacctctttatgtctgcacttccctctccataaactatatataatgagaatccttagctcattcggttgtggtgaggggtgaatgatttggcacacaggaggggcttgttaacattagctgtgatgatctccttccaaatcttcattttcagagccacagatgaggccacagtgcaaccaggtgaccttagagtgtaagtacacatgattgccagctatgctctatctccaccataggtccaagactgggtagttctggcctggaggtttctgctacatctgccttctcagtgttcacctaaggacttttgtattttcctcctcgcatccccacagatggggttcaggctgccggacacagctgggtgatgccagggcagtggtcacctgtgccagccccgtgaggtagctggaggatcattgttccttccttctcgggctctgggcagatgccagggctggggtgacccatgccctcaagtttcttgctttggtgggccacattttcccttggcaaagagggtaaaggtcacaggatgccagagagctgtgacttctctgtgccctgggcccaaactatgaagacctgacacactatgctaaaagtccaaggctgggtgctccccagagcttcttgcctcaccgcttctgctgagggaggaatgaatactatgtcctcccagagctttgggagcttgtagcaagcagcctccccagcgcaaaatctcttggaaacctctaactgtgtctgaaacattagtgcaaatgttgcatcctatttcccatatgtccgcatgttttagaaaaaaatcctcaatttcctaaatatgcaagaaaaatcggtattgtaggacaatgtgactttttaaaaaatgttatttaaaaatcttccccacctccttttctgccctccaagactgccaaatacttgttgaacatatattattaaatgcctactacatgccagccatgattcatggtcttggggacacagcagagaacgaactgacaggactcctctcttatgtaactcacattcttatatgataatgataagggttaacattaattaagctgtcactgcatgttagtcacggtgcagtcattcccacacattattacacttaaacctgccagcaagcttgcaaggtagttgtttttcctttaaaaactgagtctcggaatgatgaagcactctgtccaatgtcacacagctagtaagtgtggagaccttgcatccaatcaatgcccgtctcattctaaaggccatgttatgtgttctccagcccatggagaataattttaacacagtcaatgaaatttctacacaacaatgttcttgtctcaagtccaagaatgcctcctacacctcctataatactggctttctggtgagtaaagatgccattctcatgtgtaatcaggtggcaaatggagatatgaccaa

SEQ ID NO: 1886543 - DNA, 4001 bp, Homo sapiens; identical to SEQ ID NO: 1886529

SEQ ID NO: 1886544 - DNA, 4001 bp, Homo sapiens; identical to SEQ ID NO: 1886530

SEQ ID NO: 1886545 - DNA, 4001 bp, Homo sapiens
ggcatcaccatattggcccggttggttttgaacgagatccacctgcctgggcctcccaaagtgttgggattacaggcatgagccaccgcgcccggcccataatttttaacaaagtcttaaggaacagtaaagcaaagggatcaaccaccttaactgtgctatagttcatcaactgggaatcaagtgctccagtgctgaatagacaaccattgcctcaaagaacccaatggacaagagcaatttaaactctaatttcatatacaaaacaggaatgcttgagtagaaaggcaagggagtgaccactaagccctgttatttaaaaagaaaaaccaaacagtaaaacacacacccacacttataaaaggaaaatcacagctaacaaacgcctatttctatcctggggatgactgtcatttcctgggaggtcaattctctgagtagagggcttggtcaaatgagcaatggaaacagttggaagttgtggggaggcacaggagggttggcatctcaaaccctcatttccacccacaaggctgccttagcagtaactccagattctcatttcctgatcacggtcatgccatgctgagaatggtctcagtcaggcttctcaaacttgaagagggatccgaacctttctgggaagcctcctgcatggcaaatgttggctgccaaggcacaaagccaagcgcagtcatgtaagctcaactgaaagaccccgcaaagttagtataaggcttgtgaactgccttgaataaatataggtaacaacttcttcaaacaggcttttttgtgagtttcaatcctgcacaactcccaagacacggttcctcggctccacaactcttgataaataaaggtagcaaaaggtttctattaccatctacccaacagcatgagcatttcgcttgatgaaagacaagctgcaaactaacctggaaattcctgtccttttgcgaagacagtgggaaaactaagccaattagaaagcagattgaaagattccttacctggcccttcctggacatccctaaagcaacccttaatatgagcaaaatccccttcgaaaaatcacagtatatactatggacgcatcttctaagaggtgctgagtgggtgctgcgtgctgtggatggaaaggatggagcgccaactctctaaatacaagtcaccagggaaaaaaagggccgcccatatcaacccccacgtcagcgttaattcaaacgtccagaatgtgaaacgccaagggttctgtctccagagccagcaagtaccctgggacagagaagagaaggcgttcacacaccctgggcaaaagaacctagtgagaaaaagaaagtagaatcacagcaaagtccggggtctcggaagcctcctccaccaaagagcaaagagggcgaggaagagacacccccaaggtgaagcgactcaggattctcaaaggcagtggacaccagggcgccatccttgccctcccctcccaggataggggatcggggcaagctggggatgagctggcgacaagggagtgttgggctcgaagcccgaggagagtcgccctctcctgctgagctctcctcggcgtggagcagggcgtgtgcggcggccacaggccgaaatggcccaggccctttcgactggcccacgtggtcctcaccttgtccgagtccgggtcggggtcggcctggctcaagaggtacaggaaggatttcgggtcctgacacagcggcgtctgcccagtggtgaggaagtaggtgccgccgctgtagagccggacccacttggacctgctgctggggcgctgggccaggacgctgagccccgcgctttaagggaggcacaagaagccaccccaaccccgccccgagcctgccacgggccagcggcaggagctcgcagtgattccccgccatgatcccagcaagccccaccacacctccgcttcaccggaagagtccggcttttaatatcgccctttgcgttctgtcccgcccactggtcagcccttgtagaacacccgccggtcacatggcaggcggaagttccatccgggaaaagcagccggctggtcccacttccggagggagtgaaaccgagcttggggcgccaacgctagcgggcaatggcagacacccgcccccaaccgcgcccccactccgtggcggggtcaaaggaagagccacgccagcaaacctctacactctacatgctttttattacaagactactgaccatacgaggaaaattcatcatctggtaactacacctaaagcacaagtatttggaaaaaaaaaaaggataaacagattcattaaattatatgattaaatcactgacccaatagaaaatttatataataaagccagaaaaaaagttgtaaaatatagtttacaataattattcacattcaaggctgtacatcaatacatacaacaacgtggccccgaacatgaattcaattcaaataattcatatattagaatttaaataacacagactgaactagaggccaacaatagccagcaaataaccttatataagaataaaaatacaaaagtgtatatcctagtatcattgcatttgttttcataagttcttttaatttttgctttgtctgtacatcacagttacagctacagaccaggtagagaatattacgcatgttctgcttgccacccacctgaaagacgtactagtcatttatcctattttatgttgtgaaggaacagctacagcagctctaaatactgtaacaatttaattttgccaacatccaacttacttacagtcgtaatagaggcttttaccagcacaatgacccctattcgtagtcattctgccaggtggttaggctatgtgggttacacagcttaaaaaaggtctgccttttgtaaaaagttctctgtacatagtttggtgtttcttcatatggaagaaatgagttacggggaaaattcaggtacacacgtaggctcgttcagttgctcaccacagccatctcaacagatgaaagtgctctttgttggaaacagcttcctcctcacaccagttctccacaggcagcctcatctacaaccctgcaattttgggccagaagtggtggcccctcagaggctctgaagtgcctccagccccgattcaggcacttgccacgtgtgctgcgtaagaagggacccccacccagtgagtcaacataggctcatgtcaagtttgaaaataactggggaaaagtgtatgacaacatcttccagaacaaagtaccttcaccgtattctcacagcagctgcgatctctgaagtctcagcagtgaccaccccgggtctgtcaaccagccaggcaagggggggccctcaggcttcagagggcaagaaaccaaattccgtgcaatttggccataatctctggtagagtgaagcagcactgaacacggtgcctagaaaaacctcctgcacgttcccctgcacaatcaatggaccccaactacagtggagaaatgaagaatccaaccaaatttgggtggtctggacttgctgccagccaggcaatctgcaacactgtgggcagggagttggggggggcggcctgaaatctacaccagctgggacaaccacgccctacaatgaaaaagccagcctggctgctgggctcttgtgaaccactaagacctgaaggtggggccccacgggtggaagggggagacaaatgcactcttgtaaaacccaatcagctacgtggtttttttcaaagaggctttgctctgctactgattccaaatgtcctaatataccttctgagtctataaacttaattacaaatcactcactaagcatgtggcaaggtcagttcaacacttgttatctctgctgactgtgcagatgcaaattcagtaccattgtggacacgaagtacaagattctgccaagcgcttgaaagccacggcagcagggagggcagagagctgacatgcaggcagagccaggttcttgcaaccaaaacaagga

SEQ ID NO: 1886546 - DNA, 4001 bp, Homo sapiens
tcccttttttggtagtttcacaccttcatggtgagaaaaacaagttctagagcagggctgccccagtgacccacaaatcaggcagcaagaaacatatgcgaattgttctatgcccttgagattgtgtggctttgttatgcagcacaaatgactaactcatgcttattttgcaggacccttggcctagactgtctaacttctggggccttactcctagaaaagtgtcatgcccaaatgtaatgatgaataaagacttgttattggattaaatgtgcttgcacatgtgattgcatacactggacatacatgtgcatgtgcatagggcaccagccagtgtgagagccagaacaggcatgcgtgtgagatgtacactaatagcagagtggtagctaagtaatatctgtctgcacacatctgcctggggggccacacaaaagggcctgagttcatttagctgtggactcactcccttttccagaaccttgcacatcctggaatggagctggaaacatcttagcccttggaggcagggaggaagcttccagaaccatagacagcagtaaacccaatgctgtataactgaccacactttctctccccttcaaactccttcagccttcttaagatggagcacaacattacctttgtggctatagagcttaattcatctcctgagaaaagtactagaaagggtcccaagtccttcgtggtctcagctgtccagtgctgagggagtctaaaaagagataataaccagtaaagtgaaaaaacatgctgtggtggacatctgttgccttttcccccagcacccttttctttcaggaacagattgtcttatactcatgtcaatcacatggtcccacttccttgaccgagaaaattggcatgtgatgcaggctgaccaatcagagtcatccctgggagttttgatggaactatcagagaagctctcctttcttggtatctctggcagtaggggaggatattggaggacattcatattaccaagtggaaaaagtaaagaccacaccaaggaacacagagctgagggatgggaggaacatattcctgaagatatcattggagacacgggattcagccatgcctgaagaccaccagtggagtttcccgttacattccattcctgaattcaatacattcccgttctctttagtttgaattaaattattgaatttctgccatttacatcacagtgtgtccttcttctccctcctcaatagaagagtaattatatatttcttccttttactttaccataacagtcttctcttagaataagaaaaaacctttctcttgaacttggcaggataaaataaaggcactgacccagaatccactgttattcttgtatagatcataaatgcctacagtgaagagcattacactatctttggcggcatctctaaaggaggtctgcccaattagcagtgacagctggtgggaatgcaaaatcatacagccactttggaagacattttgttggtttcttacaaaagcaaacatgtttttgccatataacccagcaaacacactctttggtatttacacaaaggagttgaaaacttacgtctacatgaaaacctgtatatggatgttgatagcagctttatccataattgccaaaacttggaagcaaccaaatgtccttctgtaggtgaatggctaaataaactgtggttcattaagataatgaaatatgattcagcactaaaaagaaatgagctatcaagccaaaaaaagacctggagaaaacttaagtgcatattactaagtgaaagaagtctatctgaaaaggctatctactgtatgattctaaatatatgatattctagaaaaggcaaaagtatcagtggttgccaggaattaggagtaagagaggaatgaacaggcaaagcccggaaggatttttagggcagtgaaaatactccatatgatactataatggtgaatacatgttattatatacttgtctgaacccatagaatgtaaagcaccaagagtgaaccctaatgtaaaatatggactttggatgataatgagaatccaatgacgataatgtcaacataggttcatcagttctaacaaatgtacaactttggggggggatattgatcatggggagcttatgcatgtatggggtcagagggatatgggaaatctctatcttctccatttttctgagaacctaaaactagtattaaaaatagtctctagggtcaggcatggtggcccatacctataatcccaacactgtgggaggcttaggtgggtgaatcccttgagcccaggagttcaagacccaccaaggcaacatggtgaaattccatcccttaaaaaaaaatacaaaaattagctgggtacagtgatgtgcacctgtggtcccagctacttgggaggctgaggtgggaggatcacctgagcccagggaggttgaggctgcagtgagctgagatcgccctcctacactccaacctgggcaacagagccagaccttgactttaaaaaaaaaaaaaaaaaaaaaaattctgggtttctggcatctcaaaaaaaaaaaaaaaaaaaggaaaggtcagggcacatggctgctacagtcctctattaagcaatgtgccacagcaggggtccctgacccctgggccatggacatgtactggtctgtggcctgttaggaactgggccacagagcagaaggtgaatggtgggtaacaattgaagcttcgtctgtatttctggctgctccccattgcttgcattgctgcctgagctctgcctcctgtcagatcagcagcatcattagattcttacaggagcatgaaccctgttgtgaattgcacacacgagggatccaggttgcatattccttatgagaatctaattcctgatgatttgtggtggaacagtttcatcccaagaccattaccatcctgcgccccatcccatgccgcctgtggaaaaattgtcttccacaaagccggtccctggtgccaaaaatgttggggactgctgtgctttagaatctgccatgaatctgcagcctctattatatagctccctatagactttgcttcctgatcaatgtactttgtaatctgccccactcttaagaaggttctttataatctcccccacccttaagaagtttctttgtaattctcctcacccttgagaatgtactttatgagatccacctcctgcccccaaaacactgctcttaactccaccgcttatccccaaacctataagaaccagtgataatcacaccaccctttgctgactcctttttcggactcagcccgcctgcacccaggtgaaataaacagccatgttgctcacacaaagcatgtttggtggtctcttcacacagacatgtgagacaggagttcgagaccagcctggccaatctggtgaaactctgtctctactaaaaatacaaaaattagctgggcatggtggcgggcacctgtaatcccagctacttgggaagctgaggcacaaaaattgcttgaacccaggaggcagagtttgcagtgagccaagatcacactgtcaggcctctgagcccaagccaagccactgcatcccctgtgacttgcacgtatacatccagatggcctgaagtaactgaagatccacacaagaagtaaaaatagccttaactgatgacattccaccattgtgattagtttctgccccaccctaactcttcaatgtactttgtaatctcccccacccttaagaaggtactttgtaatctccccaacccttaagaaggttctttgtaattctccccacccttgagaatgtactttgtgagatccacccctgcccgcaaaacatggctcttcaccccctatcccaaaacctgtaagaactaatgataatccaccaccctttgctgactctcttttcggactcagcccgcctgcacccaggtgaaataaacagccatgttgctcacacaaagcctgtttggtggtctc

SEQ ID NO: 1886547 - DNA, 4001 bp, Homo sapiens; identical to SEQ ID NO: 1243055

SEQ ID NO: 1886548 - DNA, 4001 bp, Homo sapiens; identical to SEQ ID NO: 1243053

SEQ ID NO: 1886549 - DNA, 4001 bp, Homo sapiens
gagagaagagctttatccatggccactctgctggtcagtggcagatccaggattgaaacccaggccttcttattcatcttctgataccctttacactatattgtggaactgatcgtaattgtggtgggcttggcagcagtggcagggacaaaagcccctttttgtgagaagctgttggattgtatggctgataccttatgaacacagtgttcctgcccagctacaaccaccatatggacaaggctctgtaccaggagccaggaagacacaaataagaaacagtacctgggggagacagccatataaacagacaatttatccaaaaagtcaggttttctataacggacacaaattacctgagcacaagtccaaaagcactgacagctgggagagggagggagggaagagatttgagccaggacttagcttctacttgctgcgggtagaagctggcaagcgggtggatgagattcactgattacggggatgggtcccattattccaggatattaaggggcctcttcctttgatctctgaggtcttgtctgtgtcgtctcctttgctggcttctccttctctgggtactctctaaatggtaagaacccaagggatttaggggtcttcctcttttatttacacgctcttcttaggtgatctgggagctcctccctgccttccttatttattatctccaactatgatttttccccgacttgtatatctaacttcttgacaacttcatttgacttgttaatagacttatcaaacttaatatgttcaaaagagaactttcgatattcctttctaaactgttttcccgtagggagttaaccttggttcctccctctcctacacacttcacatccaattccccagcaagtcctgcaagcactacctcccaaatatatgctgaatggaattctctccatttccactgtgactgagggccttttcttttttcttaagacggagtctcactccgttgcccaggctggagtgaagtggcgcgatcttggctcactgcaacctccacctcccgggttcaagcgattctcctgagtagcagagattacaggcgcgtgccactacgcccagctgatttttgtatttttagtagagatggggtttcaccatgttggccaggatgatctcgatctcctgacctcgtgatccgcccgcctaggcctcccaaagtactgggtttataggcgtgagccaccgcgcccggccggccctttcaacactatcttcacctctcctttgtcttacagtgcaacagtctcctaacaggtctaactacttccacccttctctatccagcaggcagagcggatttttaaaaatgtaaatcaggtcaggtcacttcccttcttaaaacccttaaggtacacattagccaaacccctgccttgggctaaaaggcgctgctacagtcatgccacttccccaactacatcacagggcactccggccctggctctgtttgcttcagccacatggccttctggctgtttccaacctaaaagtccttctcattggctcttctctccacccagaaaacccattgtctcggatccccgcaaaaccgtggcctcctttgaacgaccttacccgatttcgaggggccctccccccatcttctgtcacctcatccggtctttggggggcatttctcacttgctgataccttctttattgatttacttaactctctcctgcacacgaatggaaggtaacggagcaacaccctactctcaggtttgaagagcaagagaattacgaagctggctctcacggtcctagggagtctccgttcctgtacgggacctggtgtgggtcaacgttccccagccagacacctctcgcccccggaccggcccctaccatctcccatttacattcgggggtccaaaagattcacagcctccgagggggccccacgccggcacctgagcgtccccacaccaggcctcccctcttggacgcgcgagccacttccgtgaggcaggtccccgaggccggtggcgatgacaccgagccgcccccgcgaagctggggtcacacaggcccgtctcccggcaacgccgcagcccaacctccaaaccatccctgcccgtggggagccaaccccttccccgccagtctcccgcgcctggagtcggcgcctccatcccctacactcactctgcgtcagtcctgccttcccccacccacagaagcgcgcagcccgcggcgggctgggaggaggcggcgccaggagcccagcagagccgtggccgaccgagcacaggctggtccagtaggccaggccggaccaaaccaccgggcccacctctgtgggagcaccagttccaggtctgggggagtctcgactgactgactctacccatctcccgccgcatccaacaataagctgagctcctcctccccctatttttcctttacgctttcattatcctccccgctccattcccgtaaaacaagaaaaaaaaatggtccagcccagctccctccgggttgctaggtctttgcccttacttggcgacggcttcgtacgtctttatgtgcgtcgtgacgcaatcttccactcgttccctccttgcccctctcccattctccctcctggagctggcggccggcggggttaccggaagtgatgatgcaggaggcgatggagggggcggggcttcggggcggccgccgccggtgggccgcagatgaagaggaggcggtggcagtggtggaagaagaggcggcggcggcgggggtagggagcctggaaacgcgagcggggatggtaggtggtttggacccgccgggccgccgtcgtttccagaaagggtttgactggaggaacctctggagcagctgtgagttttggggagggggggagttgaggaaaaggcgggggggcattgagagatgaaggggcgggggttgggtaccttcgagaaaggggggtggaaagggaggagtggaagtcagcgcgttgtctggagtggtacctctgaaagaagaggctgtgaggggagcctgtggcgtgtcagccgcagggctcagaaaacttacctactgtccctgcctccccaccgccagcacccctcaacccagggcctggggatatggggttggagctgccctggagggggtgcagactctggtcctctgtcctgggtgagcgctgtgaggtaggagccctagggggaggtggtgggtgaatctcccagctccctccgccctcatttccctccccacccccatcgttctctttaatcattaacagccctggaattaaggggctcagacctgaaggcctttttgtgcacctttgctataaacgataaccatctgtgtccgaggtaatgaggctggaggctttgcctgtatcctctataggaagtgggacggggtgacaaatgtattgtttgttcctccaccacaccccccgcacttctcacccctcatcctcccccatgcacacccctggtttccactttaattctctgtggctgagtggcaatagtggatttttttttcttcccctttcctcctttatggcacttagtgccttggttacctcttttgaatttggtgttcagcctctatcccagatcttaactgtaagctttgtaatacttcatacaggctgtcacgttgggagtacctcttacgctccgattataatgagcattttcttttatgaatactggaattccagagcctttgcaaggaatcctgaatggcatcatagcccaggaatcaaggtctcttgctcgaaatactttatgtgtgaggaatttacatgttgtcagctcttcccaaaatgatttgctaggctaattctggatttctgtgtttctctccacccacttttcatgatgcacttcagagaacagaaaaccccatattacttttttgtttctacaattggacaatagctcttttatgtttttctccatttatgtgtgacacacaaatcatcagtgacacgttcagcttgt

SEQ ID NO: 1886550 - DNA, 4001 bp, Homo sapiens; identical to SEQ ID NO: 1243062

SEQ ID NO: 1886551 - DNA, 4001 bp, Homo sapiens; identical to SEQ ID NO: 1243073

SEQ ID NO: 1886552 - DNA, 4001 bp, Homo sapiens
ggattgcccggctccgccacatcaagcggctccgccagcgggtagggaatatggggctccctcagcggggtgtgctggctgcccaagctgtggggcgggtgtgtgggcagagcggttgccacgcctcccagacttactgcccaagccgcctctgccttcagatctgcgaggaagccgcctactccaaccccagcctacctctggtgcaccctccgtcccatagcaaagcccctgcacagactccagccgagcccacacctggctatgaggtgggccagcggaagcgcctcatctcctcggtggaggacttcaccgagtttgtgtgaggccggggccctccctcctgcactggccttggacggtattgcctgtcagtgaaataaataaagtcctgaccccagtgcacagacatagaggcacagattgcagtcagacagctcttttattgactttgtctgcttggtgcgggggttgggggggtgtcgaggctctagaagcggccatgcccacagaagtggtacacagaagcaggcacagccagctccgagggccttgaggctgcctgggccatacagcacactcgcgcgtgcgcgcgcgcacacacacacacacacagtcaccttcctccaccctgggagccagcccccaggaggagtcttttcctctaaccaccctggggtcctctgacatgcctagtcctgctacttgcccagacctgatgccagcaggcctgggcgctgctctcttgctacctggcctggggcaagggaggatgacaaggcctctggggtgatgagagtgcctggcagacagctgtgcccccagcaccggcccaaggccaagctcgcatccaagcagcagccgggctgccataacgccaccacacctaccaagcgcagcaggtgttgggggaggccagctctgggcgcaggcccctcagccctagtgaaaatagtgacatacaaaaatatacacattttaacaccatataaattactgacacgagacacacagtgagacggtgcagggagtacggtaggaactggagaggtaataacttaggggcagggtggcggcggtgcaggctaaccctccctgaagccagcagccttagcagtgggggacatctgcccagggggtggggccgggcacagcccgctgtacctgaggactcggggaaataaattagcatctcagaggctagaaaccgtccaatactgctgtgtccttcccaagggagctggggaggggaccctgggtcctggttggccacacagcctctttaaagtgctgaagcccacagacagacagatgcccctgcctgctctctggggaacctacgtgcagccattctgcctggccctcggccttgacagcggcagaaagtaatactgagcggtgtccactccgactccacggcccacccccgccaggaaggaggactaagtgctgctggggtggaccttgttcttggcccgaaggggtgtcctgctggggccagtggccaggtccacaccccgactggcccgggcaaggcggctgggcagtgctggccgcaggcccggggatgggccacgggaagatccggcgggcgcccggctgctcctgcggccttgcaggctgtgcagctgctgctccagctggtagacgtcctctgtggcctggttgagtcggtcaaactgggtgagcagggcctcgaacacggcttggaggcgggagggctcaggctcacaccttgtccccagccggcccaggctcacgctcagcccatccagctggctggaggaggtggaggggtgcgaggcatcggagccagcgctgggtgggggcacatccggggataccttggagcccctggaggagcgagagggcagcggctccatcccttcaaagcggactttgtggcggaactgggggcggcacaggggctcagtcagtccggctgcaccctgggcagagcccagggcgtgtccctctcccccccactgggccgtacccacctccttgaccttgctgaggcccatccagaggcgcagcctgcgcaggaacaactccaccatctcgtagtcctggggctcccaggccggccggtacagctctccacgcaaggcgtggtagcgccagcggagaataacagcccccagccgtagggcgccccacagccgcagtgcccagagccccacacacagcaggggtgacaggtgccaggactcggcaggacacagggtagagagcccagtcccagggcacagcaccaacagggcctgggccacgctccagagggagtccacacaggaagacacgagctgcggggaaggcgacaccagtgagggcgtacagctgagctgagctgagctaagacgccctccccggccgcgcagtcacctaccaggatggccagctgggcgtaggctaccccgagcaccaccaggcccaaggtgacccccaggagctctggcagagctcggcataatgtcttgccaaagacggaccactggcgcacgaagcgtagctgctgggcagcctgcggacgagaaatctgtctgcttgcagccctggggtgtgcgcccagccccgcgcccaccggcccagccctcaccttgaccaaaagcaggaagagcagcgaggccgccaggccacgggctgcggagctcagctgcgccacctggtcgaagctagtgaagcggcgcgggcggccgcgcacgaaacgggtccactggcggtcagcggcacccagctgggcgaggcgtaccagtgccgtggccgccgtcagcgccaccagcagccaccgcgcccaggctccgagccgcagcacgcgccagcgcccttccctgtgccaagtacgggcctcggccacggcgaagtgcacggcgaacagcagcaggcacacctgtggggggcgcggtcaggagggcgggagggacgctgccggggcggggccctgcgagggggcgggacgctgccggggcggggccctacgagggggcgggacgctgccggggcggggccctgcgagggggcgggacgctgcgagggggcggggcgctgcgaggggtgagacgctgccggggcggggccccgcgagggggcgggacgctgccggtgggaggcgcggggtctggccggggacgggcgtaccgaggtgagcagaggcagcgagaggcccgcgctgaggcggcgcagcgcaaaggggcggacgctgagggcggccagggcgcggccggccgccgggaactcgaggcgcagcgtgacggcggcgtgcagccccacggccgggctgtagcgcgtgagctccaggaacacagcgcggctcctgcgcagagggtgcgggtcagtaggagcgggtggcagggcgggagctgcggggaccgcgcagtgcaggcgtggctgaggggctgtggaagccgcctaggccagcgggggccggaggagtgagggtgggctcctggctggtgactgcggccaccccggagagggcaggggagggagctcccacctgttgtccagccagttgtgcagctgcaggaagcgcagccggtcgcggctctcctccaggctcaggcccagctcctgcacgtagcccccgctgtcatacacggcacaggagccccaggaccatgccctgccggagaggggtggcgtgggtgccgcaccccagcccttccggcaccccggagccaggctggtcaggaggccgcggcactcctggagaactactcccttgtccttggcgtagacgcccggggccctcgctctgctcaccccagcagatccggcgctgaataggcccacgtccccgagccattgtgaggactctcccagccaacgtcgtaatcgctggtgctgaagcctcctgcggccgagcacgtgtggaccctggggccgggagggtctgggtagagtgctgaaacacacagagccccaggccggggccagggcctcatcaaaacccaacaggagtgtttcctgctggccagctcgcctgagctctggttcggcgc

SEQ ID NO: 1886553 - DNA, 4001 bp, Homo sapiens
atgaagtctcactttgtcgcccaggctggtgtgcagtggcacgatctcggctcactgcaacctccacctcccgggttcaagcgattctcctgcctcagcctcccaagtagctgggactacaggcacccatcaccatgcccagctaatttttgtatttttagtagagacggggtttcactatgttggctaggctggtctcgaactcctgacctcgtgatctgcacgccttggcctcccaaagtgctaggattacaggcatgagcctctgtgcctggccataaaaaattttaaaacacacaaaagaatccttcttaatcccgccaccccaaatctctgtattatgttaacatcttggtttgtatcctagatggctggatgaatagatgaatggatgttttttagtttttagacaaaggtggaatcatgactctgttcttttgcttgctttttaaaagaaactagatgaaatacactctaaacatcttcccatgtcaacagaatatcattttttttcttatctattcttcaccattcatcctaaacccacattgttggcttcaagtaaactcaccctcaaatagtaattatcccttctatttgcctatctttttatagctttgattcccacaaggctgtgagataggcaggaaaaggattatctctacttaacagataattttaagagttaacagtttgttcagggtcatatagggtcaagtaggagagccaagatccagagcccatctgttcaattccaaagcccatgggctttccattacatcccattgcctcatactatgtatctgattgtgtggcacggacttaaaagttaagctaacctgggtaccaatcctggctccaacaattcccagctatacaaccttcaagcaagttagctaagtcccctaagctcaagtttcttgtagggtgtggcgagaatgacttgataaaattcacatcaaatacttaacatggtagctggtggttactgctgagggctgactgacccattcatgtccagtgagtaagtctgacagggctgtgctctggcttgaaagaggtcctgtacgctctgccaaaccctaaattcctacccatattcccatcccaattacaagcagaatgaggacctgccagtgctactttagacatagaacagaaaccttcccacttagcctggtgcatcacggcaggaagctacaagacaaagccaggccctggggctcccagttagaggaagtgagaaaaagacgtgtaccctgggaagaaaaagggatgcatttccgttcccatccaagcctcacttccttagaaagacatttcaggtagattaacacaccatctctgtgctgttttccatatgccatttgggggggcattttgtggttatttttaagagactgcacttgtaacaaaacaaaaagtaagctttctgttttcctttctgggtcatgagctggtctcaaccctccaaattcaactgtcactggaagtctttgtggagttggaatttctattgggagtggctgtgaaggtaggaagaacatcagcaaatgtggtgatatggtttgaatgtgttctcccaaagttcttgtgctggacacttaatccccaatgcaacagtgttgagaggtgggaacttttggaggtgactggattgatgttattattgtgggagtgaatttatttaaaaagtaagttaccctccctcatgtgttctcttgccatgtgatgccttctatcaggttactatgcagcaagaaggtcctccccagatacagcccctgatcttgtacttcccaccctccagaaccatgagccaaataaatttcttttcattgtaagttatccacttttttttttttgagacagggtctcactctgtcactcgagcaggaggattgcttaagcctgggaggtcgagtctgcagcaagctgtgaccacgacactgcagccttgacctcccaggctcaagcaatcctgccttagtcacccaagtagctgggactacaggcatgtgccaccccacctggttgatttttgtaatttttgtgtgtgtaaagacagattttgccatgttccccaagctggtctcaaactcctgggctcaagctcaagtgatctgcccatgttaacctcccaaagtgctggaattacaggcatgagccactgcaccaggccccagtttcaggtattcttatagcagcacaaaacagactaagacagacacacaatgtcataaaaatgaaggagaagaggggcttaaaaagaaagaaggcactctgaacttttcctacagataaactcacttatataggaaactaggaagttattcaaagggtgatgtagagttagataagcagataagaaacaatctccaagacagaggggaataatgcaagatacagaaattgtacacagcatgctaacatccttgtgtgtgatgtagactatttctgggcctgaacacatcttctctagaaggtcacacaagaacctggttgcaatgggtgtctctgggaaggagaaccaggaagcctagctaggagccatgggtgaggggaatcttaatttcactttgtagcttctgatgctgcttgaatattttattttttcacatttttttaaaggagaaaggattagagcacctaataatatggtgaggtcaagaaagatgagacaagcttatgagaagaggcagttttcaggtcattgatgactcaatgagaaaaatatcaataggatggcgggagcagaagccagattgcaccaaactgaggaaacaataaattgtcatcaagtggaaatagcaggaactggcaactctttcaaaagtgtgtttgtatgcaaagtaaggtagggtagtaatcatagcagtagtaagagtagtagtaaggaggattcccaggtttgaggtaggggatttttaacatgaaaaagacatagcaggtttatgcacaaaggagaaggccaggatagagtcagaaaggacagctgctgtttttgcccagccagcaggcattgtcttttcttctagtgacagtggctttatttttctttttttctttttttttttttttgagacggagtctcgctcttttgcccaggctggactgcagtggcgctatctcagctcactgcaagctccgcctcctgggttcacgccattctcctgcctcagcctcccgagtagctgggactacaggtgcccgccaccgcgcccagctaattttttgtattttttagtggagatggggtttcaccgtgttagccaagatggtctcgatctcctgacctcatgatccacccgcctcagcctcccaaagtgctgggattataggcgtgagccaccacacccggccatgacagtggcttttttttcttaaaggagatattccttctcttctttcaaaatgtctgatttagataggacattccttctcttttttcaaaatgtctggattagatccagctctctggctaagaggggctggtgacccaggcccggtcaatcagcacattccatccccctggtgcagtgagcaattcccttagagatgggcatatgacccaataatcttccaaaaagattgagtcctaggctgctgggattttataaaaaggaagcccttttctttggtagaagttgcagagataatgggacataaattgggagttgctatgtgcccaagaaagccttctgagaatgaagaatgaagtcaacacagtggggaaagtaatcctaagggatatagataaatgtttccctgctggcattgtttgggaccagatgtagatgatccatctacatctgaatactaactatcattattttttgcttaaaagtcagtttaaatcagattcctatttgaaaccataggagttttgttgatacagagagaagctgtagacagactaaacaggggagataagcatgaaggatcaagaggctggagtccagagcaggagtgagggtaagtctcacatgagttgggggagg

SEQ ID NO: 1886554 - DNA, 4001 bp, Homo sapiens
agggcctcctgtctttgcggctacagaggcaactcagcatttattgtgctcctcctgtgtaccaagcactggacctcacagcctaacctggcagacagaccagcaaggagatcatgcaactggccagcagaggaggaaggctgtccagaggaaggagaggggagaggggaagggaggtgtgtgggtaaggatggaggggagatgacaggggagaggagggaaaggagctcaggaggggtgtggtcattgcagggggagaggcagtgggactgaggcccacatagtgctgtggggtggggaaaggagggaagaaatactgggagatgaggctaaaagggatccaattgtttcttcattccactgcgtttattgagtgcccactgcataccatgccctgtgctaggcaagggaggcaccacagggaacaagacagagaccctgccctcctagagctcacattctaatggaagagacggtaaataaacaagcaagtattataatacatttagtgataagtgctgttaagaaaacaaagctttttttttcttaggaagggtacattaggcctctttgagaaattcgagccaagctccaacaatgagaaggagccacccacatgtgagcaggtatgagcacaggggttccagatgagggcaaagcatgtgcaaaggccctctggcaggactgtggtgtgggcttcgagactggcaaggaggcctgtgtggctggagcagagggaccaaggagttggcattcaagacatgtaaaagggaacatccagccttataggccagggttagaagtgtcctattctattctacaatggtcaggtttatttttacaagcttattttggctgttgtctggagaatgggctgagggagaagggctaggtaagactagtcagtgggcatggtggctcacacctataatcccagcactttgggaggctgaggcaagcagatcacctgaagtcaggagttcaagaccagcttgaccaacacaatgaaaccccgtctctacaaaaatacaaatattagctgggcatgattgcgggtgcttgtaatcccagctactcgggaggctgaggtgggacgattgcttgaacccgggaggcggaggttgcagtgaaccgagatttccccatcgcactccagcctgggtgacagagtaagacaccgtctcaaaaaaaaaaaaaaaaaaaaacaactagtcaggggccattgaaggtacaggacagtgatggccagacttggggaatagctgtgggatggcaggatggtaagaaggtttgggagctgagacagattctgaaggcagagccaacagaaccagcatgtggatttgtgtggggcagggttcaaaggaaggagggacacgggagagctctatgggggaaattattgtattgtttccaagtagagaaccctgatgggaaggccttgaaggccagggtaagaagcctggcctttgtcctggggtctcaggccccatctgtttctgaaaagctggcccagggcagcagtggtgtggtgaacggtgcaaggcagaaagaaatggggccagggagggccaggtgaaggctatggcaacaatcaggctggaacagacaatgaccctggctatgagttccagggcccacccttgactactcacagacttcggcatcacactggaacctctaacaatgctgattccagggccccaccttggagattctgtggacctcggcaagaggaggtgaggggcagacatcagagttttttgaaagctgccaggtgattctgaggagcagtctgggctgagatccagtgagctacagaggacaagctttcacacacagactcccaccccaaccccatccccaggtccttgcgtccggcccggtcccacgaggctcgcctggagaggatgggtatgatgcaaccctggtgtcgtgaaatagccgggtaagaggatgcgctgctcgtcggcctgattcacaacaccagctgcagcaacgataccagaactccgccggcttcctcctctgggctgtggctcctccggttttgagacagtgatgaacccatacaacaccttccccaaccaatggctcccccaggccagtatggcaccagggctcaggggtgcatatggtggaatctgggtccctgcccacaaggggctcacagacttgatgttcatggggaagaggggaacagacataaaaaaaaaacctgtacaatgcagggggtgcagagaaacaatggaggtactgagcactgggaaggcctgggaagccagaggctggactgcaacctctccagcaaccaggaccaagaaattgagccttgaggacgggtgcaggggctcacgcctgtaatcccagcactttgggaggctgaggcgggtggatcacgaggtcagaagatcaagaccagcctggccaagatggtgaaacctcgtctctactaaaaataccaaaattagccaggcgcagtggcaggtacctgtaatgccagctacttgggaggctgaggcaggagaatcgcttgaacccaggaggtggaggttgcagtgagccgagattgcatcactgcactccagcctgggtgacagagtgagactttgtctcaaaaaaaagaaagaaattgagccttgaggagcacacaggtgtgtctattgcagtcctggtcctctacctggacaatgttatagcagttagacactaaggtaattgaagctatcgatagctaaagcaaaaaaggaaacatatatgatgagttaagacattttcattgttaaaggaagaactcccagccaggtgtggtgcctcacgcctgtaatcccagagctttgggaggctgaggtgggaggattgcttgagcccaggagttcaagactagcctaggcaacatagagagatcctgtctctacaaaaaaattttaaaaattagccaggcatggtggtgcacacctgtggttccagctacttgggaggctgaagtgggaagaccacttgagcccaggaggttgaggctgcagtgaactgtgtttgcctggctccagtctgagatcttgtctcaaaaaaaaaaaaaaaaaaaaagaaagaaaggagtactcctagttcctttttcttcatggacagacttaaaaaaaaaaaaaaaaaaaaaccctatttagccaacattcattccacacttgtagatattaataatgcattaaacacaatctggctattttgaaggacacacagaaggataaggcatggtcatcgtcctcaggagcatacagttcatcagaggaggtaaagccaacaaatagccacaagctgaggcgggaagacataaatccctggataaaatgctacacgggttcagagagaggatgatttcctctggcttgtaccagggtggagtgaggtagatgacacagaaagcaaaaagataagcaattatttaagaaggacaaagtccaatgttagcctggagcttcgtggcagctccaggcagaaagcacaaccatgatcagtagtcactacctgatgaacgagtgagatttactttcttcctttcttcctcttctcgttaaaaataaataaataaataaataaataaataaatccccatcaactctttatctgtccatgcaggtttagctggtgctcagccctgctgcatcaacacgaactggagcagtaattctaataaaaattcagtcctgtaataacagacacaagcatatgttcctccaccctgatgactctgccaatgtgctctccaagaaaccaaggactcgaacccattgtcttcactatctttgacctttcttttttctgagacagggtctcactctgtcacccaggctggagtgcagtggcgtgattacagctcaccacagcctcacctcccaggctcaagtgatccttccatctcagcctcccaagtagctgggactacaggctgggactacactacacccaactaattttttaaacattttttttgtagagacagggtc

SEQ ID NO: 1886555 - DNA, 4001 bp, Homo sapiens
tcccaggaccctcaacggggcacgtggcaggacctccctttccatattcacattgtgtccctctttccagttaaatacagacgctgggacgcccctccccagaactggctcactttctgacagatgtccctacaccctgcaccagccagtctactgttcaccaggaggcagcgtggcgtgaacggcagcgcccatggactggcgcgccctctctgggctctacccttcgcccccatagagctggtaacctaaaaatgtaaaaagctggagatagttctggagaaaccagagctttctcagtggctgccctgtaggtactgaagagtttccatgttgctttgcataggacttgtcaagagggggcccagggtctctgggccacagactttacgttttgttctacactagtgttgattccaaatgcccttccagaaggcttagtgtctcagtgggacattcccaaatgccgtgacagtgtcacctcccagagacaggcagcaggtgggcagctatggtttcacctggccctgtcatcccaaggccctcaacagagcacatatttaatgttcagtaaagtctgtggcccagcgaccctgggctccctcttgacaagtcctgtacaaagcaacatggaaactcttcactacctacagggcagccactgagaaagctctggtttctccagaactctctctagcttcttgcatttttaggttacgagctctatgggggcaaagggtggagccccgagagggtgagccagtccacgggggctgccgttcacgccacgctgcctcctggtgaacaggcccagggcctcctccaatgctgccccttcctggaggtctcagagaaagagcagattcccctggtgcccctggcacacttcaccaggagagggaagaggagggagaggaggagggaactaggcagacccctggggcccccttaccatggcgatgaatctgcctataaagcgaaagtaggtgaggtggtccgggttgatggaggaggcggggttgatctgcaggcagtaattgttctttccggcatattcaaataaacaatacatagggttgagcacctcatgagacaggaggaaaaaccactctctgtgagggaagagacagaaaagacaagaataatgggtcccttcgtgcacatctgcacaggagctgtgtctcttcaccatcgtgtctcaggttagtatggggacacgtgtcccagggagtcgagccctgtgacaagcacccgggctaacctatatgaacagctggtcagtgaacagggcaggctcagacctacagtgaaccagggcggcaactgcatttgaggatgatatttgggaaaacgtgtgattgtcggctcccaggtgatgtgttccaagactttacatcacaatatccagagcttctaatggtaaagggggtccttgtaccctgggtcaccatgctcagttgcctaggctgtgcactgcacaagggcacgatgcatgtttattacaataatttttctgcaaaggttctgtttgaatagtaactaccctgtttccactctacctgggcgggcaacataacgtaaatacacagcaacacatttccaaccccgatccatgacaatgtaatccatgctgccttcagatgagaaacctcatgcccaccagctatgcaacactcttgcactttgccctcccttcacccccagaccccaacaccatccccgttcccacacttccacgcattcatctgaaccaacacccgtgccctgggtgcgagcctcaggcatgaattcagagtccttttgggcttgagctaaaccagcaaggggatgtcccaagggggccagtccccagctgctgggctgtttgtggctgggcagacgaggagtccgtcgacgcagagggtgccccggtatcctgtccgtggttctaccctgtggtagaacagcatgacgtaacctaccatagggtaaaaccactggcaggacacagagagagacacacacagggcgcggccacaccagaagcccaccaagcagagcctggagaggaggtcaccacggaaaaaaggaacatccatccacggggccagcgcagaaggcaacgccaccaccgaacagaggaccagaagcaagttaacccaacaccaagcgggaagacatgcccacaccgggagaggtctcgagcggagaggtcgctgcgggccacagcgctctctctctctgccggggcccttctgccctgctgtccaaggcagcatttcccagagggcctgttaacttttatgggtggaccagggtgaaggcaagacaatgctttggactctttttagggtgacataagccgttacagttttactgaccccaggcatgtgacatgcagttgagccctgctcaaggccctgtggatcgtgacacagcttatccacacggggacacctgacttcacctgccctggctgccttaagaggaggggatcccagggtcaactctaatggatgaccacatggcccctatattcaactgcccagatgctgctggcctggttgttaaagtacagaaacatgacacattggtagataacagagccattgtactgagctctcgcccctcccaggagtcctccgtcgcctcatgacccagtaactaaaggcttaatgtccagcccagtggggcaccccaggcccctgttccaggcccaatggactggccacatggattcacgtattttgtttttttgtttgttttgtttttgagatggagtttcgctcttgttgcccaggatggagtgcaatggcacgatctcggctcactgcaacctcctgcctcccaggttcaagcgattctcccgcctcagcctccccaggagctgggattacaggcatgcaccaccacgcccagctaattgtgtatttttaatagagacggggtttctccatgttggtcaggctggtctcgaacccccgacctcaggtgatccacctgcctcagcctcccaaagtgctgggattataggcgtgagccaccgcgcctggcgggttcacgtattttgaatgccacactgtgcccattcctgaagatgcatgagagctttgggagggaatgtgagcagggggcaggcagctttctggccattgatgctgtagcctggggaagcggggtacagggcagccttccggggcactcaagctcacctggcgatgcccccatagtccaggccctcctcgccacgcatgatgatgtagagccggcggcgcaggtcatagggtttcatgttcatgatctgggaagacagagcatcgggccagcctgccactctcccttccacagcaggcaggggcgggagggacaggggactctaaggcccaatatccagcagacacagtcaccaagactcacgccctggaaagtctgcagtgtgggtttaacaggccacgcgataggagatggggtgctgggaggagggcgtcggcctgccactggtttcgggcaccatgatctaacctgttggaaggaatcttcgaaaagcgtctgcctggaaacgctgatcttcacgtggctaggtagggcatttgactgaaaaaaaaaaaagaaaagaactttaaatcgagcctcaagtggtcatctgttctcctgtctgtatgaacaggcattccccagcctgctgggccaggaggcaatagcatgtgccctaggaatgaaaactagcttcctagagacagccagctccgggttagacaagtgtcttgcgcccgcctaagacacaaacattccgatacctgctgctgtgccgggaactcacactgaaataactcaataaccccaactgccacgggagccccagtaccagaactcacatggcagaggaaacggaactggtgatacttccaccgaaaactgcggtcataagcaccaggggaaccttgcttcgtcctaggaagagcaaagatgttcaggggttcatgcgatttctcagaaaatgaacaatttgtctttgtcagccc

SEQ ID NO: 1886556 - DNA, 4001 bp, Homo sapiens
tgcaggacctaatgaggtaagtgaggcctgagcccacagaatccctctcagggaattcgcagtttaggtcaagccacactttggtgggcctctcttcactttgctcttacctaatcaggggaaatctgattaacatatacaacaaagcctcaacggggaataaaaaggtcacaaaagggcagagaaggattcacagaaaaaggaagaggccttgccagttcttgactagttaattagggtcagaaccgtactggggatttcctataccctaagtttgttaagtgattacatcggtctggggaaaagggatctgctcagagtgattcagtcaactttcttagtatcgggtggtgaatcgcatttcctctctgctaccctgtatactgactaatgggtggcgtatggggggtctccaagaggtgtgtttactccaattcagaagctataggatttcagtaggccttggcctgttgggcaatgtgaggtttcaatctttctctctcaaatgagtggggctcttatcagttatgaagggacttcccttgggacttgtcacgacaccatacagcagagatggcaatttgagggcagtttcttgttctgctttgccatcttggggtggctctgaaaagctttctgaacctccgacaaaagaaaaatgttcacaggattgattactacacacaattcagtgaagacaactgggcaacctgaatcaaatgttgagatgaaagataggtgagctctgatgacacacgtttaaattctaggtctacaggtaaaactttgtaaagggccttgcctcagcgacatctgtactgggccctcctttgctgagagcttcttaccccaaccctagcactccaagtcccgagaactgctcaatttcatgggaaaaagtctctataattatatatatatgtatatatgtgtgtatatatgtatgtatatatatgtgtgcatatatatacacatacacatattacaacagactgattttcatgagttgtaactatccttgtagataaaaaacgaaaccattcgaatagcttaaaaaccatgcccacgtggctactggcatcaatattccacacaagattaaaattacttcccaagatgcacaccctgcactccaggtaatatttcaataacttgattaaaaatttctcagaagtctattagaatcagaaaacgctctgcggtgtgggtgaggattttaaatttttgcaacggaaacttttggctccacgaacagaaaagcaagagcaaaaactcagttaaatgcgttcttcctccatctttgcctagtccaaaaggaaaaaaaaagaaacagaaaaaagaaaaactgtttggaagagtagcgttgaggtttgctttttacctgtttttcctctagaacagccaggtggattcacatgatccaattttttaattgtcttctatgtcccactccgaataacccggatgccccagcacaatcagagagatcgttttttttaaaaaaaatttcagcctccaaaggtaggaggggagtgttaggggagaaagtactttaattaaaaatcaataactcgaggtttttgggatacggtttgccatttcctaattaagaaatgggtttgacagtccctttgtacacactgctatgcaaaccccaaagggttggcggctgtccgggcgatgacactccggtcccctgcgagaccccgggccagccaggcccgtccgccgccggcctctggggtccgtccccggctcgcgcagacctctcgcttctctcggctctgtctcctgcgctcagctctgctcggggccggccgcctcaggctcgccgccaccaggtcgttgcaaataccttttccctccccggggccccagcgcgcggccacctcccagcctccccccctcccaccctggcagcggggccctttcccggctcaggaacagcagcagcccgggccgcgccggcaggaagcgaggcccatgttgctgctgttccctggcgcgcctccccgccctccgggggccgccacggctcttccgcgctcccgggcacccccctccgcgcctgcgctgtgccccacgggggcggggctcagattcctgtcagcggcggcggcggtggcggcgaccgtcagttttcgctgaggagaaacacgaaacggaccctttggctctcccccttccccttccccgtcctgaacccctctcctggtcaccgagaatcagtccccgtggagttccccctccacctcgccatcgtttcctcggtcctcggcccagtggaagtcactaccctcgaggaggaggcagcggcagccgccctcgcgtcgccgcccccggttcggtgcccgcggtcccggagaggaggtgccgccgccaccgccgctccccccctcccgctgccctcgggccgggctgggtcgagctgcgatgccctcggacttcatctcattgctcagcgcggacctagacctggaatcgcccaagtccctctactcgcgaggtgagtcaggctgtggggggtggggcgtgggggcggggagacagggagacagggagacagggccaggggaggcgaggggtccccgtcccgccgggggcggctgagccgcgacccccatggcttctttggccggagcgggcagaggccgaagggatcggggtgacggtggagggggcgggcggagcagtggcggcccctcccccgcggagccgccggccgctcggggcccagattccgtcggcccccggggctctgcggcaccggtcgcttctagccgctctcagcccgtccggccccgccaggctccgcgagccgccggccccggcctcccgggctcggggatggccccagactgggccccgcgctggggccaccgcgatcggggcgccgcgtcttctcttaccgggaccctcctccccagcaaagttgcccccaagcgggcggcgtggcctggagccggttctgagtgcagggtcaccattttcctccctttccagcttgtttttgcgccgtcgttccaccccctctccctccggcctagtccactccctccccatgttgggacagcccccctcgaccaggcgttcttcctttcctcgtcatcttcttgctggaaagggcccgatggaaagggcccgaattttcttttctttttttttctcttcccacctccgtggcattctaattacttctcccttctcctttacaaagatgggggtgccctctctggattggttttattcctctcctctcccaggaggaccagcccaggcacagacgctgtcctttgagaattttctctgcttttccgttcaagggctggttgcagggagggagctcaggcagagacttttcatttaagaactcttttggctaaggcctgcaggggattcccagcatctgaaatattagcactggagctgatccctactcaggtgaaattcctttactggacaccacaagaatgtgtcagaacaggttccctgtgcaaggggcttcaaaaccaaaatattcccactgcgctctttacgctttttaaaccaccgggagggggcaaaagacataactgggttgttaactattcatttcaccgtgtaaaaaaaaatgtaggtgtttcttctgcttttggtttgatgtatccatccatttgcttattccaccccctccaaaaaagggacttcaccttcctactagtgtatctaaattgtttaagtgaatcagagtgagatggtttactctgaaaggtgctggactttacagactgaccattgattttgtacacagagtcctacttagtaattgtagccactgtctgttgctccaatgactttagttggcagccaccatcctgtaggatgtttttcgggcaacattacctgaggtactttagaaatattgtagttttgaatgtcaaaaaaaaaagagacatatcaagagatgattcttagagcagggctaatgtgttagaattgagtgctaaaaatagccaagacat

SEQ ID NO: 1886557 - DNA, 4001 bp, Homo sapiens
gaggtaggaggatcgcttgagcctccttgaagtggaggctacagtgagacgtgatggtgtcactgcactacctgggagacagagcaagaccctgtctcaaaaaaagaaaagaagtaataaaacagtcagaagagaaacaactgtattttaggtgacagtctggggtcaatattaagttttctgattctgattattgtactgtgttctgtaagaaatggtccttgctcggccgggcgcagtggctcatgcctgtaatcccagcacttagggaggccgaggcgggtggatcgcctgaggtcaggagttcgagaccagcctggccaacatggtgaaaccccgtctctactaaaaatacaaaaattagccaggcgtggtggcaggcacccgtaatcccagctactcgggaggctgaggcaggagaatcgcttgaacccaggaggcagaggttgtagggagccgagatcacgccattgcacccataggctgggcgacaagaacgagactttgtctcaaaaaaaaaaaaaaaaaaagaaaaagaaatggtccttgctcttagaaaatatacactgatggccaggcatggtggctcacgccttgtaatcctagcactttgggaggctgaggagggcagatcacctgaggtgaggagttcgagaccagcctggccaacatggtgaaaccccatctctctactaaaaatacaaaaaattatccaggtgtggccgggcgcggtggctcacgcctgtaatcccagcactttgggaggctgaggtgggaggatcacgaggtcaggagatcgagaccatcctggctatcacggtgaaaccccgtctctactaaaaatataaaaaattagccaggcgtggtggcgggcccagctactagagacgctgaggcagaagaatggcgtgaacccgggaggcggagcttgcagggagccgagatcgtgccactgcactccagcgtggggcacagagcgagactctgtttcaaaaaaaaaaaaaaaaaaaaaaattatccgggcttggtggcgggcatctgtaatgccagctacctgggagatggaggttttagtgagctgagattgtgccactacactccagcctgggcaagagagtgagaccctcaaaaaaaaaaaaaaaaaaagaaagaaaatatacactgacgtgtctgggctcaagagtcatcatttccgtaacttaactctcaaattgttcagcaggaacatagtgatacgcatgaatacgtgcagggagagatgaggacacgcgtgtaggtaaatgttcatttctggcgaaggatatttgcagggcctcttcatattctcacaactcttctttaactttgaaactgcttcaagaaaaaggcttaaaaaggaaagaaaggcaacatccagaagagacagggcagctcagtgagagtctgcgcaatgcctggcctccccaccatggtctcccagggcaggatgcgggcggcagcatgtgcgtcagatcgcgttttcctgctagcagcttctacagcttggtggagatgcgttcctggggccaggctctggccgagcaaaggatctgtattatgccgtgccaggcagcaccacctccctgaagaggtgtctggaactgacaggttttctctgaacagctgtcttgcaatttgaaagacccctacctcaaaacacacaggggaaggaaggaaggcagggagggaaggagggaagaagcaaaccagaggatgggggaccaggagcagctccagccaggattcaggtgacactgggggcaggatgcagtgagggtcaggcaggtgcagcatcgagggtggtcacgtccacatatggcaatttgatgtggggtgtgtggaactcccacgtggagagttttcacacagcaagttttctcatctcccacagtgtccctgaacttgccctcattgtcatcctgcttctgcctccctccaaggacagcacaaaggcggcaggcacaggactggctgaagggacaagaaagaattgggagtctagaggagctgtgccacctcaagcaggtcatttcccgagtctgaggtgctggggctcggtcccccaggttctgtgtcctcctctgccaaacaggcattgagccaccagcctccaggacagggcctgggacagagttgtcaccatcatcttcatcatcatcattgttctcatcattcttattgctatagtttggatatttgtcccttccaaacctcatgttgaaatttgattcagaacactgggcctgatgggaggtgtctgggtcatggggcaatctctcatgaacagcttgcttggtgccgtcctcacagtaatggatgagttcgctccctattggttcctgcaagagctggctgttaaaaagaagcctggtggctgggcgtggtggctcacgcctgtaatcctagcactgtgggaggctgaggtggctggatcacttgaggtcaggagtttgagaccagcctggccaacatggcaaaaccccgtctctactaaaagtacaaaaattagctggctatgatggtgcatgcctgtaatcccagttactcaggaggctgaagaatgagaatcgcttgaacctgggagccagaagttgcagtgagccgagatcatgccactgcactccatcctgggtgacagagcgagactccgtctcagaaaaaataaaagagcctggcaccttccctgcttcccacttgctgccaccctctcgccacatgatctctgtggctccccttcaccttccgccttgagtggaagcagcctgaggccctcaccatcctggcgccatgtttcttgtccagcatgcagaactgtgagccaaatgaaacttttttttttggagacacactttcactctttttgcccaggctagactgcaatggtgcgatctcggctcactgcaacctccgcctcctgggttcaagcgattctcctgacttagcctcccgagtagctgggattacaggcatgcgccaccacacccggctaattttgtatttttagtagagatggggtttttccatgttaatcaggctagtcttgaactcccaacctcaggtgatccgcctgcctcagcctcccaaagtgctgggattacaggcgtgagccacggtgcccagcatgaacctcttttctttataaattatccagccttgggtattcctttgcagcaacacaaatggactaagacaggtgtcacctcactactgttgtcatccttgtcactgtcatcattgttgctgccacctttaccatcatcatcctcatcatcgtcatcagtgtgattgccactaggtaccaccagggcacccccactacgtggccccaattccacagtgtggcctgttgtgttgggggtgaatttatgtgggagtgtggagagccctgtccactccctttgagatctggggccagcctcctgcagagaccacagatgctttcatgcgagaggccccttagatgagctgaaatgtctgagaaggaggagttacagctttgattctacatctgtctgaatagaagccatacagttgtctaaacatagggaagagccactgttaccttaaactttatcatcatcgtcatgacaatatcagctgatagatatccagctgttttcagtgtgccaaattctgggccaagtttgctataaaaacgatgccactgaaccctaacaatgccctaagagataaacattatcaccatcctgttttataaatgaggagctggggctcacagctgtccagcgactcccagcacccagggctagcaagctacagctctgggctgccagacactaaagccaagcccacatcactgcactgggttgcagtgttctattccacacgccagaattctagattgtttgagtttgttacaaacacacgtatctttgtaactagaaaataaagatttaaggccggacgcagtggctcaagcctgtaatcccagcactttgggaggctgaggcgagcagatcacc

SEQ ID NO: 1886558 - DNA, 4001 bp, Homo sapiens
cacttctttgggggttagcgggggtggggagggaacagcaactgcttaatgaagtttctcacacagaggcaaaaagagaaaagccaaaatatattcagtgtatccagcagttccatgctgaattttttttttccttattggttgaggggggtgtgtaggagggtggtgggaaggatctgaaaagaagctgtgattctttgctgaattaatgatgacttctcactgcaaaatgctgatttataatctcttcaccatactagactgtttccagactcagaggggggttaaagtttgttaaatgtattcataattacatgcacagtttcagacggctgaatataagtaatgcttgtgctgttgcgaatgctcaccattaaagcagaaattgtttcacatttagcactaaattctgtctgattttgcacacttaacaattcagtaattttaacattcggcttcgtcgcctccattatagctcagtatcttggagaaacagtcagtgttccggcctcgttaattcatgtaaaacaccctatttgtagaagtatcattaaaggctaatttgatgagatatccttatttagcaaagcaaataggatttgacagtcagctccgggtggcgatttagcaaagcacaaacacaattcacaacgtgacaatttcccatccacgcgcctcgctggaattgtggactcctgaaaattgtgctgtttcatcgtgtcccatactaaagagaaagaactctggaagtaaagaactgtttttgccaaggcagcacaaatgtcatctgtgtgtacatgtgccatgtctttcaaatcctaaatcttgtatcaagaacgctgtgttcaaaggttttttccaggtacagctcacttttctattccctgctatgtagacttaatttaaatctagacttgcaaataacttaggatgtgtgaaagtctatataggttacaactatatagggtgtgtgtgtgtgtgtgtgtacacacaactgaaggttaatgttctgcgacggggatttatacacactacccttgctttagagacttcccctgaacgtattatccagccttctataaaacgcctggctgggtgcagtggctcatgcctgtaatcccagcactttgggaggctgaggtgggcggatcacgaggtcaggagatcgagaccatcctggctaacacggtgaaaccccgtctctactaaaaatacaaaaaaattagccgggcgtggtggcgggcgcctgtaatcccagctactcgggaggctgaggcaggagaatcgcctgaacccgggaagcagaggttgcagtgagccaagatcgcgccactgcactccagcctggtcagagcctggacagagcgagattctgtccccaaaaaacaaacaaacaaacaaacaaaacaaaacagaacaaaaagaacgccttcaacagcaaagagttgcaaagaaatgttgcaattccaggtggaagcaaacagctggtttctcctaatttagcaaacgtaaagacaaatctaatgtcgttacaattcatcatttcaggagcgccttatttgggggcttcaaacactttgccacaattgacatcctactaattcctttccaatccaatactgtcccttaaaccactgtgggggtggtcagggggaatgtactttctcctccttgtatcgtttttcggcctcccaaggagagaagcccttggaaaacacagtaggttcggcaaactgagaacacacacttataagaataccgccctcgaagggaccttttagttttatggaaagtagcaaacctccccctctttccccgcccccccgccagccgggttttggacgcgctccctgggggtggtagctctctgccctcaccctcccgagactgccggggcctgagtccctcgctgtccagaatgaccccaaaagcgggactttgagggccagttggataaaacataaactcatctcgccctcaaaaccccgattctgagaccacagcctccaaaagcctcttttcccaagaagtgagtccccattcacggctgacagcaccggggcaggccgcctttgaggcaagagtttggagaaccgggatcactgaaggaatcgttactgggtgttccctcagggcggcggttcatctcaccaaaatgccagggggtcgctgtgggaggaggggacatttgccacaccatggctgagggcaagaggatcgcttgatcccggggtgtctcttccctcccggagcaatcaccaatctcgcccagcaaacaggcctaaaagcttcccggacaacacgaggggtgccccaaacgtcccttagcagcggataaatcgggtgtccgaggtgcctcgtacagttccccccaccccatctccagctaaataaagtttggttatttgtgtccttaatcgtctctcattaaagtcaaatttgctgcgcgcccaagttgggggaaatgatttccattttaatagcttaattagcctctaggttctggaaaggccactcccccacgcaccttttctcctcattttaacccccctccctttttcacaacttctcctaaaaataaattataaatatggatgtgtcctcagaggacataagcggcgcattccaacgctccgcttggtggggattggaagcaaagagaaaccagaaacgccactccccccacccccaaatcaaaatgcctttttctttttttttctaacttctttttcctaacttggtgttgtctcgggcacagacaccccgctccgcaccccggaacctagtttttttgcccccgtcctgcagaagctaaagccaacgcgccagggctgcctgcttctcggggggagggagctgacaactttagggggcggcggtaactctctggggacggtggttcccggctagtccgggatccccggggcccggcccccgcaggcgccgccgcccatgccagcggggctcgggcgcacgtggagcggcgggcgcggccggcctgctccgcgcgcggcattgagatcggggtcacgcagcgagtcagtttcccgagcgggctttccggggtgggggcggggacgcggacgctccaccgcctcgtcaatttccaagcccaggcactagggaggctgggggcggcctcgcccccttcctacctcccggcttcacacgcccctctggggagcgggggaggggtccgagggggagccggggtggcggcagcggcggcaatcgcagcccagacaagcgtctcgcgccgagtcccgagagaaccgcgcgctcccccgccgccacctcccctctcccgttcccatccaccccgcagacagccgccccacaccccttcggccctgggggcttgggcacccacctgccgcgatccctgccttggctggcggaaggtgccaggcgggaagaaggggagcactcaccgccgctgccgcctccgggggtgcacgggcccccccacccagggctgcgccttcccgggctccgggcaggcgtgcgccgggcggggggcgccccgcgggccctgcagcctccgcctcgattggagcccagccttaaatcctccaccgtggagaagaagggtacttccagaaaaaaaatccgcccctccccagacgagatccaagtgatgggcggggagcgtagaaaatccttttctgcagagagcgcgcagccgacggggctgcacccggcctccacggtccgctgccgccacaaagccgcgcccccgccccccccaaccccccagcgccctatggccggcccggggcgggggctgggccggcccggggttggccgcgctggggaggcggcggcggcagcggcccaggcggcggggcggctcctccccggccaggcagagagggcgagagcctggaagcctagcgcgcccgcccgggtgggggtgggggtgggggtgggggtgggggtgggggcgggggccggggtgggggggcgccttcctagaaacgctcgccaaatatagtcagcgg

SEQ ID NO: 1886559 - DNA, 4001 bp, Homo sapiens
gcctttagctggtgttatttaccagtaatgcttggagaaagaatccaaaattacccccactaaaatgctcacgacccagttgtttctgtgtttgtcaaagtgtttctggtatattctagaatataccaaagataattacttgaatcatttagaaaattttacattatatcctcttataaggcacttggaaattcacccttttttttttttcggcttggctttctaaatgtactttaacatcaatttataatattaagagttcctaaggagagagatttcttagaagaataatcgtgtcttgtcttagagccacagcctttcacaatctgaagtgaatggtgcagagagctttcttgtcaagtcatatgtttcttcctgcagctcggcttgcccttcccctgcttgtgccgtgtaccctgtaacactgtgtttggatcccagcatcagatggtgagttctacttttggtttgtaaaatcatgtgggattgtgttttgaaactgcctttcaaatgaagttctttttgctggcctccagataattagtaacttactcatgtattgcttggatccttacattgtgtaatatatgcttctgttaatatgtgaatgtccatgaaggttggttggtatataggtcaggagcacctggcttttaaggagtcttgtaattactgtatcacctgctttaagtagaaacatggcagctcaattaagcaccagaaatttcttctgaagctcctacttttaatgagttagcactgttgcctggatttatgaatgggcagattttgaaaatgaggttcttcattgtcatcatggaattgagttctgcttattttcagacatgcaggtgataaatctctccttaatgattccagaaggaaaaggaagggatggattttagagttttttatttcttttgtcaaggtagttttattttctagttcaggtacatcagtgagtaatagtagagatacattcttggctgttttaggagagttaagagaacatttcatttaaatgtaaatgtttaaaatcaaagaaatgttcctgcatatgtacagtttttacctttaattttgtttaactgatttttctagtcttcaaggaaaactatttgattttcacatctatgatgagagaaaacagaaaaattgtcaagagtaagaattgatttgacattacttttgagagttatctgcttcttttgtaagtcataatttttcattttatagcttttatactgggcacctcattttttaatgatttgttttggttccaggatgttgccttcctggagaaactgattaaagatgatatagagcgaggaagactgcccctgttgcttgtcgcaaatgcaggtaggtagcatgatgctgaatctaccattttgaatatataggagcgaggctacgtcctcagcctataaaagataaagtcttaagaaatgtgtgtgtaccacatgtttaagatagtccatatccacattgtagcaaaaactgtaatagtaaggttggctcgttagatttttctttaatcgttggtttgttttggaagttattttatgtgtgtgtatactttttcatttagatggtaaatgcttctctatcttctccttcatgtacttcttttccctgttctaaactgaattttattttatttttttgagatagagtctcactctgttgcccaggctggagtgcagtagcacaatctcacctcactgcaatctctgcctcccgggttcaagtgtttctcctgcctcaacctcctgaattgctgggattacaggtgcatgccaccacatctggctaatttcttgtatttttagtagagacagggtttcactatgttggccaggctggtctcgaactcctgacctcaggtgatccgcctgcctcagcctcccaaattgctgggattacaggcatgagccactgtgcctggcctgaatttttaaatgacacatttaagccaggtgtggtggcacatgcctatagtccctctactcaggagacaagcaagatgttggcttaagctcagaagttcaataccagtctgggtaacatagcaagaccccatctcaataaataaataaaaataattgtactgacgttgtaagattgttgtaaaaattaaacaagaaaattcataagatgtcacacttaaatatctaccttataggcggcagagcaactaccacttgctgctccatttatctcattcagcatcatacttgaaatctaagacagtgcaataaggcaaaaaaaataactgacagattagaaaggaagaaataaaactttgtttgcaggcatgattgtatagatagaaaactaaagaaaagctactggaactaatgatcaaatctaaaccattttctggatttttacatactagcaaagaagaattggaaattgaattttaaatgtcatttataataggatcaaaaaagatgaaaaatttatggataaatttaacaaaatatatgcaagatctgtacattgagaactaagaatgttactgagagaaattcaagaagacccaagaacgatatgccatacacacgggttggaagactaagtattaagtcagttcttcccaaactaatctgtagattcaacttgatccatcttaaaatctcagcaggctacaatttcttaatagaacttgatgagctaattctaaagtttatatagaaatacaagggatctaggaacagcccaagggattttgaaaaagaacaaaattggaagacttaccttgtcatacttcaagacttctgtaaagtagcaagtaagactgtgtgagattaaccaaagaaaatagagaattcagaaatagactcatgtgaagtatatggacacttcaggtttttacagatgcctgagtaattcgagggagaaaggaccatctttttccatcagtggtcttagagcttggatatccatatggaaaaaaactgaatcttaacccttatcttattctctgtatatataaatattaactataaatggttcatcaacctaagcatagatctaagacaataaaatgtctcaaagaaaatacaggagatctttgtgaccttaggttacatttcttaggatacaaaatatgtgaaccataaattgtactttatcaaaaattaaaagcattagctgtttgaaagcccctattaagaagatgaaaggcaagttacagactgggagaaatatttgcaaaacatttttttctttttttttttttttttttgtctttttctatttttattttttatgtttttgagatggagttttgctgtgctgcccaggctggagtgcagtggtgcgaccttggctcactgcaacctccgcctcccaggttcaagcgattcgcctgcctcagcctcccgagtagctgggattacaggcgcacgccaccgtgccgggctaatttttgtatttttagtagagacgagatttcgccatgttggccaggctggtctcaaactcctgacctcaggtggtccacctgccttggcctcccaaagtgatgggattacaggcgtgagccgccacactcagccagccactgtcccagtcctgtcttcttttaaaatttctttttcattcttttccccagaagctacaaaacatttgtttgacaaagaacttgtatctaaaatatataaagaactgttacaactcaataaggacacaagcaatacaattttttttttttttggagatggagtctcattctgttgcccagactagagtgcagtggtgcgatcttggctcactgcaacctctgcctcccgggttccagtgattcttctgccttagcctcccgagtacctgggattacaggcatgtgccaccacacctagctagttttttgtatttttagtggagatggagtttcaccgtgttggccaggctggtcttgaactcctgaccttaggtgatctgcctgccttggcctcccaaagtgctgggattacaggtgtgagccactgtgc

SEQ ID NO: 1886560 - DNA, 4001 bp, Homo sapiens
ctttagctggtgttatttaccagtaatgcttggagaaagaatccaaaattacccccactaaaatgctcacgacccaattgtttctgtgtttgtcaaagtgtttctggtatattctagaatataccaaagataattacttgaatcatttagaaaattttacattatatcctcttataaggcacttggaaattcaccctttttttttttcggcttggctttctaaatgtactttaacatcaatttataatattaagagttcctaaggagagagatttcttagaagaataatcgtggcttgtcttagagccacagcctttcacaatctgaagtgaatggtgcagagagctttcttgtcaagtcgtatgtttcttcctgcagctcggcttgcccttcccctgcttgtgccgtgtaccctgtaacactatgtttggatcccagcatcagatggtgagttctacttttggtttgtaaaatcatgtgggattgtgtttggaaactgcctttcaagtgaagttctttttgctggcctccagataattagtaacttactgatgtattgcttggacccttgcattgtgtaatatatgcttctgttaatatgtgaatgtccatgaaggttggttggtatataggtcaggagcacctggcttttaaggagtcttgtaattactgtatcgcctgctttaagtagaaacatggcagctcaattaagcaccagaaatttcttctgaagctcctacttttaatgagttagcactgttgcctggatttatgaatgggcagattttgaaaatgaggttcttcattgtcatcgtggaattgagttctgcttaatttcagacatgcaggtgataaatctctccttaatgattccagaaggaaaaggaagggatggattttagagttttttatttcttttgtcaaggtagttttattttctagttcaggtacatcagtgagtaatagtagagatacattcatggctgttttaggagagttaagagaacatttcatttaaatgtaaatgtttaaaatcaaagaaatgttcctgcatatgtacagtttttacctttaatcttgtttaactgatttttctagtcttcaaggaaaactatttgattttcacatctatgatgagagaaaacagaaaaattgtcaagagtaagaattgatttgacattacttttgagagttatctgcttcttttgcaagtcataatttttcattttatagcttttatactaggcacctcattttttaatgatttgttttggttccaggatgttgccttcctggagaaactgattaaagatgatatagagcgaggaagactgcccctgttgcttgtcgcaaatgcaggtaggtagcatgatgctgaatctaccattttgaatatataggagcgaggctacatcctcagcctataaaagataaagtcttaagaaatgtgtgtgtaccacatgtttaattaagatagtccatgtccacattgtagcaaaaactgtaatagtaaggttggctcgttagatttttctttaatcgttggtttgttttggaagttattttatgtgtgtgtatactttttcatttagattgtaaatgcttctctatcttctccttcatgtacttcttttccctgttctaaactgaattttattttatttttttgagacagagtctcactctgttgcccaggctggagtgcagtagcacaatctcacctcactgcaatctctgcctcccgggttcaagtgtttctcctgcctcaacctcctgaattgctgggattacagctgcgtgccaccacatctggctaatttcttgtatttttagtagagacagggtttcactatgttggccaggctggtctcgaactcctgacctcaggtggtccgcctgcctcagcctcccaaatcgctgggattacaggcatgagccactgtgcctggcctgaatttttaaatgacacatttaagccaggtgtggtggcacatgcctatagtcgccctactcaggagacaagcaagatgctggcttaagcccagaagttcaataccagcctgggtaacatagcaagaccccatctcaataaataaaaataattgtactgacattgtaagattgttgtaaaaattaaacaagaaaattcataaaatgtcacacttaaatatctaccttataggcggcagagcaactaccacttgctgctccacttatctcattcagcatcatacttgaaatctaagacagtgcaataaggtaaaaaaaaaactgacagattagaaaggaagaaataaaactttgtttgtaggcatgattgtatagatagaaaactaaagaaaagctactggaactaatgatcaaatctaaaccattttctggatttttatataccagcaaagaagaattggaaattgaattttaaatgtcatttataataggatcaaaaaagatgaaaaatttatggataaatttaacaaaatatatgcaagatctgtacattgaaaactaagaatgatactgagagaaattcaagaagacccaagaacgatatgccatacacatgggttggaagactaagtattaagtcagttcttcccaaactaatctgtagattcaactcgatacctcttaaaatctcaacaggctacaatttcttatagaacttgatgagctaattctaaagtttatatagaaatacaagggacctaggaacagcccaaagaattttgaaaaagaacaaaattggaagacttaccttgtcatacttcaagacttctgtaaagcagcaagtaagattgtgtgagattaaccaaataaaaaagagaattcagaaatagactcatgtgaagtatatggacatttcaggtttttacagatgcctgagtaattcgagggagaaaggacaatctttttacatcagtggtcttagagcttggatatccatatggaaaaaaaactgaatcttaacccttatcttattctctgtatatataaatattaactataaatggttcatcaacctaagcatagatctaagacaataaaatgtctcgaagaaaatacagtagatctttgtgaccttaggttacgtttcttaggatacaaaatatgtgaaccataaattgtactttatcaaaaattaaaagcattagctgtttgaaagcccctattaagaaggtgaaaggcaagttgcagactgggagaaatatttgcaaaacatttttttcttatttcttttttttttgtctttttctatttttattttttatgtttttgagatggagttttgctgtgctgcccaggctggagtgcagtggtgcgaccttggctcactgcaacctatgcctcccaggttcaagcgatccgcctgcctcagcctcctgagtagctgggattacaggcgcatgccaccatgccaggctaatttttatatttttagtagagacgagatttcgccatgttggccaggctggtctcaaactcctgacctcaggtggtccacctgccttggcctcccaaagtgatgggattacaggcgtgagccaccacacccagccagccactgtcccaggcctgtcttcttttaaaatttctttttcattcttttccccagaagctacaaaacatttgacaaagaacttgtatctaaaatatataaagaactgttacaactcaataaggacacgagcaatacaatttttttttttttttttgagatggagtcttattctgttgcccagactagagtgcagtggtgcgatcttggctcactgcaacctctgcctcccgggttccagtgattcttctgccttagcctcccgagtatctgggattacaggcatgcgccaccacacctagctagtttttttgtatttttagtagagatggagtttcaccgtgttggccaggctggtcttgaactcctgaccttaggtgatctgcctgccttggcctcccaaagtgccgggattacaggtgtgagccactgtgcccggccc

SEQ ID NO: 1886561 - DNA, 4001 bp, Homo sapiens; identical to SEQ ID NO: 1886559

SEQ ID NO: 1886562 - DNA, 4001 bp, Homo sapiens; identical to SEQ ID NO: 1886560

SEQ ID NO: 1886563 - DNA, 4001 bp, Homo sapiens
accccccagccactctagggccaccctcacctctgcagggcctgggcaggttcatgggctcagagacccgaaacccttacaaagatgttgttttgaactttagagatggggtctgattgcccaggatggtgcagtggctcgcgcacggctcactgcagccttgacctcctgaggccagaccgccaaagcctggaagtaaaagctcgcgtcaggagcccaaagacccaaagccaggcctgagcgaagcccttttggaattctcaacccagaacgctcctgaagtcgcagccacacgtgctcagcaaggagccctcactactgcaggatggttaccttcgaagggagcgggctcagggcagacgacgtgaggggagacgacgacgtggggggagacgacgacgtgaggggaggcgacgtgggggaggcgacgtgggggaggcgacgtgggggaggcgacgtgggggaggcgacgtgggggagacgacgacgtgggggagacgacgtgggggaggcgacgtgggggaggcgacgacgtgggggaggcgacgtgggggaggcgacgtgggggaggcgacgtgggggaggcgacgggccgctccttactgcacagaggccaagctggatggaagatcgaggcaactgtacagaaaaatccagcacaaaagacccgcgcgccccagttatctgggcgttgccgacactcagctccaattcaaaagggaggtgatgaagccgctcgctgcgtgcaagacagagcccgccctgaagcagccgggacagcagcacccggagcgtggaggccgcgggcctgtgactggcgcagccccagtcctgggaggcggcccctttcttaggaaaagtgaggagcaggaagctgcattctgtcccccggggcctcggtcaaagccaccagagccctgaggccacaccgagaaacacagatgccccgtccggccggggcagccccgcaacctgtgcccagacagctctcggggcacaccggggtgccagacttggtcggcagctcctcctgctgtgcccagggcgggggataccatggggggctctgctcagtgctctgaggggcaggcgtggtgcctccctcgagctgggctgcagtctcctggtctggccacagcccggcgccggtcagccttgccagggggggtctacccttgttgcctctctgtgctgagccgccggtgcccggcccgtagatgacttactgattgagggcgccaggcactctgtcagctgtacagggacctcagccccacgccggccgcatggccgcatggccgcaggctgccctggctctcccaggctccaccagcctgtgcaccaccccttcatccatgtgggggagcggtcatggggccacagcacctgctgtcctggggcgttgggagaattcagcggccaccagggcagcgagccaggcaggcagctcttcagtaaacgccagggctgtcgcgctgaccctccccagtcccggcgccctccgtcggagcacggcaggggtcgcctgtgcatgcacgtggtggggagggctccgcgtgtggaggcccagctgccttcccgcagtctgctcgcccaccgctctcgcccatctctagcctgggggtctcctcaccatgcaccttgggggcctgtttgcagcagcagacaggagctgcctggagcccaggccccacagcagcgggcacgggcaggagtggccccagggatgccgacccaggggagggccaggcaggaggccagggtgaaagagaaagagcggcgtggcgtcatcatacaccacggcctgaccccgcaggccaggtccaaagtctaacacacgccccacatacccggcacagcagaccccacgcctgccccgcggctctgcctccctccccatagccagagccacggccgccacccccggtagtcccaggccagtccctggggatcccgggagtgtggcccgaggctgccgggagctgcagactggagaggccatcccgaggtctgaaactcggcctggtgctcaaaaagcaggggccgagagtcctctgccctctggaaaacgagaaagggaacgacaatcctttctacatttttctgtttaagttttttgagacaccgtctagcgtctcactgtgtcgcccaagctggagtgcggtggcacgatcgcagctcattgcagcctggaccctcccaagctcagggtttgtatttttattttgagacagagtctcactctgtcgcccacactggagtgcagtggtgcaatcttggctcactgcaacctccgcctcccaagttcaagcgattctcctgcttcagcctccctagtagctaggattataggtgcccgtcaccacgcccagctaatttttgttttagtagagatggggtttcaccatgttggccaggctggtcttgaactcctgacctcaggtgatctacccgcctcggcctcccaaagtgctgggattacaggcgtgagctactgcgcctggccaaattttttttttctaattaaccagctatggtggtgcacgcctgtagttccagctacttgggaggctgagatgggaggttctcttgaacccaggaagtagaagctgcagtgagctgtgatcacaccactgtactccagcctgggtgacagagtaagaccctgtctctaaataaataaataagtgaatgaatgaaaaaaagacaggcacgggtggatgagacagggagagaggccccacatggctggccaccagggaaacgcagatcaaagccaaggggacaccagctcccaccccctgggacggccagaatcacaaggacagacaacggcaggagctgtcgagggagtggagacgccaggaccctccccagcgttgccggtgggaactaggtaatgcagccgctgcggaagatggcttggcagttcctcaagacattatgaaagttcaccacacgccccagcaatcccactcctaggtatctatgcaagataaatgaaaacaggtccacgcaaaacctcgtaaacaatgttcacagcattgtccacagaagccacgtggaagcagtcctagcgtccatgaatagataaaatgcggttcatcccgcaaaggagcagtgaatgaaactgcctcgggctgcaggtgcatgaatctggagggcacggtgccgagtgaagaggccagacacggggccccacgtcctgtggccccacgtccacgcaccttctgcacaaggcaaacccagccagccacgtcctgtggccccacatccacgcaccttctgcacaaggcaaacccagccagccacgtcctgtggccccacatccacgcaccttctgcacaaggcaaacccagccagccacgtcctgtggccccacatccacgcaccttctgcacaaggcaaacccagccagccacgtcctgtggccccacatccacgcaccttctgcacaaggcaaaccaagacaggaagccggtcagtggccgtctggggctgagggtccctctgggctgcgggatgctgtaacactggactgtggggctgggggtccctgtgggctgtggaatgctgcaacgctggattgcaatgacggctgcacaactctacaaaccactaagagtgaccaaactgcactcttttaacaggtgagtctggtaagttctacctcaacaaagctgttgtcggcacacgtggagatgctcactgggaggcggctggtgcggtaacaccaggaactgggaggcgctccggtgccaccacacgcaggaggagcacagacccttcctctgccgaccaccaggccccacacggcccctccccggccctgcctttgccgcgtctctctgtccatcagggtaactcgcagacagggctccagggctcccccacacggcccctccccggccctgcctctgccgcgtctccctgttcatcggggtaactcgcagacagggctccagggctcccccacacagcccctggctaatcccctgcat

SEQ ID NO: 1886564 - DNA, 4001 bp, Homo sapiens
gctcacacggacggtcacacggacggtcacacgctcacatggacggtcacggatgctcacatggatggtcactcacacagacggtcacacacggacggtcacacgctcacggatgctcacatggacggtcacacacggacggtcacacgctcacacggacgctcacacggacggtcacacgctcacacggacggtcacacacggatggtcacacagacggtcacacggatgctcacatggatggtcacacgctcacacggacggtcacacgctcacacggacgctcacacggtcggtcacacggatgctcacacggacggtcacacgctcacacggacggtcacacgctcacacggacgctcacacggacggtcacacggatgctcacatggatggtcacacgctcacacggacggtcacacacggacagtcacacgctcacacggatgctcacacggacggtcacacacggacggtcacacgctcacacggacgctcacggtcacacggatgctcacatggatggtcacacgctcacacggacagtcacacgctcacacggatgcttacacggacggtcacacacggacggtcacgctcacacggatgctcacacggacggtcacacacggacggtcacacgctcacacggatgctcacacggtcacacgctcacacggacgctcacggtcacacggatgctcacatggatggtcacacgctcacacggacagtcacacgctcacacggatgcttacacggacgctcacacggatggtcacacatgctcacacggacggtcacacgctcacacggacgctcacacggacggtcacacagatgctcacatggatggtcacacacacggacggtcacacggatgctcacatggacggtcacactctcacacggatggtcacacacacggacggtcacacgctcacacggatgctcacatggacggtcacactctcacatggacggtcacacggatgctcacatggacggtcacacggatgctcacatgggcggtcacactcacacagacggtcacacggatgctcacggatggtcacacggatgctcacatggacagtcacacagatgctccatggacggtcatatggatgctcacacgggcggtcacgctctcacacggacggtcacacggatggtcacacagatgctcacatggacggtcacactctcacatggacggtcacacggatgctcacatggacggtcacactctcacatggacggtcacacggatgctcacacggacaggcacacagacgctcacacggacggtcacacggatgctcacatggatggtcacactcacatggacagtcacacggatgctcacacggatggtcacacggatgctcacacggatggtcacacggactctcacatggacggtcacactctcacacggacgctcacacggacggtcacacggctgctcacacggatggtcacacggacgctcacatggacggtcacactctcacacggacgctcacacggacggtcacacggatgctcacacggatggtcacacggacgctcacatggacggtcacacgttccacacgaacgctcacgtggatgctcacatggacgctcacacgctcacatggacgctcactcacatggacacacacggaaacacggacagtcacatggaccgtcgcacactcacagacggtcacatgctcacacggatgctcacaccgatggtcacatggacgctcacacggacggccaggatgtggtgatgtgagacacgcagggcggccgtaccccgatgagacagaagccacacacaggcacccaagagggacagacatgcgacacacgagccctcttggctttgacaagaggccctggaacggggctgtgtggcagttcagccagtgccacgtgtccccagtgccgtgcactgcgcgaatgtctcaagacagcgcctggcacgtgtgtacacatggcacgtggtgacggcacacatgtggccacacagacacacacacactctgcagcagtggcccgagaacactgcctggcgtttgcactcacaccgactgcattccagacacacactcactaagccacgccaggcgtgaaggaaaatgtccatctgggtcaggaaggagggcgcccagcgctgaggatggacggcgccctcatggtgaatcaaggggttttggctgagcagatgggactgactcaaatatgtgtcccccaagggaccaaaggttgtggcaggacagaatccacaccagagaagagagagcaggtgtccagcagggacgggctccttccagctcaactgcccagcaacagcatacatcaccaaggcctgtcccagcacccctgaccccacaaaggcaagcactcgggacaggggaggggggccgtgccttcctcctttagctggctcatgccttcagaggcacaaggctgtggctgccatccacgcctgcaggcaggtggcagacagcacgtgagccccaccctctccttcctggccagggtctcggcctggggaggcaggggacacacgagcccggaggtggctcttaatgccaccaccgcaacagcaggcgtgaccgattccgtgcgctggtgatgcggctcagtaccaccgccggccagggagggaggcaggggtagcccagccatagccctgcccctctgtcgcccccatggagcatgctcccgtcagggcctcggcatgctcagggagacagggccgccagccccagcgccttcttcccgcagggccaacgtcttctcacgtgctgtggagatctggcaaggaggcccaggggccagagtaatgtagctgcgcagaccccactgcagggtgccttctggctggatccagtcatggcaaccaaggctttggtgtaaacctggatgagacccctccctctcccacagaggtgcaggggtcctgtttcacaaatggaggcttcctggggtccgtggctggggaaggcccctaccacacagccactgctgctggcgttgctcccacggccggtgccaaaggtcctgtgtgcccagaagaagtgaatggctggggccaggtcaggcagaaggacctggttgtggcagcgctgacaagagagcaccccagatccatcccttacaaaatgatcgaggggcttcttccagagggcaccgtctggttccctgaggggagtgcagcagccctgacatagccttcaggagccgtggcagagctgcagaggggaccccagcagtggggccctgacaaggacgaggtgcaccaccatggggcttcccactgaactctcggcgccaggacgagccaagggacgggggcggcgcccagcccagactcagctcaggtccctgggtcccgcggggacacctcgacagcaggttcctgggccaccttctgccccacaccatgagagaaacatgcaggacgaagtactccttgccccgcagccacgcgcctcttccaggtaggcctggcctggcccatgacgacggcagcatcaggcggctctggagctggggcagcctctgctcttggctgagctcacatggccctggggctctcaggacctctcgggtgttgtctgtgggcctggggtggggatcactgcaactcggaacctgggctctcggccggcgtcctgagttcacacgtcacacctctgggatctgggatgagctgggcacactgttgctgggctcctcctgcccaggcgccctccgacacagcctcagaggcactcctgtctgaggctgcgctggcaaggaggcagctgaaggttctggaatgctgcagctcccaggggatggccaaactgcctgcctctgcccccagctcccctgaaaaacaacacaaagatcccgggtccaggttcgattttaattccagttagcttggaatcctcttccaactgccgagagccagaggtgaggatgtcccagcgtgcatgccacgagacgggagc

SEQ ID NO: 1886565 - DNA, 4001 bp, Homo sapiens
gggaccagtcacagggagtgtggacagtcaggggtttgctttctgctcctgagttggggtgtgcagcgtggagcccacagcctggttctgggccagggcacagtgccaggggctccgctctgacctccaggagggagactgggcccgggacccctgttttctgctccctggactgcctagccctgagtgccacggatgaccagcgttctgttttctcttctcaataaccctatctcttcacacatccccaggcccagtgcttgccggctgtggtgaccctgcctggtgctggagggcagtatgggaggcaccagtgtgccctgctcaccccattagtgtcatcctgccatcttctgtgtccccttggccctggcacacacccatgtggcaaacacgggccgtgaggctccctgaacagcttcgaggcgggtgggcttctggagccctcttggctctgaggacagccacagtggggtcagacgtcagggattggtgcagccccacgtcaggggtgattgtcttgactttctctccatttgagttctggggtgggtggctcccttcccccttgcttacaggtgctgtcctgggcacaggaggtacgcgcctggctctgccactgttctcttccctctgctgcaaagcccagttaaggaaatgtctccaggtccaaagagataggatggtctgggccccacctgttggaagggaacagccagggaagaaccacctgcctgggcagggcctcgcctgagggagggcctggggcagggcacaaggggttgatctcagcccacaagccccaggggcagcccaggaaagcaggcgacggatgtggatcctgacctcctgagaggtgtgaggtgcagggatacccacctctgccttgacggccgcgcaccccttaggaagtggctgtccagcgcctgcctgtgctgggcctgggagaggagctgtcttgccagggctcccaggcagggagaggcaggtgaggttctcagccgatgtgttagaggttgagcatcgcctgtgcccagcttgctggctgtcagtgcttgatgtgcccatcctcagctaaaacccagagctggcatgttggtcatccccacctcagacgggacgcccagtccagagctggtgagccctgggccagcctttgggcctggcctgccccattcaccggccagcgccccacctccctggctggagggtcggggaggggctggcagagatggttggtccacagggctagccctgggtggtgggagaggggcccagggtcagggtgagagagagctgggccagggagctgctgcaggatgattttgaggtgtgggggaagcactcttggttggttttggtttgctttttaaaaattgtggtaaaatacataacaaaagtaactatcgtaacctgagcagttctgtgacatgaagtgaattcactgctttgtgtgaccttggccaccatcattccccaccactcactcccgctgggctcccagccctgccccaccattccgctccctctacagctatgggttttacaaagaaggatgcagggcgccctgactgcggggtgaggggcaggcctgcccgcggtgtgggcattcgctgaagggggacgcccaggtgtctgcctgagttacgggttggggggtcgggcatgtggggagggatggagttggaggtgcatgctctcagagctggtaggggtggcccgtttcgtcccgtgtgtgaactggagatgagacccggcgcctgcgatcccgcagaccgcgcccggccgggtgtcacttgtgggcgcacgctgccgggatgctgggccgagcccgcggtttaagacccagatctcagccaggtccctttcgccgtccgagcctctgcacctcgtgggctccgagcacatccaggccagagactgcgtttggggcgtgggcacgggagaccgtcatcagccaggacgctctcgaccgatccggccgcgccccgcccagcctcgtagcgcaggcgctgagtccaggctgacgcgcaactctgggagcgttgcggcacgcggggccttgcctactgtgggaggggcttctgggggcgggcttctgtcgggccaattaggatcgccgcagggaaggcacgcgccgcggctgagcaacaggggcgcgcgtcaccttctctagttaacccgcgcggccccgggcacagagcccgaggctgcgcggtccccggcgggcccgcggaccccccccatctctgcgccccccacatctctgcggaccccgcctcgccccagccctcccatccacaaccctcacaaccttgcataccccgctacgctccccaccgcgccctcacattcctgcagaccccgtctccccacaacgctccccgccaacgctgcggagctccgcgtcgccccagcgctccctgccaagccccccacacccctgtagaccccgcctcgccccaaccctccgagctgctccccttatacccttgcggacctagtttgtttcgtcccagtcctccccgtcgcgtctcccacatccctgcggacctccccgcgcctcgcctctcccttctgttacgtatcacgcacaggtggatcccactacgacccagcttggctcctgtcccgcacctccgcacctggcctctagccccgccctcactgtcttgggaaatgaagcggaggggtgggccggacactctagaagcaccctggctcggagcttccctagctcggagttggtttggagcccaggctagggacccagggtgggcgcagcaggggagattggcaccagaagcgtggaggaagggcacctcttcagcccggcttttccgcccctggagtctgggacagctccggagcgtccgggtactccctcccagactggccctgttccttttatcacatttatgtcacacacgttttttctaaatgggtttacacttttgctattactttgcagttcggtttgtgtgtgtgtgacggagcctggctgtgttgcgcaggctggagtgcagtggtgcgatctctgctcactgcagcttccgcctcccgggttcaagcgattctccgcctcagcccccttagtagctgggattacaggcgcacgccaccacacctgactaatttttttgtatttttggtagagacagggtttcactatgttggccaggctggtcttgaattcctgacctcaattgattcgcccgcctaggcctctgaaagtgctgggattacaggcgtgagccactgtgcccagcctttttttttttttttttttaacacggagtctcattctgttgcccagcccggcgcgatcctggctcactgcaacctcagcctcctgggttcaagtgattctcctgcctcagccttcccagtagctgggattacaggcatgcaccaacacgcccagattttttttttttttttttttttttttttttttagtagagacagggttttaccatgttagccaggctagtctcgaactcctgacctcacgtgatgtgcgtgcctcggcttcccaaagtgctgggattactggtgtgagccaccacgcccagttttttttgtttgtttggttttttttgagacagagtctcactctgtcgtccaggctggagtgcagtgatgctacctcagctgactgcaaactcactgaacctctcaggttcaagtgatcctcctgcctcagcctccagttcctggctaatttttttagttttcgtataaacggggtttcatcgtgttggccaggctggtctgtaattcctggcctcaagtaatccacccacctcggcctcccgaagtgctgggattacaggcgtgagccactgcgccttgtctgcgcccagtttttgtttgttttttaaagagacgggatctcactatgttgcccaggctgatcttgaagtcctgggctaaatttttgtcactgtgcctggctaatttttgtatttttagtataaatgggatttcaccacattggc

SEQ ID NO: 1886566 - DNA, 4001 bp, Homo sapiens
cctacacatttcagtggttcagctagaaacaaacgattcacttatcgttgattcctcccttccctcacctcctgtattaaatacatcagcaagacctttctgctctatctctgaagcatagccccaagctcaccacttcctgccactgttacttccatcaccccaatccaagccattgctgtcttttgcctaaaccaacacaacgtcctctttgcttctctccctaaattcattcttgcttcccaataatccaatctcctcaaaatttaaagaagcaattgtttaaaaacatacatcagatcactcccctttccctacttaaaccctccaatgccttctgttgccattagaataaaatctaaactcctttccagggcacccacatgacccggtccctgccatcgttctcatctcttcctctcaatcacttgactctggccaccctggcctctttgctattcctgaaactcagggagctcatttcctcctgggggcctttgcaattatggtcccctctgcctgggcagctcttcccccagatctttgcataaactggcccttcccctcctcaggtctcagctcagatgctgcctcctcagagagaccttccatgataccaatcatcctctgtcacattgccttgttctgcttcttttcttcgtaacgcctggcattatccaataacttctaatgtgtgtgtttacctttcgtcctccatcagcactgtgctcctaagagctgaggctcggtctctctcacaccactaaacccccagtatgccaagcagcacccagcacaggggagatgctcagttaatacttgttgaatgaattaatgatgctccccctaaaactaaactttacaaagcacccactagacaacagattagaaaacattttataggccaggcgcggtggctcacacctgtaatcccagcactttgggaggctgaggcaggcagatcatctgaggtcggggtttgagaccagcctggccaacatggtaaagccctgtttctactaaaaatgcaaaaattagccaggcttggtggcaggcgcctataatctcagctactagggaggctgaggcacgataatcatttgaacccaagaggcggaggttgcagtgagctgagatcacaccactgcactccagcctgggtgacagagaaagaccccatctcaaaaacaacaacaacaacaaaatgtcttctgtaaagacccagatagcaagtattttaggctttttaggctacctggtctttgccacaactacttatatctggcactgtcaggcaaaagcagccataatctgcaaatgaatgggcatggctgtgtgctcataacactttatttataaaacaagaacagtgggccatagtttgctaacccctgcactagcccagtctaagtcttgaatatcatctgtgtaattaattcacagtgaggagttctccactgtaataattactcattccgtgaatgcatgccactcaggtgaggcgttcttgaaactctgagaggcaagaagcaaaatgttctttctccatacccaggcacactccagtctgtgaaaaggaagcaagagaggcaggctgcaagtttgatcactgggtggctgctagccacctctccccctcagctccaagagcagaaacaggatgaaaacgcagcagctgccggcttctgtcctcttgccagctgcctctcttgcaagactagacagggaggggcagccgccagtctccggaggcacagactgcacagaattgaggatcacttgttccaatgcattcatcttatcttacaaaatcttcaaattccaaaagcacacgtaagaagggctgctgtttcattcacacagtgaaatattgtgcatctgaaagaatatgtagatgggtggcatcttcaacaaccccaggatcacagacgtttaaatttcaccccttctactgctgtaaggcacagcagaaggagtgtaatttaaacgtctgtgatcctggctgggcgtggtgactcttgcctgtaatcccaacacttagggagcccaaggtgggaggattgcttgagctcaggagttcaagaccagcctgggcaacctagtgagagctcatctctacaaagattttttttaaaaaaattagccaggtgtggtggtgcactcctgtagtcccagctactcagcaggctgaggcacgatgatcccttgaccctgggagatcaaggctgcagtgagctgtgatggtgccattgtactccagcctggggaacagaacaagaacccatctaaaaaaaaaaaaagaaagaaaagttcatattccaaccaagatctcaccattgcatcatcaagcataaacacctgcccccactgaaaaagtacagaggaaggcagtcatatcatatcttccctcctgacctcaccaagttccagggcaggaagagtctcgccaccccagcacacagtaggcccactggaaaatgagtgctcccttctctaggcatttcattgtcatggtcataaagtcaggttcatttttctaatgaaagagaaagccaaaaatggaggctgatttttttcttttttctttttttttttttttagtctcactctgtcgccaggctagagtgcaatggtgtgatctcggctcactgcaacctccgactccctggatcaagtgattctcctgtcagcctatcgagtggctgggactacaggcgcccaccaccacgcctagctaatttttgtatttttagtagagacggggtttcaccatattggccaggatggtctcgatctcttgacctcatgatctgcccatctcaacctcccaaagtgctgggattacaggcatgagccaccacaccgggcctggagggtgattttgaccaggccttctcaagttttggaaggaagtggagctcacttctcttctgttgcttttgcccacccaggatcacttattcctctgggtaatacagcaccccaggcacaggggccgcctgtcacataagcgtgggcatggctcatgtgcggccaggccccagtgattctgcaaaggttgcccataagtccttcccccgccccaggactggcatattgatgtggtgggatggaagctgtccttctgctgggtctgcagatgggggcaatgtaaagcctgacattgccggatgatgtcagaagcagaacccataggcaaaagccagctttccagcactccactctcagtttcctgccatctccacttctgtggatgtgtgcccggcatctgcctctgcccctgcctctgagagcagtgactgagcaaacagtcctggacctggttgaaaggatgggcctgtctgtttctagcagagtggtctttcagaaagctgattcctgaaagttggcatcaagggaagcagagccaggaggtggaaattgagactgggtcccgctatgcatgaagccagagactcttggatttctccgttacttgaccagaggaatgccccattttgctcaagctagttggagttggatttctgttacttgaaaccaagagagccttaactaatacataactagaaatgcatccatggtcactgcccattcatgtgacagacatttattgagcactattccagttacctaatgttgcatgagttaccccaaaacttagaggcttaattcagtcgtataagatattcacagatcccgtgggtcaagaatttgggaagacactgtaggttgaactttgttctctgctttgtctttcttggaaagagaggacacagcttgaagtcattactgatttgggactgtatgtaatgcatatctgtgcttcattgtcactgtgtttttaagttttctaaacttaaaacagctcattttcgggggacataaagaacctgggaagagctcagctgggcagcactgacctggggtctcttgagtggtggaagtcagatgtcatctgcagctgcactcaccagaaggcttgaccggggcggggaaattcg

SEQ ID NO: 1886567 - DNA, 4001 bp, Homo sapiens
acacatttcagtggttcagctagaaacaaacgattcacttatcgttgattcctcccttccctcacctcctgtattaaatacatcagcaagacctttctgctctatctctgaagcatagccccaagctcaccacttcctgccactgttacttccatcaccccaatccaagccattgctgtcttttgcctaaaccaacacaacgtcctctttgcttctctccctaaattcattcttgcttcccaataatccaatctcctcaaaatttaaagaagcaattgtttaaaaacatacatcagatcactcccctttccctacttaaaccctccaatgccttctgttgccattagaataaaatctaaactcctttccagggcacccacatgacccggtccctgccatcgttctcatctcttcctctcaatcacttgactctggccaccctggcctctttgctattcctgaaactcagggagctcatttcctcctgggggcctttgcaattatggtcccctctgcctgggcagctcttcccccagatctttgcataactggcccttcccctcctcaggtctcagctcagatgctgcctcctcagagagaccttccatgataccaatcatcctctgtcacattgccttgttctgcttcttttcttcgtaacgcctggcattatccaacaacttctaatgtgtgtgtttacctttcgtcctccatcagcactgtgctcctaagagctgaggctcggtctctctcacaccactaaacccccagtatgccaagcagcacccagcacaggggagatgctcagttaatacttgttgaatgaattaatgatgctccccctaaaactaaactttacaaagcacccactagacaacaggttagaaaacattttctaggccaggcgcagtggctcacacctgtaatcccagcactttgggaggctgaggcaggcagatcatctgaggtcggggtttgagaccagcctggccaacatggtaaagccctgtttctactaaaaatgcaaaaattagccaggcttggtggcaggcgcctataatcccagctactagggaggctgaggcacgataatcatttgaacccaagaggcggaggttgcagtgagctgagatcacaccactgcactccagcctgggtgacagagaaagaccccatctcaaaaacaacaacaacaacaacaaaatgtcttctgtaaagacccagatagcaagtattttaggctttttaggctacctggtctttgccacaactacttacatctggcactgtcaggcaaaagcagccataatctgcaaatgaatgggcatggctgtgtgctcataacactttatttataaaacaagaacagtgggccatagtttgctaacccctgcactagcccagtctaagtcttgaatatcatctgtgtaattaattcacagtgaggagttctccactgtaataattactcattccatgaatgcatgccactcaggtgaggcgttcttgaaactctgagaggcaagaagcaaaatgttctttctccatacccaggcacactccagtctgtgaaaaggaagcaagagaggcaggctgcaagtttgatcactgggtggctgctagccacctctccccctcagctccaagagcagaaacaggatgaaaacgcagcagctgccggcttctgtcctcttgccagctgcctctcttgcaagactagacagggaggggcagccgccagtctccggaggcacagactgcacagaattgaggatcacttgttccaatgcattcatcttatcttacaaaatcttcaaattccaaaaagcacacgtaagaagggctgctgtttcattcacacagtgaaatattgtgcatctgaaagaatatgtagatgggtggcatcttcaacaaccccaggatcacagacgtttaaatttcaccccttctactgctgtaaggcacagcagaaggagtgtaatttaaacgtctgtgatcctggctgggcgtggtgactcttgcctgtaatcccaacacttagggagcccaaggtgggaggattgcttgagctcaggagttcaagaccagcctgggcaacctagtgagagctcatctctacaaagattttttttaaaaaaattagccaggtgtggtggtgcactcctgtagtcccagctactcagcaggctgaggcacgatgatcccttgaccctgggagatcaaggctgcagtgagctgtgatggtgccattgtactccagcctggggaacagaacaagaacccatctaaaaaaaaaaaaagaaagaaaagttcatattccaaccaagatctcaccattgcatcatcaagcataaacacctgcccccactgaaaaagtacagaggaaggcagtcatataatatcttccctcctgacctcaccaagttccagggcaggaagagtctcgccaccccagcacacagtaggcccactggaaaatgagtgctcccttctctaggcatttcattgtcatggtcataaagtcaggttcatttttctaatgaaagagaaagccaaaaatggaggctgatttttttcttttttctttttttttttttttagtctcactctgtcgccaggctagagtgcaatggtgcgatctcggctcactgcaacctccgactccctggatcaagtgattctcctgtcagcctatcgagtggctgggactacaggcgcccaccaccacacctagctaatttttgtagttttagtagagacggggtttcaccatattggccaggatggtctcgatctcttgacctcatgatctgcccatctcaacctcccaaagtgctgggattacaggcatgagccaccacaccgggcctggagggtgattttgaccaggccttctcaagttttggaaggaagtggagctgacttctcttctgttgcttttgcccacccaggatcacttattcctctgggtaatacagcaccccaggcacaggggccgcctgtcacatgagcgtgggcatggctcatgtgcggccaggccccagtgattctgcaaaggttgcccataagtccttcccccgccccaggactggcatattgatgtggtgggatggaagctgtccttctgctgggtctgcagatgggggcaatgtaaagcctgacattgccggatgatgtcagaagcggaacccataggcaaaagccagctttccagcactccactctcagtttcctgccatctccacttctgtggatgtgtgcccggcatctgcctctgcccctgcctctgagagcagtgactgagcaaacagtcctggacctggttgaaaggatgggcctgtctgtttctagcagagtggtctttcagaaagctgattcctgaaagttggcatcaagggaagcagagccaggaggtggaaattgagactgggtcccgctatgcatgaagccagagactcttggatttctccgttacttgaccagaggaatgccccattttgctcaagctagttggagttggatttctgttacttgaaaccaagagagccttaactaatacacaactagaaatgcatccatggtcactgcccattcatgtgacagacatttattgagcactattccagttacctaatgttgcatgagttaccccaaaacttagaggcttaattcagtcgtataagatattcacagatcccgtgggtcaagaatttgggaagacactgtaggttgaactttgttctctgctttgtctttcttggaaagagaggacacagcttgaagtcattactgatttgggactgtatgtaatgcatatctgtgcttcattgtcactgtgtttttaagttttctaaacttaaaacagctcattttcgggggacataaagaacctgggaagagctcagctgggcagcactgacctggggtctcttgagtggtggaagtcagatgtcatctgcagttgcactcaccagaaggcttgaccggggcggggaaattcg

SEQ ID NO: 1886568 - DNA, 4001 bp, Homo sapiens
cacatttcagtggttcagctagaaacaaacgattcacttatcgttgattcctcccttccctcacctcctgtattaaatacatcagcaagacctttctgctctatctctgaagcatagccccaagctcaccacttcctgccactgttacttccatcaccccaatccaagccattgctgtcttttgcctaaaccaacacaacgtcctctttgcttctctccctaaattcattcttgcttcccaataatccaatctcctcaaaatttaaagaagcaattgtttaaaaacatacatcagatcactcccctttccctacttaaaccctccaatgccttctgttgccattagaataaaatctaaactcctttccagggcacccacatgacccggtccctgccatcgttctcatctcttcctctcaatcacttgactctggccaccctggcctctttgctattcctgaaactcagggagctcatttcctcctgggggcctttgcaattatggtcccctctgcctgggcagctcttcccccagatctttgcataactggcccttcccctcctcaggtctcagctcagatgctgcctcctcagagagaccttccatgataccaatcatcctctgtcacattgccttgttctgcttcttttcttcgtaacgcctggcattatccaacaacttctaatgtgtgtgtttacctttcgtcctccatcagcactgtgctcctaagagctgaggctcggtctctctcacaccactaaacccccagtatgccaagcagcacccagcacaggggagatgctcagttaatacttgttgaatgaattaatgatgctccccctaaaactaaactttacaaagcacccactagacaacaggttagaaaacattttctaggccaggcgcagtggctcacacctgtaatcccagcactttgggaggctgaggcaggcagatcatctgaggtcggggtttgagaccagcctggccaacatggtaaagccctgtttctactaaaaatgcaaaaattagccaggcttggtggcaggcgcctataatcccagctactagggaggctgaggcacgataatcatttgaacccaagaggcggaggttgcagtgagctgagatcacaccactgcactccagcctgggtgacagagaaagaccccatctcaaaaacaacaacaacaacaacaaaatgtcttctgtaaagacccagatagcaagtattttaggctttttaggctacctggtctttgccacaactacttacatctggcactgtcaggcaaaagcagccataatctgcaaatgaatgggcatggctgtgtgctcataacactttatttataaaacaagaacagtgggccatagtttgctaacccctgcactagcccagtctaagtcttgaatatcatctgtgtaattaattcacagtgaggagttctccactgtaataattactcattccatgaatgcatgccactcaggtgaggcgttcttgaaactctgagaggcaagaagcaaaatgttctttctccatacccaggcacactccagtctgtgaaaaggaagcaagagaggcaggctgcaagtttgatcactgggtggctgctagccacctctccccctcagctccaagagcagaaacaggatgaaaacgcagcagctgccggcttctgtcctcttgccagctgcctctcttgcaagactagacagggaggggcagccgccagtctccggaggcacagactgcacagaattgaggatcacttgttccaatgcattcatcttatcttacaaaatcttcaaattccaaaaagcacacgtaagaagggctgctgtttcattcacacagtgaaatattgtgcatctgaaagaatatgtagatgggtggcatcttcaacaaccccaggatcacagacgtttaaatttcaccccttctactgctgtaaggcacagcagaaggagtgtaatttaaacgtctgtgatcctggctgggcgtggtgactcttgcctgtaatcccaacacttagggagcccaaggtgggaggattgcttgagctcaggagttcaagaccagcctgggcaacctagtgagagctcatctctacaaagattttttttaaaaaaattagccaggtgtggtggtgcactcctgtagtcccagctactcagcaggctgaggcacgatgatcccttgaccctgggagatcaaggctgcagtgagctgtgatggtgccattgtactccagcctggggaacagaacaagaacccatctaaaaaaaaaaaaagaaagaaaagttcatattccaaccaagatctcaccattgcatcatcaagcataaacacctgcccccactgaaaaagtacagaggaaggcagtcatataatatcttccctcctgacctcaccaagttccagggcaggaagagtctcgccaccccagcacacagtaggcccactggaaaatgagtgctcccttctctaggcatttcattgtcatggtcataaagtcaggttcatttttctaatgaaagagaaagccaaaaatggaggctgatttttttcttttttctttttttttttttttagtctcactctgtcgccaggctagagtgcaatggtgcgatctcggctcactgcaacctccgactccctggatcaagtgattctcctgtcagcctatcgagtggctgggactacaggcgcccaccaccacacctagctaatttttgtagttttagtagagacggggtttcaccatattggccaggatggtctcgatctcttgacctcatgatctgcccatctcaacctcccaaagtgctgggattacaggcatgagccaccacaccgggcctggagggtgattttgaccaggccttctcaagttttggaaggaagtggagctgacttctcttctgttgcttttgcccacccaggatcacttattcctctgggtaatacagcaccccaggcacaggggccgcctgtcacatgagcgtgggcatggctcatgtgcggccaggccccagtgattctgcaaaggttgcccataagtccttcccccgccccaggactggcatattgatgtggtgggatggaagctgtccttctgctgggtctgcagatgggggcaatgtaaagcctgacattgccggatgatgtcagaagcggaacccataggcaaaagccagctttccagcactccactctcagtttcctgccatctccacttctgtggatgtgtgcccggcatctgcctctgcccctgcctctgagagcagtgactgagcaaacagtcctggacctggttgaaaggatgggcctgtctgtttctagcagagtggtctttcagaaagctgattcctgaaagttggcatcaagggaagcagagccaggaggtggaaattgagactgggtcccgctatgcatgaagccagagactcttggatttctccgttacttgaccagaggaatgccccattttgctcaagctagttggagttggatttctgttacttgaaaccaagagagccttaactaatacacaactagaaatgcatccatggtcactgcccattcatgtgacagacatttattgagcactattccagttacctaatgttgcatgagttaccccaaaacttagaggcttaattcagtcgtataagatattcacagatcccgtgggtcaagaatttgggaagacactgtaggttgaactttgttctctgctttgtctttcttggaaagagaggacacagcttgaagtcattactgatttgggactgtatgtaatgcatatctgtgcttcattgtcactgtgtttttaagttttctaaacttaaaacagctcattttcgggggacataaagaacctgggaagagctcagctgggcagcactgacctggggtctcttgagtggtggaagtcagatgtcatctgcagttgcactcaccagaaggcttgaccggggcggggaaattcgc

SEQ ID NO: 1886569 - DNA, 4001 bp, Homo sapiens
cacatttcagtggttcagctagaaacaaacgattcacttatcgttgattcctcccttccctcacctcctgtattaaatacatcagcaagacctttctgctctatctctgaagcatagccccaagctcaccacttcctgccactgttacttccatcaccccaatccaagccattgctgtcttttgcctaaaccaacacaacgtcctctttgcttctctccctaaattcattcttgcttcccaataatccaatctcctcaaaatttaaagaagcaattgtttaaaaacatacatcagatcactcccctttccctacttaaaccctccaatgccttctgttgccattagaataaaatctaaactcctttccagggcacccacatgacccggtccctgccatcgttctcatctcttcctctcaatcacttgactctggccaccctggcctctttgctattcctgaaactcagggagctcatttcctcctgggggcctttgcaattatggtcccctctgcctgggcagctcttcccccagatctttgcataactggcccttcccctcctcaggtctcagctcagatgctgcctcctcagagagaccttccatgataccaatcatcctctgtcacattgccttgttctgcttcttttcttcgtaacgcctggcattatccaacaacttctaatgtgtgtgtttacctttcgtcctccatcagcactgtgctcctaagagctgaggctcggtctctctcacaccactaaacccccagtatgccaagcagcacccagcacaggggagatgctcagttaatacttgttgaatgaattaatgatgctccccctaaaactaaactttacaaagcacccactagacaacaggttagaaaacattttctaggccaggcgcagtggctcacacctgtaatcccagcactttgggaggctgaggcaggcagatcatctgaggtcggggtttgagaccagcctggccaacatggtaaagccctgtttctactaaaaatgcaaaaattagccaggcttggtggcaggcgcctataatcccagctactagggaggctgaggcacgataatcatttgaacccaagaggcggaggttgcagtgagctgagatcacaccactgcactccagcctgggtgacagagaaagaccccatctcaaaaacaacaacaacaacaacaaaatgtcttctgtaaagacccagatagcaagtattttaggctttttaggctacctggtctttgccacaactacttacatctggcactgtcaggcaaaagcagccataatctgcaaatgaatgggcatggctgtgtgctcataacactttatttataaaacaagaacagtgggccatagtttgctaacccctgcactagcccagtctaagtcttgaatatcatctgtgtaattaattcacagtgaggagttctccactgtaataattactcattccatgaatgcatgccactcaggtgaggcgttcttgaaactctgagaggcaagaagcaaaatgttctttctccatacccaggcacactccagtctgtgaaaaggaagcaagagaggcaggctgcaagtttgatcactgggtggctgctagccacctctccccctcagctccaagagcagaaacaggatgaaaacgcagcagctgccggcttctgtcctcttgccagctgcctctcttgcaagactagacagggaggggcagccgccagtctccggaggcacagactgcacagaattgaggatcacttgttccaatgcattcatcttatcttacaaaatcttcaaattccaaaaagcacacgtaagaagggctgctgtttcattcacacagtgaaatattgtgcatctgaaagaatatgtagatgggtggcatcttcaacaaccccaggatcacagacgtttaaatttcaccccttctactgctgtaaggcacagcagaaggagtgtaatttaaacgtctgtgatcctggctgggcgtggtgactcttgcctgtaatcccaacacttagggagcccaaggtgggaggattgcttgagctcaggagttcaagaccagcctgggcaacctagtgagagctcatctctacaaagattttttttaaaaaaattagccaggtgtggtggtgcactcctgtagtcccagctactcagcaggctgaggcacgatgatcccttgaccctgggagatcaaggctgcagtgagctgtgatggtgccattgtactccagcctggggaacagaacaagaacccatctaaaaaaaaaaaaagaaagaaaagttcatattccaaccaagatctcaccattacatcatcaagcataaacacctgcccccactgaaaaagtacagaggaaggcagtcatataatatcttccctcctgacctcaccaagttccagggcaggaagagtctcgccaccccagcacacagtaggcccactggaaaatgagtgctcccttctctaggcatttcattgtcatggtcataaagtcaggttcatttttctaatgaaagagaaagccaaaaatggaggctgatttttttcttttttctttttttttttttttagtctcactctgtcgccaggctagagtgcaatggtgcgatctcggctcactgcaacctccgactccctggatcaagtgattctcctgtcagcctatcgagtggctgggactacaggcgcccaccaccacacctagctaatttttgtagttttagtagagacagggtttcaccatattggccaggatggtctcgatctcttgacctcatgatctgcccatctcaacctcccaaagtgctgggattacaggcatgagccaccacaccgggcctggagggtgattttgaccaggccttctcaagttttggaaggaagtggagctgacttctcttctgttgcttttgcccacccaggatcacttattcctctgggtaatacagcaccccaggcacaggggccgcctgtcacatgagcgtgggcatggctcatgtgcggccaggccccagtgattctgcaaaggttgcccataagtccttcccccgccccaggactggcatattgatgtggtgggatggaagctgtccttctgctgggtctgcagatgggggcaatgtaaagcctgacattgccggatgatgtcagaagcggaacccataggcaaaagccagctttccagcactccactctcagtttcctgccatctccacttctgtggatgtgtgcccggcatctgcctctgcccctgcctctgagagcagtgactgagcaaacagtcctggacctggttgaaaggatgggcctgtctgtttctagcagagtggtctttcagaaagctgattcctgaaagttggcatcaagggaagcagagccaggaggtggaaattgagactgggtcccgctatgcatgaagccagagactcttggatttctccgttacttgaccagaggaatgccccattttgctcaagctagttggagttggatttctgttacttgaaaccaagagagccttaactaatacacaactagaaatgcatccatggtcactgcccattcatgtgacagacatttattgagcactattccagttacctaatgttgcatgagttaccccaaaacttagaggcttaattcagtcgtataagatattcacagatcccgtgggtcaagaatttgggaagacactgtaggttgaactttgttctctgctttgtctttcttggaaagagaggacacagcttgaagtcattactgatttgggactgtatgtaatgcatatctgtgcttcattgtcactgtgtttttaagttttctaaacttaaaacagctcattttcgggggacataaagaacctgggaagagctcagctgggcagcactgacctggggtctcttgagtggtggaagtcagatgtcatctgcagttgcactcaccagaaggcttgaccggggcggggaaattcac

SEQ ID NO: 1886570 - DNA, 4001 bp, Homo sapiens; identical to SEQ ID NO: 1886566

SEQ ID NO: 1886571 - DNA, 4001 bp, Homo sapiens; identical to SEQ ID NO: 1886567

SEQ ID NO: 1886572 - DNA, 4001 bp, Homo sapiens; identical to SEQ ID NO: 1886568

SEQ ID NO: 1886573 - DNA, 4001 bp, Homo sapiens; identical to SEQ ID NO: 1886569

SEQ ID NO: 1886574 - DNA, 4001 bp, Homo sapiens; identical to SEQ ID NO: 1886566

SEQ ID NO: 1886575 - DNA, 4001 bp, Homo sapiens; identical to SEQ ID NO: 1886567

SEQ ID NO: 1886576 - DNA, 4001 bp, Homo sapiens; identical to SEQ ID NO: 1886568

SEQ ID NO: 1886577 - DNA, 4001 bp, Homo sapiens; identical to SEQ ID NO: 1886569

SEQ ID NO: 1886578 - DNA, 4001 bp, Homo sapiens; identical to SEQ ID NO: 1886566

SEQ ID NO: 1886579 - DNA, 4001 bp, Homo sapiens; identical to SEQ ID NO: 1886567

SEQ ID NO: 1886580 - DNA, 4001 bp, Homo sapiens; identical to SEQ ID NO: 1886568

SEQ ID NO: 1886581 - DNA, 4001 bp, Homo sapiens; identical to SEQ ID NO: 1886569

SEQ ID NO: 1886582 - DNA, 4001 bp, Homo sapiens
cagggagcgcaggagcaatgtggccccgaggggcacgggctccattggtccaggagaacccattcttctcccaccctcgagaccacccagcaaagccccaaggacacacggctcccctaaggaagggtggccacaggcgggagtgacccagaaacgttacaaaaccaaatgccagaacccacccaatgtttagcaagcctggggatgtgccacgtcccccagggatccagcacgcacccaaagagacactgtcccggcgaggagcctggagcctgggaaatacaaggcatcagactggtcccaagactctccccagcgctggggacaactgtctgcttatcttagtcccctgcgcccttttcaatccaaccctgggtcctgggcacctcatagttccaaacccctgctatgcacatcccggctgtgatgcctgggacaggtcctgtcctggctgtgatgcctgggacaggtcgtgtcacctctccaaacctgtttcctcatctgtgaaatgcaaatctccacggtccctatgcctcggatggtcagagtcaggattccgcatgacgacccccaacaggagcctggcacagacctggctctgggcagcgtctccataaaggccacctgttgtttttatctcccgaaagcgaacatgacaaggctttaaccccccacggcaatccgccctcacccctgttctcaggatagccttggaacccaatagcagagcgcctgaggcccttcatgaccccagcccacccgcgagcccacctcccaccctgcccctacccctcacacctcccgtggccagcctccagcctcacggtctttgctcacaccgttcaccccccttcttctggacccacctcatcgccccttcctaagcatcagcccaattcttgcacatccatcaaatccttgtccagacacctcctggaactcttccctgcagccccctacagccatccccacctctccgggtaccccgcagccccaggccgcatcccaattcctctccaattagcgactgtttgtcctcccagctgagcgcggcctccgcgccccgcccccgctggcgtctgcacagcccccgggtgggacgtctgtctccagacccggggtttttcggctccccggggccgtgccaaccgcggctccaggcgttccttatttagcagggccgctgtgctgcgccggagcctcgccctgggagcgtcctggcccgcgtcctgcttcccgtcccgggccagggaacgcgcccacgcccgcccgtcccgcggcctctcccgggtgccgctgggcccgctactcacagcgctgtggcgtccgcggggatgcgcagcgcgggaccgagcgtccgcagcccgcggcccgcggcccgagcagttgacgcggcaggcggcgccgggcgctaggccgcagaggcaggggggctcgcaaggcccgcagccgcgcccggggccccccgccagcgccccgagccacaggcccaggcccagggccagcgccaggcgggcgggcgcggcgggcggcatcgttagggcagcgcgcgcatggccccgccgtccccaggcccgcccgcgcgcggaggccgcggctcaggcggggccggcggacggcatggcgggcgcggggctggatggggctgcggccgcgacctgctgctgagcgacgcccgctcggggctcggggccaggccgctccgggagctcggccgcccgctcggacgttggcgctgcagtgcgggccccgccgcggctcctcctcctcctccccgcgcggcgcagggcggacggggcgagggggggcggggcgggtgcaggctccgcccccttcgccacagcgcgaccgggccagcgatgagggactggcatccggaggcttcaccctccgctccacagggtcggcagcagggcggggcctccggaagctccgccccacgctttcccggggcgcatgcgacgtggggcggagcgtctggaagctccgcccgtcgcactgtagagtcggccgaggcgcacgaggtatttttcacgctccgcccctctgcaggctaaagtgcgtgggcgggaagcggtgggcagggtgccatctggctccgcccttctcctgtggtgtgggccaggcggcggcttcctcctcctgcagcagccacaggctccactctgatccttctcccgcggcatggatccttctcccgcggcgtggatccttctcccgcaatctccgtgcgcgtccccagtcagtacccgcagcctcccgacgcacccgctggctccaagcctccctaccccaggtttcctggctaagagagagacagagggagagagggggaagagagagaacaggcaatgggaggttgatggtgagagcttattgaaagacaagagggaggaaacccacatccttcattccccatccattcatttattgccttatttattccattgaatcttcacagctctagaaaaagtgtgctacaattattccctttattaaatgaggtcactgaggcacagtttaagaaatttgccagcagggcacagtgggtcactccggtaatcccagaactttgagagggggaggaaggtggatcccttgagcccaggagttggagaccagcctggccaacatggcgagaccccgtttctacaaaaattagccaaaattagccaaactggctcacacttgtagtcccaggtactcgagaggctgaggccggaggagcgtgtgagcccaggaggcagtggctgcgctgagccgtgattgtgccactgcactccagcctgggcaacagagtaagaccctgtctcgaaaaaaaaaaaatggaaaaaagaaaaaaagaactggctgggagtggtggctcatgcctgtaatcccagcactttgggaggccgaggtgggtggatcacctgaggtcaggagtttgagaccaacctgaccaacaaggtgaaatcccatttctactaaaaatacaaaaattagccaggcgtggtggcaggtgcctgtagtcccagctactagggaggctgagacaggagaatagcttgaacctgggaggcagaggttgcagtgagccgagattgcaccactgcactccagactgggcaatacagtgagactccgtctcaaaaaaacaaaaaaaatcctaccacatgtgctccaccaagctctgtctccaaggtggccttggaagccacatggggaaggtggcagagactctaggagcctgagcagaaacccagatgattatgaaaaatgcagacctacccatccttattcacctgggaccaccgtgaactatatcataagaaataaacccctattgtacatacatgcaccattcgagttgggtctatttgttacagcagtttagccaaccctaatccacatatacagtgtcaacagtggctgagatgacatgttgcacagacatgagagtcagaaagacctgagttcaagtcccagtgatgacatttactatctgtgtgaccttgaaaagctgcctaactactctcagaccgtttcctcatcagtttgttttgagagtcaaatgagaaaattactaaaaagcccttagcactgcatctaagatggggaagagacagtcaatgaattcaagtttcctgaagcccagttgcatccctgccctgccctgggctctgagagacagttgccgaagctagtgttaaagtgaactaaatatggcctgagtgggacttcgtacttctatagttgagtccttgtggacaaattgcaacctagcttaataggtagacaagattgaaaacctaacttaggagtatgcgcctgtaacaatagctgagtcttggccaatcccagaggccgtagttcaaccgctcatacgctgctgagtgttcaaactgtactcaaataaggcaaacgccaacttgtaacaatccagccattctgtacttcacttctgatttctgtacatcatttcccttcttttgtccataaatcttcttccaccacgtggc

SEQ ID NO: 1886583 - DNA, 4001 bp, Homo sapiens
tccgcagtcagggagcgcaggagcaatgtggccccgaggggcacgggctccattggtccaggagaacccattcttctcccaccctcgagaccacccagcaaagccccaaggacacacggctcccctaaggaagggtggccacaggcgggagtgacccagaaacgttacaaaaccaaatgccagaacccacccaatgtttagcaagcctggggatgtgccacgtcccccagggatccagcacgcacccaaggagacactgtcccggcgaggagcctggagcctgggaaatacaaggcatcagactggtcccaagactctccccagcgctggggacaactgtctgcttatcttagtcccctgcgcccttttcaatccaaccctgggtcctgggcacctcatagttccaaatccctgctatgcacatcccggctgtgatgcctgggacaggtcctgtcctggctgtgatgcctgggacaggtcgtgtcacctctccaaacctgtttcctcatctgtgaaatgcaaatctccacggtccctatgcctcggatggtcagagtcaggattccgcatgacgacccccaacaggagcctggcacagacctggctctgggcagcgtctccataaaggccacctgttgtttttatctcccgaaagcgaacatgacaaggctttaaccccccacggcaatccgccctcacccctgttctcaggatagccttggaacccaatagcagagcgcctgaggcccttcatgaccccagcccacccgcgagcccacctcccaccctgcccctacccctcacacctcccgtggccagcctccagcctcatggtctttgctcacaccgttcaccccccttcttctggacccacctcatcgccccttcctaagcatcagcccaattcttgcacatccatcaaatccttgtccagacacctcctggaactcttccctgcagccccctacaaccatccccacctctccgggtaccccgcagccccaggccgcatcccaattcctctccaattagcgactgtttgtcctcccagctgagcgggcctccgggccccgcccccgctggcgtctgcacagcccccgggtgggacgtctgtctccagacccggggtttttcggctcccccgggccgtgccaaccgcggctccaggcgttccttatttagcagggccgctgtgcccgcgccggagcctcgccctgggagcgtcctggcccgcgtcctgcttcccgtcccgggccagggaacgcgcccacacccgcccgtcccgcggcctctcccgggtgccgctgggcccgctactcacagcgctgtggcgtccgcggggatgcgcagcgcgggaccgagcgtccgcagcccgcggcccgagcagttgacgcggcaggcggcgccgggcgctaggccgcagaggcaggggggctcgcaaggcccgcagccgcgcccggggccccccgccagcgccccgagccacaggcccaggcccagggccagcgccaggcgggcgggcgcggcgggcggcatcgttagggcagcgcgcgcatggccccgccgtccccaggcccgcccgcgcgcggaggccgcggctcaggcggggccggcagacggcatggcgggcgcggggctggatggggctgcggccgcgacctgctgctgagcgacgcccgctcgaggctcggggccaggccgctccgggagcttggccgcccgctcggacgctggcgctgcagtgcgagccccgccgcggctcctcctcctccccgcgccgcgcggggcggacggggcgcggtgggggcggggcgggtgcaggctccgcccccttcgccacagcgcgaccaggccagcgatgagggactggcatccggaggcttcaccctccgctccacagggtcggcagcagagcggggcctccggaagctccgccccacgcgttcccggggcgcatgcgacgtggggcggagcgtctggaagctccgcccgtcgcactggagagtcggccgaggcgcacgaggtatttttcacgctccgccccactgcaggctaaagtgcgtgggcgggaagcggtgggcagggtgccatctggctccgcccttctcctgtggtgtgggccaggcggcgggttcctcctcctgcagcagccacaggctccaccctgatccttctcccgcggcatggatccttctcccgcggcgtggatccttctcccgcaatctccgtgcgcgtccccagtcagtacccgcagcctcccgacgcacccgctggctccaagcctccctaccccaggtttcctggctaagagagagacagaaggagagagggggaagagagagaacaggcaatgggaggttgatggtgagagcttattgaaagacaagagggaggaaacccacatcctccattccccatccattcatttattgccttatttattccattgaatcttcacagctctagaaaaagtgtgctacaattattccctttattaaatgaggtcactgaggcacagtttaagaaatttgccagcagggcacagtgggtcactccggtaatcccagaactttgagagggggaggaaggtggatcccttgagcccaggagttggagaccagcctggccaacatggcgagaccccgtttctacaaaaattagccaaaattagccaaactggctcacacttgtagtcccaggtactcgagaggctgaggccggaggagcgtgtgagcccaggaggcagtggctgcgctgagccgtgattgtgccactgcactccagcctgggcaacagagtaagaccctgtctcgaaaaaaaaaaaatggaaaaaagaaaaaaagaactggctgggagtggtggctcatgcctgtaatcccagcactttgggaggccgaggtgggtggatcacctgaggtcaggagtttgagaccaacctgaccaacaaggtgaaatcccatttctactaaaaatacaaaaattagccaggcgtggtggcaggtgcctgtagtcccagctactagggaggctgagacaggagaatagcttgaacctgggaggcagaggttgcagtgagccgagattgcaccactgcactccagactgggcaatacagtgagactccgtctcaaaaacaaaaaaaatcctaccacatgtgctccaccaagctctgtctccaaggtggccttggaagccacatggggaaggtggcagagactctaggagcctgagcagagacccagatgattatgaaaaatgcagacctacccatccttattcacctgggaccaccgtgaactatatcataagaaataaacccctattgtacatacatgcaccattccagttgggtctatttgttacagcagtttagccaaccctaatccacatatacagtgtcaacagtggctgagatgacatgttgcacagacatgagagtcagaaagacctgagttcaagtcccagtgatgacatttactatctgtgtgaccttgaaaagctgcctaactactctcagaccgtttcctcatcagtttgttttgagaatcaaatgagaaaattactaaaaagcccttagcactgcatctaagatggggaagagacagtcaatgaattcaagtttcctgaagcccagttgcatccctgccctgtcctgggctctgagagacagttgccgaagctagtgttaaagtgaactaaatatggcctgagtgggacttcgtacttctatagttgagtccttgtggacaaattgcaacctagcttaataggtagacaagattgaaaacctaacttaggagtatgcgtctgtaacaatagctgagtcttggccaatcccagaggccgtagttcaaccgctcatacgctgctgagtgttcaaactgtactcaaataaggcaaacgccaacttgtaacaatccagccattctgtacttcacttctgatttctgtacatcatttcccttcttttgtccataaatcttcttccaccacgtggctgc

SEQ ID NO: 1886584 - DNA, 4001 bp, Homo sapiens
agggagcgcaggagcaatgtggccccgaggggcacgggctccattggtccaggagaacccattcttctcccaccctcgagaccacccagcaaagccccaaggacacacggctcccctaaggaagggtggccacaggcgggagtgacccagaaacgttacaaaaccaaatgccagaacccacccaatgtttagaaagcctggggatgtgccacgtcccccagggatccagcacgcacccaaagagacactgtcccggcgaggagcctggagcctgggaaatacaaggcatcagactggtcccaagactctccccagcgctggggacaactgtctgcttatcttagtcccctgcgcccttttcaatccaaccctgggtcctgggcacctcatagttccaaacccctgctatgcacatcccggctgtgatgcctgggacaggtcctgtcctggctgtgatgcctgggacaggtcgtgtcacctctccaaacctgtttcctcatctgtgaaatgcaaatctccacggtccctatgcctcggatggtcagagtcaggattccgcatgacgacccccaacaggagcctggcacagacctggctctgggcagcgtctccataaaggccacctgttgtttttatctcccgaaagcgaacatgacaaggctttaaccccccacggcaatccgccctcacccctgttctcaggatagccttggaacccaatagcagagcgcctgaggcccttcatgaccccagcccacccgcgagcccacctcccaccctgcccctacccctcacacctcccgtggccagcctccagcctcacggtctttgctcacaccgttcaccccccttcttctggacccacctcatcgccccttcctaagcatcagcccaattcttgcacatccatcaaatccttgtccagacacctcctggaactcttccctgcagccccctacagccatccccatctctccgggtaccccgcagccccaggccgaatcccaattcctctccaattagcgactgtttgtcctcccagctgagcgcggcctccgcgccccgcccccgctggcgtccgcagagcccccgggtggggacgtctgtctccagacccggggtttttcggctccccggggccgtgccaaccgcggctccaggcgttccttatttagcagggccgctgtgccgcgccggagcctcgccctgggagcgtcctggcccgcgtcctgcttcccgtcccgggccagggaacgcgcccacgcccgcccgtcccgcggcctctcccgggtgccgctgggcccgctactcacagcgctgtggcgtccgcggggatgcgcagcgcgggaccgagcgtccgcagcccgcggcccgcggcccgagcagttgacgcggcaggcggcgccgggcgctaggccgcagaggcaggggggctcgcaaggcccgcagccgcgcccggggccccccgccagcgccccgagccacaggcccaggcccagggccagcgccaggcgggcgggcgcggcgggcggcatcgttagggcagcgcgcgcatggccccgccgtccccaggcccgcccgcgcgcggaggccgcggctcaggcggggccggcggacggcatggcgggcgcggggctggatggggctgcggccgcgacctgctgctgagcgacgcccgctcggggctcggggccaggccgctccgggagctcggccgcccgctcggacgttggcgctgcagtgcgggccccgccgcggctcctcctcctcctccccgcgcggcgcagggcggacggggcgagggggggcggggcgggtgcaggctccgcccccttcgccacagcgcgaccgggccagcgatgagggactggcatccggaggcttcaccctccgctccacagggtcggcagcagggcggggcctccggaagctccgccccacgctttcccggggcgcatgcgacgtggggcggagcgtctggaagctccgcccgtcgcactgtagagtcggccgaggcgcacgaggtatttttcacgctccgcccctctgcaggctaaagtgcgtgggcgggaagcggtgggcagggtgccatctggctccgcccttctcctgtggtgtgggccaggcggcggcttcctcctcctgcagcagccacaggctccactctgatccttctcccgcggcatggatccttctcccgcggcgtggatccttctcccgcaatctccgtgcgcgtccccagtcagtacccgcagcctcccgacgcacccgctggctccaagcctccctaccccaggtttcctggctaagagagagacagagggagagagggggaagagagagaacaggcaatgggaggttgatggtgagagcttattgaaagacaagagggaggaaacccacatccttcattccccatccattcatttattgccttatttattccattgaatcttcacagctctagaaaaagtgtgctacaattattccctttattaaatgaggtcactgaggcacagtttaagaaatttgccagcagggcacagtgggtcactccggtaatcccagaactttgagagggggaggaaggtggatcccttgagcccaggagttggagaccagcctggccaacatggcgagaccccgtttctacaaaaattagccaaaattagccaaactggctcacacttgtagtcccaggtactcgagaggctgaggccggaggagcgtgtgagcccaggaggcagtggctgcgctgagccgtgattgtgccactgcactccagcctgggcaacagagtaagaccctgtctcgaaaaaaaaaaaatggaaaaaagaaaaaaagaactggctgggagtggtggctcatgcctgtaatcccagcactttgggaggccgaggtgggtggatcacctgaggtcaggagtttgagaccaacctgaccaacaaggtgaaatcccatttctactaaaaatacaaaaattagccaggcgtggtggcaggtgcctgtagtcccagctactagggaggctgagacaggagaatagcttgaacctgggaggcagaggttgcagtgagccgagattgcaccactgcactccagactgggcaatacagtgagactccgtctcaaaaaaacaaaaaaaatcctaccacatgtgctccaccaagctctgtctccaaggtggccttggaagccacatggggaaggtggcagagactctaggagcctgagcagaaatccagatgattatgaaaaatgcagacctacccatccttattcacctgggaccaccgtgaactatatcataagaaataaacccctattgtacatacatgcaccattcgagttgggtctatttgttacagcagtttagccaaccctaatccacatatacagtgtcaacagtggctgagatgacatgttgcacagacatgagagtcagaaagacctgagttcaagtcccagtgatgacatttactatctgtgtgaccttgaaaagctgcctaactactctcagaccgtttcctcatcagtttgttttgagagtcaaatgagaaaattactaaaaagcccttagcactgcatctaagatggggaagagacagtcaatgaattcaagtttcctgaagcccagttgcatccctgccctgccctgggctctgagagacagttgccgaagctagtgttaaagtgaactaaatatggcctgagtgggacttcgtacttctatagttgagtccttgtggacaaattgcaacctagcttaataggtagacaagattgaaaacctaacttaggagtatgcgcctgtaacaatagctgagtcttggccaatcccagaggccgtagttcaaccgctcatacgctgctgagtgttcaaactgtactcaaataaggcaaacgccaacttgtaacaatccagccattctgtacttcacttctgatttctgtacatcatttcccttcttttgtccataaatcttcttccaccacgtggc

SEQ ID NO: 1886585 - DNA, 4001 bp, Homo sapiens
agggagcgcaggagcaatgtggccccgaggggcacgggctccattggtccaggagaacccattcttctcccaccctcgagaccacccagcaaagccccaaggacacacggctcccctaaggaagggtggccacaggcgggagtgacccagaaacgttacaaaaccaaatgccagaacccatccaatgtttagaaagcctggggatgtgccacgtcccccagggatccagcacgcacccaaagagacactgtcccggcgaggagcctggagcctgggaaatacaaggcatcagactggtaccaagactctccccagcgctggggacaactgtctgcttatcttagtcccctgcgcccttttcaatccaaccctgggtcctgggcacctcatagttccaaacccctgctatgcacatcccggctgtgatgcctgggacaggtcctgtcctggctgtgatgcctgggacaggtcgtgtcacctctccaaacctgtttcctcatctgtgaaatgcaaatctccacggtccctatgcctcggatggtcagagtcaggattccgcatgacgacccccaacaggagcctggcacagacctggctctgggcagcgtctccataaaggccacctgttgtttttatctcccgaaagcgaacatgacaaggctttaaccccccacggcaatccgccctcacccctgttctcaggatagccttggaacccaatagcagagcgcctgaggcccttcatgaccccagcccacccgcgagcccacctcccaccctgcccctacccctcacacctcccgtggccagcctccagcctcacggtctttgctcacaccgttcaccccccttcttctggacccacctcatcgccccttcctaagcatcagcccaattcttgcacatccatcaaatccttgtccagacacctcctggaactcttccctgcagccccctacagccatccccatctctccgggtaccccgcagccccaggccgaatcccaattcctctccaattagcgactgtttgtcctcccagctgagcgcggcctccgcgccccgcccccgctggcgtccgcagagcccccgggtgggacgtctgtctccagacccggggtttttcggctccccggggccgtgccaaccgcggctccaggcgttccttatttagcagggccgctgtgccgcgccggagcctcgccctgggagcgtcctggcccgcgtcctgcttcccgtcccgggccagggaacgcgcccacgcccgcccgtcccgcggcctctcccgggtgccgctgggcccgctactcacagcgctgtggcgtccgcggggatgcgcagcgcgggaccgagcgtccgcagcccgcggcccgcggcccgagcagttgacgcggcaggcggcgccgggcgctaggccgcagaggcaggggggctcgcaaggcccgcagccgcgcccggggccccccgccagcgccccgagccacaggcccaggcccagggccagcgccaggcgggcgggcgcggcgggcggcatcgttagggcagcgcgcgcatggccccgccgtccccaggcccgcccgcgcgcggaggccgcggctcaggcggggccggcggacggcatggcgggcgcggggctggatggggctgcggccgcgacctgctgctgagcgacgcccgctcggggctcggggccaggccgctccgggagctcggccgcccgctcggacgttggcgctgcagtgcgggccccgccgcggctcctcctcctcctccccgcgcggcgcagggcggacggggcgagggggggcggggcgggtgcaggctccgcccccttcgccacagcgcgaccgggccagcgatgagggactggcatccggaggcttcaccctccgctccacagggtcggcagcagggcggggcctccggaagctccgccccacgctttcccggggcgcatgcgacgtggggcggagcgtctggaagctccgcccgtcgcactgtagagtcggccgaggcgcacgaggtatttttcacgctccgcccctctgcaggctaaagtgcgtgggcgggaagcggtgggcagggtgccatctggctccgcccttctcctgtggtgtgggccaggcggcggcttcctcctcctgcagcagccacaggctccactctgatccttctcccgcggcatggatccttctcccgcggcgtggatccttctcccgcaatctccgtgcgcgtccccagtcagtacccgcagcctcccgacgcacccgctggctccaagcctccctaccccaggtttcctggctaagagagagacagagggagagagggggaagagagagaacaggcaatgggaggttgatggtgagagcttattgaaagacaagagggaggaaacccacatccttcattccccatccattcatttattgccttatttattccattgaatcttcacagctctagaaaaagtgtgctacaattattccctttattaaatgaggtcactgaggcacagtttaagaaatttgccagcagggcacagtgggtcactccggtaatcccagaactttgagagggggaggaaggtggatcccttgagcccaggagttggagaccagcctggccaacatggcgagaccccgtttctacaaaaattagccaaaattagccaaactggctcacacttgtagtcccaggtactcgagaggctgaggccggaggagcgtgtgagcccaggaggcagtggctgcgctgagccgtgattgtgccactgcactccagcctgggcaacagagtaagaccctgtctcgaaaaaaaaaaaatggaaaaaagaaaaaaagaactggctgggagtggtggctcatgcctgtaatcccagcactttgggaggccgaggtgggtggatcacctgaggtcaggagtttgagaccaacctgaccaacaaggtgaaatcccatttctactaaaaatacaaaaattagccaggcgtggtggcaggtgcctgtagtcccagctactagggaggctgagacaggagaatagcttgaacctgggaggcagaggttgcagtgagccgagattgcaccactgcactccagactgggcaatacagtgagactccgtctcaaaaaaacaaaaaaaatcctaccacatgtgctccaccaagctctgtctccaaggtggccttggaagccacatggggaaggtggcagagactctaggagcctgagcagaaatccagatgattatgaaaaatgcagacctacccatccttattcacctgggaccaccgtgaactatatcataagaaataaacccctattgtacatacatgcaccattcgagttgggtctatttgttacagcagtttagccaaccctaatccacatatacagtgtcaacagtggctgagatgacatgttgcacagacatgagagtcagaaagacctgagttcaagtcccagtgatgacatttactatctgtgtgaccttgaaaagctgcctaactactctcagaccgtttcctcatcagtttgttttgagagtcaaatgagaaaattactaaaaagcccttagcactgcatctaagatggggaagagacagtcaatgaattcaagtttcctgaagcccagttgcatccctgccctgccctgggctctgagagacagttgccgaagctagtgttaaagtgaactaaatatggcctgagtgggacttcgtacttctatagttgagtccttgtggacaaattgcaacctagcttaataggtagacaagattgaaaacctaacttaggagtatgcgcctgtaacaatagctgagtcttggccaatcccagaggccgtagttcaaccgctcatacgctgctgagtgttcaaactgtactcaaataaggcaaacgccaacttgtaacaatccagccattctgtacttcacttctgatttctgtacatcatttcccttcttttgtccataaatcttcttccaccacgtggct

SEQ ID NO: 1886586 - DNA, 4001 bp, Homo sapiens
cagtcagggagcgcaggagcaatgtggccccgaggggcacgggctccattggtccaggagaacccattcttctcccaccctcgagaccacccagcaaagccccaaggacacacggctcccctaaggaagggtggccacaggcgggagtgacccagaaacgttacaaaaccaaatgccagaacccacccaatgtttagcaagcctggggatgtgccacgtcccccagggatccagcacgcacccaaagagacactgtcccggcgaggagcctggagcctgggaaatacaaggcatcagactggtcccaagactctccccagcgctggggacaactgtctgcttatcttagtcccctgcgcccttttcaatccaaccctgggtcctgggcacctcatagttccaaacccctgctatgcacatcccggctgtgatgcctgggacaggtcctgtcctggctgtgatgcctgggacaggtcgtgtcacctctccaaacctgtttcctcatctgtgaaatgcaaatctccacggtccctatgcctcggatggtcagagtcaggattccgcatgacgacccccaacaggagcctggcacagacctggctctgggcagcgtctccataaaggccacctgttgtttttatctcccgaaagcgaacatgacaaggctttaaccccccacggcaatccgccctcacccctgttctcaggatagccttggaacccaatagcagagcgcctgaggcccttcatgaccccagcccacccgcgagcccacctcccaccctgcccctacccctcacacctcccgtggccagcctccagcctcacggtctttgctcacaccgttcaccccccttcttctggacccacctcatcgccccttcctaagcatcagcccaattcttgcacatccatcaaatccttgtccagacacctcctggaactcttccctgcagccccctacagccatccccacctctccgggtaccccgcagccccaggccgcatcccaattcctctccaattagcgactgtttgtcctcccagctgagcgcggcctccgcgccccgcccccgctggcgtctgcacagcccccgggtgggacgtctgtctccagacccggggtttttcggctccccggggccgtgccaaccgcggctccaggcgttccttatttagcagggccgctgtgctgcgccggagcctcgccctgggagcgtcctggcccgcgtcctgcttcccgtcccgggccagggaacgcgcccacgcccgcccgtcccgcggcctctcccgggtgccgctgggcccgctactcacagcgctgtggcgtccgcggggatgcgcagcgcgggaccgagcgtccgcagcccgcggcccgcggcccgagcagttgacgcggcaggcggcgccgggcgctaggccgcagaggcaggggggctcgcaaggcccgcagccgcgcccggggccccccgccagcgccccgagccacaggcccaggcccagggccagcgccaggcgggcgggcgcggcgggcggcatcgttagggcagcgcgcgcatggccccgccgtccccaggcccgcccgcgcgcggaggccgcggctcaggcggggccggcggacggcatggcgggcgcggggctggatggggctgcggccgcgacctgctgctgagcgacgcccgctcggggctcggggccaggccgctccgggagctcggccgcccgctcggacgttggcgctgcagtgcgggccccgccgcggctcctcctcctcctccccgcgcggcgcagggcggacggggcgagggggggcggggcgggtgcaggctccgcccccttcgccacagcgcgaccgggccagcgatgagggactggcatccggaggcttcaccctccgctccacagggtcggcagcagggcggggcctccggaagctccgccccacgctttcccggggcgcatgcgacgtggggcggagcgtctggaagctccgcccgtcgcactgtagagtcggccgaggcgcacgaggtatttttcacgctccgcccctctgcaggctaaagtgcgtgggcgggaagcggtgggcagggtgccatctggctccgcccttctcctgtggtgtgggccaggcggcggcttcctcctcctgcagcagccacaggctccactctgatccttctcccgcggcatggatccttctcccgcggcgtggatccttctcccgcaatctccgtgcgcgtccccagtcagtacccgcagcctcccgacgcacccgctggctccaagcctccctaccccaggtttcctggctaagagagagacagagggagagagggggaagagagagaacaggcaatgggaggttgatggtgagagcttattgaaagacaagagggaggaaacccacatccttcattccccatccattcatttattgccttatttattccattgaatcttcacagctctagaaaaagtgtgctacaattattccctttattaaatgaggtcactgaggcacagtttaagaaatttgccagcagggcacagtgggtcactccggtaatcccagaactttgagagggggaggaaggtggatcccttgagcccaggagttggagaccagcctggccaacatggcgagaccccgtttctacaaaaattagccaaaattagccaaactggctcacacttgtagtcccaggtactcgagaggctgaggccggaggagcgtgtgagcccaggaggcagtggctgcgctgagccgtgattgtgccactgcactccagcctgggcaacagagtaagaccctgtctcgaaaaaaaaaaaatggaaaaaagaaaaaaagaactggctgggagtggtggctcatgcctgtaatcccagcactttgggaggccgaggtgggtggatcacctgaggtcaggagtttgagaccaacctgaccaacaaggtgaaatcccatttctactaaaaatacaaaaattagccaggcgtggtggcaggtgcctgtagtcccagctactagggaggctgagacaggagaatagcttgaacctgggaggcagaggttgcagtgagccgagattgcaccactgcactccagactgggcaatacagtgagactccgtctcaaaaaaacaaaaaaaatcctaccacatgtgctccaccaagctctgtctccaaggtggccttggaagccacatggggaaggtggcagagactctaggagcctgagcagaaacccagatgattatgaaaaatgcagacctacccatccttattcacctgggaccaccgtgaactatatcataagaaataaacccctattgtacatacatgcaccattcgagttgggtctatttgttacagcagtttagccaaccctaatccacatatacagtgtcaacagtggctgagatgacatgttgcacagacatgagagtcagaaagacctgagttcaagtcccagtgatgacatttactatctgtgtgaccttgaaaagctgcctaactactctcagaccgtttcctcatcagtttgttttgagagtcaaatgagaaaattactaaaaagcccttagcactgcatctaagatggggaagagacagtcaatgaattcaagtttcctgaagcccagttgcatccctgccctgccctgggctctgagagacagttgccgaagctagtgttaaagtgaactaaatatggcctgagtgggacttcgtacttctatagttgagtccttgtggacaaattgcaacctagcttaataggtagacaagattgaaaacctaacttaggagtatgcgcctgtaacaatagctgagtcttggccaatcccagaggccgtagttcaaccgctcatacgctgctgagtgttcaaactgtactcaaataaggcaaacgccaacttgtaacaatccagccattctgtacttcacttctgatttctgtacatcatttcccttcttttgtccataaatcttcttccaccacg

SEQ ID NO: 1886587 - DNA, 4001 bp, Homo sapiens
cgcgtccgcagtcagggagcgcaggagcaatgtggccccgaggggcacgggctccattggtccaggagaacccattcttctcccaccctcgagaccacccagcaaagccccaaggacacacggctcccctaaggaagggtggccacaggcgggagtgacccagaaacgttacaaaaccaaatgccagaacccacccaatgtttagcaagcctggggatgtgccacgtcccccagggatccagcacgcacccaaggagacactgtcccggcgaggagcctggagcctgggaaatacaaggcatcagactggtcccaagactctccccagcgctggggacaactgtctgcttatcttagtcccctgcgcccttttcaatccaaccctgggtcctgggcacctcatagttccaaatccctgctatgcacatcccggctgtgatgcctgggacaggtcctgtcctggctgtgatgcctgggacaggtcgtgtcacctctccaaacctgtttcctcatctgtgaaatgcaaatctccacggtccctatgcctcggatggtcagagtcaggattccgcatgacgacccccaacaggagcctggcacagacctggctctgggcagcgtctccataaaggccacctgttgtttttatctcccgaaagcgaacatgacaaggctttaaccccccacggcaatccgccctcacccctgttctcaggatagccttggaacccaatagcagagcgcctgaggcccttcatgaccccagcccacccgcgagcccacctcccaccctgcccctacccctcacacctcccgtggccagcctccagcctcatggtctttgctcacaccgttcaccccccttcttctggacccacctcatcgccccttcctaagcatcagcccaattcttgcacatccatcaaatccttgtccagacacctcctggaactcttccctgcagccccctacaaccatccccacctctccgggtaccccgcagccccaggccgcatcccaattcctctccaattagcgactgtttgtcctcccagctgagcgggcctccgggccccgcccccgctggcgtctgcacagcccccgggtgggacgtctgtctccagacccggggtttttcggctcccccgggccgtgccaaccgcggctccaggcgttccttatttagcagggccgctgtgcccgcgccggagcctcgccctgggagcgtcctggcccgcgtcctgcttcccgtcccgggccagggaacgcgcccacacccgcccgtcccgcggcctctcccgggtgccgctgggcccgctactcacagcgctgtggcgtccgcggggatgcgcagcgcgggaccgagcgtccgcagcccgcggcccgagcagttgacgcggcaggcggcgccgggcgctaggccgcagaggcaggggggctcgcaaggcccgcagccgcgcccggggccccccgccagcgccccgagccacaggcccaggcccagggccagcgccaggcgggcgggcgcggcgggcggcatcgttagggcagcgcgcgcatggccccgccgtccccaggcccgcccgcgcgcggaggccgcggctcaggcggggccggcagacggcatggcgggcgcggggctggatggggctgcggccgcgacctgctgctgagcgacgcccgctcgaggctcggggccaggccgctccgggagcttggccgcccgctcggacgctggcgctgcagtgcgagccccgccgcggctcctcctcctccccgcgccgcgcggggcggacggggcgcggtgggggcggggcgggtgcaggctccgcccccttcgccacagcgcgaccaggccagcgatgagggactggcatccggaggcttcaccctccgctccacagggtcggcagcagagcggggcctccggaagctccgccccacgcgttcccggggcgcatgcgacgtggggcggagcgtctggaagctccgcccgtcgcactggagagtcggccgaggcgcacgaggtatttttcacgctccgccccactgcaggctaaagtgcgtgggcgggaagcggtgggcagggtgccatctggctccgcccttctcctgtggtgtgggccaggcggcgggttcctcctcctgcagcagccacaggctccaccctgatccttctcccgcggcatggatccttctcccgcggcgtggatccttctcccgcaatctccgtgcgcgtccccagtcagtacccgcagcctcccgacgcacccgctggctccaagcctccctaccccaggtttcctggctaagagagagacagaaggagagagggggaagagagagaacaggcaatgggaggttgatggtgagagcttattgaaagacaagagggaggaaacccacatcctccattccccatccattcatttattgccttatttattccattgaatcttcacagctctagaaaaagtgtgctacaattattccctttattaaatgaggtcactgaggcacagtttaagaaatttgccagcagggcacagtgggtcactccggtaatcccagaactttgagagggggaggaaggtggatcccttgagcccaggagttggagaccagcctggccaacatggcgagaccccgtttctacaaaaattagccaaaattagccaaactggctcacacttgtagtcccaggtactcgagaggctgaggccggaggagcgtgtgagcccaggaggcagtggctgcgctgagccgtgattgtgccactgcactccagcctgggcaacagagtaagaccctgtctcgaaaaaaaaaaaatggaaaaaagaaaaaaagaactggctgggagtggtggctcatgcctgtaatcccagcactttgggaggccgaggtgggtggatcacctgaggtcaggagtttgagaccaacctgaccaacaaggtgaaatcccatttctactaaaaatacaaaaattagccaggcgtggtggcaggtgcctgtagtcccagctactagggaggctgagacaggagaatagcttgaacctgggaggcagaggttgcagtgagccgagattgcaccactgcactccagactgggcaatacagtgagactccgtctcaaaaacaaaaaaaatcctaccacatgtgctccaccaagctctgtctccaaggtggccttggaagccacatggggaaggtggcagagactctaggagcctgagcagagacccagatgattatgaaaaatgcagacctacccatccttattcacctgggaccaccgtgaactatatcataagaaataaacccctattgtacatacatgcaccattccagttgggtctatttgttacagcagtttagccaaccctaatccacatatacagtgtcaacagtggctgagatgacatgttgcacagacatgagagtcagaaagacctgagttcaagtcccagtgatgacatttactatctgtgtgaccttgaaaagctgcctaactactctcagaccgtttcctcatcagtttgttttgagaatcaaatgagaaaattactaaaaagcccttagcactgcatctaagatggggaagagacagtcaatgaattcaagtttcctgaagcccagttgcatccctgccctgtcctgggctctgagagacagttgccgaagctagtgttaaagtgaactaaatatggcctgagtgggacttcgtacttctatagttgagtccttgtggacaaattgcaacctagcttaataggtagacaagattgaaaacctaacttaggagtatgcgtctgtaacaatagctgagtcttggccaatcccagaggccgtagttcaaccgctcatacgctgctgagtgttcaaactgtactcaaataaggcaaacgccaacttgtaacaatccagccattctgtacttcacttctgatttctgtacatcatttcccttcttttgtccataaatcttcttccaccacgtgg

SEQ ID NO: 1886588 - DNA, 4001 bp, Homo sapiens
agtcagggagcgcaggagcaatgtggccccgaggggcacgggctccattggtccaggagaacccattcttctcccaccctcgagaccacccagcaaagccccaaggacacacggctcccctaaggaagggtggccacaggcgggagtgacccagaaacgttacaaaaccaaatgccagaacccacccaatgtttagaaagcctggggatgtgccacgtcccccagggatccagcacgcacccaaagagacactgtcccggcgaggagcctggagcctgggaaatacaaggcatcagactggtcccaagactctccccagcgctggggacaactgtctgcttatcttagtcccctgcgcccttttcaatccaaccctgggtcctgggcacctcatagttccaaacccctgctatgcacatcccggctgtgatgcctgggacaggtcctgtcctggctgtgatgcctgggacaggtcgtgtcacctctccaaacctgtttcctcatctgtgaaatgcaaatctccacggtccctatgcctcggatggtcagagtcaggattccgcatgacgacccccaacaggagcctggcacagacctggctctgggcagcgtctccataaaggccacctgttgtttttatctcccgaaagcgaacatgacaaggctttaaccccccacggcaatccgccctcacccctgttctcaggatagccttggaacccaatagcagagcgcctgaggcccttcatgaccccagcccacccgcgagcccacctcccaccctgcccctacccctcacacctcccgtggccagcctccagcctcacggtctttgctcacaccgttcaccccccttcttctggacccacctcatcgccccttcctaagcatcagcccaattcttgcacatccatcaaatccttgtccagacacctcctggaactcttccctgcagccccctacagccatccccatctctccgggtaccccgcagccccaggccgaatcccaattcctctccaattagcgactgtttgtcctcccagctgagcgcggcctccgcgccccgcccccgctggcgtccgcagagcccccgggtggggacgtctgtctccagacccggggtttttcggctccccggggccgtgccaaccgcggctccaggcgttccttatttagcagggccgctgtgccgcgccggagcctcgccctgggagcgtcctggcccgcgtcctgcttcccgtcccgggccagggaacgcgcccacgcccgcccgtcccgcggcctctcccgggtgccgctgggcccgctactcacagcgctgtggcgtccgcggggatgcgcagcgcgggaccgagcgtccgcagcccgcggcccgcggcccgagcagttgacgcggcaggcggcgccgggcgctaggccgcagaggcaggggggctcgcaaggcccgcagccgcgcccggggccccccgccagcgccccgagccacaggcccaggcccagggccagcgccaggcgggcgggcgcggcgggcggcatcgttagggcagcgcgcgcatggccccgccgtccccaggcccgcccgcgcgcggaggccgcggctcaggcggggccggcggacggcatggcgggcgcggggctggatggggctgcggccgcgacctgctgctgagcgacgcccgctcggggctcggggccaggccgctccgggagctcggccgcccgctcggacgttggcgctgcagtgcgggccccgccgcggctcctcctcctcctccccgcgcggcgcagggcggacggggcgagggggggcggggcgggtgcaggctccgcccccttcgccacagcgcgaccgggccagcgatgagggactggcatccggaggcttcaccctccgctccacagggtcggcagcagggcggggcctccggaagctccgccccacgctttcccggggcgcatgcgacgtggggcggagcgtctggaagctccgcccgtcgcactgtagagtcggccgaggcgcacgaggtatttttcacgctccgcccctctgcaggctaaagtgcgtgggcgggaagcggtgggcagggtgccatctggctccgcccttctcctgtggtgtgggccaggcggcggcttcctcctcctgcagcagccacaggctccactctgatccttctcccgcggcatggatccttctcccgcggcgtggatccttctcccgcaatctccgtgcgcgtccccagtcagtacccgcagcctcccgacgcacccgctggctccaagcctccctaccccaggtttcctggctaagagagagacagagggagagagggggaagagagagaacaggcaatgggaggttgatggtgagagcttattgaaagacaagagggaggaaacccacatccttcattccccatccattcatttattgccttatttattccattgaatcttcacagctctagaaaaagtgtgctacaattattccctttattaaatgaggtcactgaggcacagtttaagaaatttgccagcagggcacagtgggtcactccggtaatcccagaactttgagagggggaggaaggtggatcccttgagcccaggagttggagaccagcctggccaacatggcgagaccccgtttctacaaaaattagccaaaattagccaaactggctcacacttgtagtcccaggtactcgagaggctgaggccggaggagcgtgtgagcccaggaggcagtggctgcgctgagccgtgattgtgccactgcactccagcctgggcaacagagtaagaccctgtctcgaaaaaaaaaaaatggaaaaaagaaaaaaagaactggctgggagtggtggctcatgcctgtaatcccagcactttgggaggccgaggtgggtggatcacctgaggtcaggagtttgagaccaacctgaccaacaaggtgaaatcccatttctactaaaaatacaaaaattagccaggcgtggtggcaggtgcctgtagtcccagctactagggaggctgagacaggagaatagcttgaacctgggaggcagaggttgcagtgagccgagattgcaccactgcactccagactgggcaatacagtgagactccgtctcaaaaaaacaaaaaaaatcctaccacatgtgctccaccaagctctgtctccaaggtggccttggaagccacatggggaaggtggcagagactctaggagcctgagcagaaatccagatgattatgaaaaatgcagacctacccatccttattcacctgggaccaccgtgaactatatcataagaaataaacccctattgtacatacatgcaccattcgagttgggtctatttgttacagcagtttagccaaccctaatccacatatacagtgtcaacagtggctgagatgacatgttgcacagacatgagagtcagaaagacctgagttcaagtcccagtgatgacatttactatctgtgtgaccttgaaaagctgcctaactactctcagaccgtttcctcatcagtttgttttgagagtcaaatgagaaaattactaaaaagcccttagcactgcatctaagatggggaagagacagtcaatgaattcaagtttcctgaagcccagttgcatccctgccctgccctgggctctgagagacagttgccgaagctagtgttaaagtgaactaaatatggcctgagtgggacttcgtacttctatagttgagtccttgtggacaaattgcaacctagcttaataggtagacaagattgaaaacctaacttaggagtatgcgcctgtaacaatagctgagtcttggccaatcccagaggccgtagttcaaccgctcatacgctgctgagtgttcaaactgtactcaaataaggcaaacgccaacttgtaacaatccagccattctgtacttcacttctgatttctgtacatcatttcccttcttttgtccataaatcttcttccaccacg

SEQ ID NO: 1886589 - DNA, 4001 bp, Homo sapiens
agtcagggagcgcaggagcaatgtggccccgaggggcacgggctccattggtccaggagaacccattcttctcccaccctcgagaccacccagcaaagccccaaggacacacggctcccctaaggaagggtggccacaggcgggagtgacccagaaacgttacaaaaccaaatgccagaacccatccaatgtttagaaagcctggggatgtgccacgtcccccagggatccagcacgcacccaaagagacactgtcccggcgaggagcctggagcctgggaaatacaaggcatcagactggtaccaagactctccccagcgctggggacaactgtctgcttatcttagtcccctgcgcccttttcaatccaaccctgggtcctgggcacctcatagttccaaacccctgctatgcacatcccggctgtgatgcctgggacaggtcctgtcctggctgtgatgcctgggacaggtcgtgtcacctctccaaacctgtttcctcatctgtgaaatgcaaatctccacggtccctatgcctcggatggtcagagtcaggattccgcatgacgacccccaacaggagcctggcacagacctggctctgggcagcgtctccataaaggccacctgttgtttttatctcccgaaagcgaacatgacaaggctttaaccccccacggcaatccgccctcacccctgttctcaggatagccttggaacccaatagcagagcgcctgaggcccttcatgaccccagcccacccgcgagcccacctcccaccctgcccctacccctcacacctcccgtggccagcctccagcctcacggtctttgctcacaccgttcaccccccttcttctggacccacctcatcgccccttcctaagcatcagcccaattcttgcacatccatcaaatccttgtccagacacctcctggaactcttccctgcagccccctacagccatccccatctctccgggtaccccgcagccccaggccgaatcccaattcctctccaattagcgactgtttgtcctcccagctgagcgcggcctccgcgccccgcccccgctggcgtccgcagagcccccgggtgggacgtctgtctccagacccggggtttttcggctccccggggccgtgccaaccgcggctccaggcgttccttatttagcagggccgctgtgccgcgccggagcctcgccctgggagcgtcctggcccgcgtcctgcttcccgtcccgggccagggaacgcgcccacgcccgcccgtcccgcggcctctcccgggtgccgctgggcccgctactcacagcgctgtggcgtccgcggggatgcgcagcgcgggaccgagcgtccgcagcccgcggcccgcggcccgagcagttgacgcggcaggcggcgccgggcgctaggccgcagaggcaggggggctcgcaaggcccgcagccgcgcccggggccccccgccagcgccccgagccacaggcccaggcccagggccagcgccaggcgggcgggcgcggcgggcggcatcgttagggcagcgcgcgcatggccccgccgtccccaggcccgcccgcgcgcggaggccgcggctcaggcggggccggcggacggcatggcgggcgcggggctggatggggctgcggccgcgacctgctgctgagcgacgcccgctcggggctcggggccaggccgctccgggagctcggccgcccgctcggacgttggcgctgcagtgcgggccccgccgcggctcctcctcctcctccccgcgcggcgcagggcggacggggcgagggggggcggggcgggtgcaggctccgcccccttcgccacagcgcgaccgggccagcgatgagggactggcatccggaggcttcaccctccgctccacagggtcggcagcagggcggggcctccggaagctccgccccacgctttcccggggcgcatgcgacgtggggcggagcgtctggaagctccgcccgtcgcactgtagagtcggccgaggcgcacgaggtatttttcacgctccgcccctctgcaggctaaagtgcgtgggcgggaagcggtgggcagggtgccatctggctccgcccttctcctgtggtgtgggccaggcggcggcttcctcctcctgcagcagccacaggctccactctgatccttctcccgcggcatggatccttctcccgcggcgtggatccttctcccgcaatctccgtgcgcgtccccagtcagtacccgcagcctcccgacgcacccgctggctccaagcctccctaccccaggtttcctggctaagagagagacagagggagagagggggaagagagagaacaggcaatgggaggttgatggtgagagcttattgaaagacaagagggaggaaacccacatccttcattccccatccattcatttattgccttatttattccattgaatcttcacagctctagaaaaagtgtgctacaattattccctttattaaatgaggtcactgaggcacagtttaagaaatttgccagcagggcacagtgggtcactccggtaatcccagaactttgagagggggaggaaggtggatcccttgagcccaggagttggagaccagcctggccaacatggcgagaccccgtttctacaaaaattagccaaaattagccaaactggctcacacttgtagtcccaggtactcgagaggctgaggccggaggagcgtgtgagcccaggaggcagtggctgcgctgagccgtgattgtgccactgcactccagcctgggcaacagagtaagaccctgtctcgaaaaaaaaaaaatggaaaaaagaaaaaaagaactggctgggagtggtggctcatgcctgtaatcccagcactttgggaggccgaggtgggtggatcacctgaggtcaggagtttgagaccaacctgaccaacaaggtgaaatcccatttctactaaaaatacaaaaattagccaggcgtggtggcaggtgcctgtagtcccagctactagggaggctgagacaggagaatagcttgaacctgggaggcagaggttgcagtgagccgagattgcaccactgcactccagactgggcaatacagtgagactccgtctcaaaaaaacaaaaaaaatcctaccacatgtgctccaccaagctctgtctccaaggtggccttggaagccacatggggaaggtggcagagactctaggagcctgagcagaaatccagatgattatgaaaaatgcagacctacccatccttattcacctgggaccaccgtgaactatatcataagaaataaacccctattgtacatacatgcaccattcgagttgggtctatttgttacagcagtttagccaaccctaatccacatatacagtgtcaacagtggctgagatgacatgttgcacagacatgagagtcagaaagacctgagttcaagtcccagtgatgacatttactatctgtgtgaccttgaaaagctgcctaactactctcagaccgtttcctcatcagtttgttttgagagtcaaatgagaaaattactaaaaagcccttagcactgcatctaagatggggaagagacagtcaatgaattcaagtttcctgaagcccagttgcatccctgccctgccctgggctctgagagacagttgccgaagctagtgttaaagtgaactaaatatggcctgagtgggacttcgtacttctatagttgagtccttgtggacaaattgcaacctagcttaataggtagacaagattgaaaacctaacttaggagtatgcgcctgtaacaatagctgagtcttggccaatcccagaggccgtagttcaaccgctcatacgctgctgagtgttcaaactgtactcaaataaggcaaacgccaacttgtaacaatccagccattctgtacttcacttctgatttctgtacatcatttcccttcttttgtccataaatcttcttccaccacgt

SEQ ID NO: 1886590 - DNA, 4001 bp, Homo sapiens; identical to SEQ ID NO: 1886582

SEQ ID NO: 1886591 - DNA, 4001 bp, Homo sapiens; identical to SEQ ID NO: 1886583

SEQ ID NO: 1886592 - DNA, 4001 bp, Homo sapiens; identical to SEQ ID NO: 1886584

SEQ ID NO: 1886593 - DNA, 4001 bp, Homo sapiens; identical to SEQ ID NO: 1886585

SEQ ID NO: 1886594 - DNA, 4001 bp, Homo sapiens
acagagacagccgcgagacacacgcgtccgcagtcagggagcgcaggagcaatgtggccccgaggggcacgggctccattggtccaggagaacccattcttctcccaccctcgagaccacccagcaaagccccaaggacacacggctcccctaaggaagggtggccacaggcgggagtgacccagaaacgttacaaaaccaaatgccagaacccacccaatgtttagcaagcctggggatgtgccacgtcccccagggatccagcacgcacccaaggagacactgtcccggcgaggagcctggagcctgggaaatacaaggcatcagactggtcccaagactctccccagcgctggggacaactgtctgcttatcttagtcccctgcgcccttttcaatccaaccctgggtcctgggcacctcatagttccaaatccctgctatgcacatcccggctgtgatgcctgggacaggtcctgtcctggctgtgatgcctgggacaggtcgtgtcacctctccaaacctgtttcctcatctgtgaaatgcaaatctccacggtccctatgcctcggatggtcagagtcaggattccgcatgacgacccccaacaggagcctggcacagacctggctctgggcagcgtctccataaaggccacctgttgtttttatctcccgaaagcgaacatgacaaggctttaaccccccacggcaatccgccctcacccctgttctcaggatagccttggaacccaatagcagagcgcctgaggcccttcatgaccccagcccacccgcgagcccacctcccaccctgcccctacccctcacacctcccgtggccagcctccagcctcatggtctttgctcacaccgttcaccccccttcttctggacccacctcatcgccccttcctaagcatcagcccaattcttgcacatccatcaaatccttgtccagacacctcctggaactcttccctgcagccccctacaaccatccccacctctccgggtaccccgcagccccaggccgcatcccaattcctctccaattagcgactgtttgtcctcccagctgagcgggcctccgggccccgcccccgctggcgtctgcacagcccccgggtgggacgtctgtctccagacccggggtttttcggctcccccgggccgtgccaaccgcggctccaggcgttccttatttagcagggccgctgtgcccgcgccggagcctcgccctgggagcgtcctggcccgcgtcctgcttcccgtcccgggccagggaacgcgcccacacccgcccgtcccgcggcctctcccgggtgccgctgggcccgctactcacagcgctgtggcgtccgcggggatgcgcagcgcgggaccgagcgtccgcagcccgcggcccgagcagttgacgcggcaggcggcgccgggcgctaggccgcagaggcaggggggctcgcaaggcccgcagccgcgcccggggccccccgccagcgccccgagccacaggcccaggcccagggccagcgccaggcgggcgggcgcggcgggcggcatcgttagggcagcgcgcgcatggccccgccgtccccaggcccgcccgcgcgcggaggccgcggctcaggcggggccggcagacggcatggcgggcgcggggctggatggggctgcggccgcgacctgctgctgagcgacgcccgctcgaggctcggggccaggccgctccgggagcttggccgcccgctcggacgctggcgctgcagtgcgagccccgccgcggctcctcctcctccccgcgccgcgcggggcggacggggcgcggtgggggcggggcgggtgcaggctccgcccccttcgccacagcgcgaccaggccagcgatgagggactggcatccggaggcttcaccctccgctccacagggtcggcagcagagcggggcctccggaagctccgccccacgcgttcccggggcgcatgcgacgtggggcggagcgtctggaagctccgcccgtcgcactggagagtcggccgaggcgcacgaggtatttttcacgctccgccccactgcaggctaaagtgcgtgggcgggaagcggtgggcagggtgccatctggctccgcccttctcctgtggtgtgggccaggcggcgggttcctcctcctgcagcagccacaggctccaccctgatccttctcccgcggcatggatccttctcccgcggcgtggatccttctcccgcaatctccgtgcgcgtccccagtcagtacccgcagcctcccgacgcacccgctggctccaagcctccctaccccaggtttcctggctaagagagagacagaaggagagagggggaagagagagaacaggcaatgggaggttgatggtgagagcttattgaaagacaagagggaggaaacccacatcctccattccccatccattcatttattgccttatttattccattgaatcttcacagctctagaaaaagtgtgctacaattattccctttattaaatgaggtcactgaggcacagtttaagaaatttgccagcagggcacagtgggtcactccggtaatcccagaactttgagagggggaggaaggtggatcccttgagcccaggagttggagaccagcctggccaacatggcgagaccccgtttctacaaaaattagccaaaattagccaaactggctcacacttgtagtcccaggtactcgagaggctgaggccggaggagcgtgtgagcccaggaggcagtggctgcgctgagccgtgattgtgccactgcactccagcctgggcaacagagtaagaccctgtctcgaaaaaaaaaaaatggaaaaaagaaaaaaagaactggctgggagtggtggctcatgcctgtaatcccagcactttgggaggccgaggtgggtggatcacctgaggtcaggagtttgagaccaacctgaccaacaaggtgaaatcccatttctactaaaaatacaaaaattagccaggcgtggtggcaggtgcctgtagtcccagctactagggaggctgagacaggagaatagcttgaacctgggaggcagaggttgcagtgagccgagattgcaccactgcactccagactgggcaatacagtgagactccgtctcaaaaacaaaaaaaatcctaccacatgtgctccaccaagctctgtctccaaggtggccttggaagccacatggggaaggtggcagagactctaggagcctgagcagagacccagatgattatgaaaaatgcagacctacccatccttattcacctgggaccaccgtgaactatatcataagaaataaacccctattgtacatacatgcaccattccagttgggtctatttgttacagcagtttagccaaccctaatccacatatacagtgtcaacagtggctgagatgacatgttgcacagacatgagagtcagaaagacctgagttcaagtcccagtgatgacatttactatctgtgtgaccttgaaaagctgcctaactactctcagaccgtttcctcatcagtttgttttgagaatcaaatgagaaaattactaaaaagcccttagcactgcatctaagatggggaagagacagtcaatgaattcaagtttcctgaagcccagttgcatccctgccctgtcctgggctctgagagacagttgccgaagctagtgttaaagtgaactaaatatggcctgagtgggacttcgtacttctatagttgagtccttgtggacaaattgcaacctagcttaataggtagacaagattgaaaacctaacttaggagtatgcgtctgtaacaatagctgagtcttggccaatcccagaggccgtagttcaaccgctcatacgctgctgagtgttcaaactgtactcaaataaggcaaacgccaacttgtaacaatccagccattctgtacttcacttctgatttctgtacatcatttcccttcttttgtcca

SEQ ID NO: 1886595 - DNA, 4001 bp, Homo sapiens
tgttgccaggcaggaggaggccatctccacagagacagccgcgagacacacgcgtccgcagtcagggagcgcaggagcaatgtggccccgaggggcacgggctccattggtccaggagaacccattcttctcccaccctcgagaccacccagcaaagccccaaggacacacggctcccctaaggaagggtggccacaggcgggagtgacccagaaacgttacaaaaccaaatgccagaacccacccaatgtttagcaagcctggggatgtgccacgtcccccagggatccagcacgcacccaaggagacactgtcccggcgaggagcctggagcctgggaaatacaaggcatcagactggtcccaagactctccccagcgctggggacaactgtctgcttatcttagtcccctccgcccttttcaatccaaccctgggtcctgggcacctcatagttccaaacccctgctatgcacatcccggctgtgatgcctgggacaggtcgtgtcacctctccaaacctgtttcctcatctgtgaaatgcaaatctccacggtccctatgcctcggatggtcagagtcaggattccgcatgacgacccccaacaggagcctggcacagacctggctctgggcagcgtctccataaaggccacctgttgtttttatctcccgaaagcgaacatgacaaggctttaaccccccacggcaatcccccctcacccctgttctcaggatagccttggaacccaatagcagagcgcctgaggcccttcatgaccccagcccacccgcgagcccacctcccaccctgcccctacccctcacacctcccgtggccagcctccagcctcacggtctttgctcacaccgttcaccccccttcttctggacccacctcatcgccccttcctaagcatcagcccaattcttgcacatccatcaaatccttttccagacacctcctggaactcttccctgccgccccctacagccatccccacctctccgggtaccccgcagccccaggccgcatcccaattcctctccaattagcgactgtttgtcctcccagctgagcgcggcctccgcgccccgcccccgctggcgtctgcagagcccccgggtgggacgtctgtctccagacccggggtttttcggctccccggggccgtgccaaccgcggctccaggcgttccttatttagcagggccgccgtgccgcgccggagcctcgccctgggagcgtcctggcccgcgtcctgcttcccgtcccgggccagggaacgcgcccacgcccgcccgtcccgcggcctctcccgggtgccgctgggcccgctactcacagcgctgtggcgtccgcggggatgcgcagcgcgggaccgagcgtccgcagcccgcggcccgagcagttgacgcggcaggcggcgccgggcgctgggccgcagaggcaggggggctcgcagggcccgcagccgcgcccggggccccccgccagcgccccgagccacaggcccaggcccagggccagcgccaggcgggcgggcgcggcgggcggcatcgttagggcagcgcgcgcatggccccgccgtccccaggcccgcccgcgcgcggaggccgcagctcaggcggggcccgcggacggcatggcgggcgcggggctggatggggctgcggccgcgacctgctgctgagcgacgcccgctcggggctcggggccaggccgctccgggagctcggccgcccgctcggacgctggcgctgcagtgcgggccccgccgcggctcctcctcctcctccccgcgcggcgcggggcggacggggcgagggggggcggggcgggtgcaggctccgcccccttcgccacagcgcgaccgggccagcgatgagggactggcatccggaggcttcaccctccgctccacagggtcggcagcagggcggggcctccggaagctccgccccacgcgttcccggggcgcatgcgacgtggggcggagcgtctggaagctccgcccgtcgcactgcagagtcggccgaggcgcacgagctatttttcacgctccgccccgctgcaggctaaagtgcgtgggcgggaagcggtgggcagggtgccatctggctccgcccttctcctgtggtgtgggccaggcggcgggttcctcctcctgcagcagccacaggctccaccctgatccttcttccgcggtgtggatccttctcccgcaatctccgtgcgcggcccgagtcagtacccgcagcctcccgacgcacccgctggctccaagcctccctaccccaggtttcctggctgagagagagacagagggagagagggggaagagagagaacaggcaatgggaggttgatggtgagagcttattgaaagacaagagggaggaaacccacatccttcattccccatccattcatttattgccttatttattccattgaatcttcacagctctagaaaaagtgtgctacaattattccctttattaaatgaggtcactgaggcacagacagtttaagaaatttgccagcagggcacagtggctcactccggtaatcccagaactttgagagggggaggaaggtggatcccttgagtccaggagttggagaccagcctggccaacatggcgagaccccgtttctacaaaaattagccaaaattagccaaactggctcacgcttgtagtcccaggtactcgagaggctgaggccggaggagcgtgtgagcccagtaggcagtggctgcgctgagccgtgattgtgccactgcactcccgcctgggcaaaagagtaagatcctgtctcgaaaaaaaaaaaaatggaaaaaagaaaaaaagaactggctgggagtggtggctcatgcctgtaatcccagcactttgggaggccgaggcgggcagatcacaagatcagaagttcgagaccagcctagccaacatggtgaaacctcatctctactaaaaatacaaaaatcagctgggcatggtggcaggcacctataatcccagctactagggagcctgaggcaatagaatcgcttgaacctgggaggcagaggttgtgccactgcactccagcctgggcaacagagcaagactccgtctcaaaaaaaaaaaaagaaatttaccaggtcacacagcaggtggatggtaaggctgcgattgtattccaaacccagcttttaattgcagtcaaatgacagacttaagattcaaggactccagtggagggaagaaacagccacaagaaactgctgccaaatgagcaaaacagattaaccaagtctcaatgattgtttgaaggcggttgtggaataaaatgcaattgtttagaaaggatttcttaaatagaaaagacatatgtttaaagaagcaaattagttacctggaaatgaaattctaaactatttgaaaaaccatgggggccgggcgtggtggctcatgcctgtaatcccagcactttgggaggccaaggtgggcagatcacaaggtcaggagttcgagaccagcctgaccaacatggtgaaaccccgtctctactaaaaatacaaaaattagctgggggtggtgccacgcgcctgtaatcccagctactcaggaggctgagacaggagaatcgcttgaacccaggaggtggaggttgcagtgagctgagattgtgccatggcactccagcctgggcaacaagagtgagactccatctcaaaaaacaaagaaacaaaaaaacaaaatccatgtggtgagacagagcaaataaaatgtgccagagatcttgtttggttcagggaagaagacgtgagggaaatgtttcttgataaaatacagacctgagggtttttattaacagtgaataattgttagcctaaaagggggaaactagaagaggagaaaagaaacaagaaagccaggccaggcacagtggctcacacctgtaatcccagcactttgggaggccaaggcaggcgggtcacatgaggccaagagt

SEQ ID NO: 1886596 - DNA, 4001 bp, Homo sapiens
tttatcagttttctcaaaatgtcatctaaattcatattttacattctaagatctgtgctgtgttctctctccatctcggagagcaaaaaaattacacacatccaactatcacttctaatatgaataaaaaatgttcttcactttatccactcgaaaataatatccctgaagaatttaaatatctcactgttttgcttttatttcttacaaaatggccccaggagaaaaagccgtcagactcgtttcagccatccattcacagggctactgggctgagtcaaggaatcacattccacttgtaaaacacaagcaaaaacacttctgaaaaagtccattaaagcagggctaatgatagacacaaggaggtacgctggctacaataccatgctcccaatcctctgtccggggtcttgccacctggccagctggtagctgtgtgaccttgagccagtcatctaccctctctgagcttaatttactcctcgtgtgtgccatgaggaaaacaaggtcctccaaactcagagagagtaataattaaatgagaatccacaaaatatttagcccaatgcttgactcataataaggctttaataaaacttagtttttattattagtattttttactaccaccaaaaaggactttttggtaaatcaaatttgtcttattccctctggtttcccactctttgcctttatatgttttcttctctctgctagaaatagtcttcctttctccctttccagaaatctacttcccactctttaaatcagaggtcagcaaaccacagctaatgggacaaatctggcccaccatctgcttttgtaaataaagttttattggaacacagccatgctcattcatttatgtggtatctatgcttgcttttgtgctacaaaaaagtaaagctgcacagttgcagcagccaccatatggcccacaaagcctaaaatacttactatctggccctttacagagagtaaaatctgcagatcagtgctcaaaaatcttttgctcaagttatcccatacctgggcatcttcctgatccccttgagacaaagttacttccctggccatggcatgttccacatatcatcctgctgtaaagagtcatttccatggccgcctccctgctatactttgtgaataccatcaaggtgggcatcagctcttacatctttgaaactctgaggtaagaaagggtgaccctaagtatgggaagcccctgggggctggggaagaagggggttgagtagagggattatggaaacttggcttcaaatagaggaatgagaagggagggcagagggtttctgtgatgtgtgcatgctatgcagaccccacaggcactcatgcacacagagctgtgatggcatgtacacacctatgcataaattctcaactccaggtacccattagcagcatgagaaagtacaaacagatcagctgggtcattacacctcagctctacacggtaccttgtgcctgttacaagatatctaaaatatagaagacaagagagaataatggatccagctagctctctgcctatttgagtgcaaatagcttattcaggatacaatcttaagaagcacaagtgagggagaaagagaagtgagacagaatatgtaaaagagtcaatacacaggtggcaatgggcagattatctctgtggacaactggtgttcaaactcactggggtcatctgggagactcgggagaacatatctcgaagttgtcctattccaagggtcaagaagggatggtaatctaccaactcttgccactcaaaggctgatggctgttccctgggcagtaagactgagcacactcccatggtcagaggaaagtccaggcaggcagctgcagggattaacaggttgaaagcctgtatgggagtggtgggttcctggggatctgggtgagccatcaacagtcactgctctatgatccaacccaagcatcgaagggcggatgcacggactacactacagaagcagccatggggcaacgcaaaacttctctctaattttttaccccatcttctcactgctatcctccagaaccccagtaagtgagttattgaaccggggacaggagaagtaaactgccgacctgatttggcagactccacatttattaaatgtattcccttcccttccctttcctcccctctcctcccctcccctcgcctcccctcccctccccttccctttccttcctcccttccttccttttccttccttctttccttccttccttccttccttccttccttccttccttccttcttctctttctctctttctttctttcgaccgaatgttgctcttgttgcccaagctggagtgcagtggcgcgatctcggctcactgcaccctctgcctcccggtttcaagcgactctcctgcttcagcctcctgagtagctggaattacaggcgcccgccaccacggactgctaatttttgtatctttagtagagacgggttttactatgttggccaggctggcatcgaactcctgagcccatgatctgcctgcctcggccttccagagtgctgggattacaagcatgagccaccgcacctgccctcataaattttttactaagcaaaacatttttaaactaagtgataagacaatttttatttaaaaccaaggatgtctgagcatgtgccattagatgagatcaggcaattcagggtgctatgcccacaggaaggctagcattagatattaacagtctagctcagttaagcattccagtcacctttggaaacgtttcctgggctctttaatttgtttccagagtagcaaccaattatcattattgtactgttaagaatgggacaaagactgtgtaccattaatactgcttctaaactactttaaagaacttagtctttctagccaaatatgctttgaaaatgtcactggctttaaatgtatttggtttaaatttccccaggttctaacacacactcttcattcattcagccatcttctgagcctctattaataacaatacctctttgaagaatgcatacattacaaactttctcaagaagcctagaatcgacagaggagagagactgtaataaaaatattgcttttccttgtgacagtggcattaatagaatgctaaacaatctgtgtgagaaaatgaagaaagagggattgagtcatgcaaagaagaccagaaaaagtccacagaggaggggctgctcacaccaggtttggggggtaacagagaaatgagcagcaattttagctggtgaaacagactatgtgtattagttatctaatgctgaataaaattaccccaaacttagtgctttaaagcaactaaaaacatttatgattgcacacagtgtttgtggcttggagatatggaagctgctcagctgtgtagttcagtcaggatgttggtgaggctacagttatctaaaagcttgatgggggctagaaggtctacttccaaggtggctcacacatacggctaaagaattgatgctggctattagtaggtggcctcagttccttgccatgtggatttctccatgaagctacttgagcttccctacaacacggcatttggctttgcctgtagcaagaaaggacaagaataaacaaggctcagaattcacacaaagtcatttctgccatgtcctatttggctacacaagtcattcctattcgatgtgggaggggaccacgcaggagcatgggtaccatgaggtgagaatcactgggagccctcctgggggctggctaccataatatgcaaaagtcagaagtgcattatctttgagggaagagaaaatgctgatgccattggaacgagggtgagttaggaacgtagtggtacaatataaagccagaaagcatgggtcagactgtagtttggatcaaggaggttacataaaggaaggcactgcatctgtcagtctctcctccctttcatctgttgggatttgagtgcaggagtcaggagcattc

SEQ ID NO: 1886597 - DNA, 4001 bp, Homo sapiens
tgggtctttctggtcctggggtggtcctgctcagccccagatgtcccccctccagcctaggagaggtgctggccctcagcctgagggccttctcagagctcatggagcacggcgtggtgtcctgggagactctgagcatcccctttgtgaggaaggtgggtgggctttcctagggcagcgggtgggggcagtggagcagtggggcagtggtagacccggtcttccatgggggtgaggtggtgacacccccgccccttacaggtggtgtgctacgtgaacatgaacctcatggatgcctccgtgcctcccctggcccttgggctgctggagagtgtgaccttgagcagcccagccctgggccagctggtcaagagcgaggtgcccctggataggctgctggtgcacctacaggtgtaagcctctggggctggggtccagatgcagggagcagggctggagcctgaatgttccactgagccctcttcttgccataggatgaaccagcagctgcaaaccaaggccatggccctgctgacagccttgctgcagggggccagccctgtggaacgcaaggtgagtgtcgatcggtggctagatgggggcagcacccggtgggcgctgccccaccctgaagcaaaatcctctaagccccccttttttttttttttgagatggagtcttgctctgtcgcccaggctggagtgcagtggtgcgatcttggctcactgcaagctctgcctcccgggttcacaccattctcctgcctcagcctcccgagtagctgggactacaggctcccgccaccacgcccagctgatttttttttttttttttttttttttaagtagagacggggtttcactgtgttagccaggttggcctccatctcctgacctcgtgatccgcccgccttggcctcccaaagtgctgggattacaggcgtgagccaccgcgcccagcctaagccccctttctttctaccccctcagcacatgcttgactatctttggcagaggaaccttcgccagttcatctataaggtaggaagtggtgggccagggggacctctctgcccctccctccccgtgagccctcgcttacaccagggactggctgtcctgcagaacatcatccacagtgcagcaccaatgggcgacgagatggctcatcacctgtacgtactgcaggctctcatgctggggctgctggagccgcgcatgcggacgcccctggacccctacagccaggtgtgtgtctttggtgaggacaaggcagggggtggcttagagcttggccttgaatctataatcttgatcccctcccccgccacccaacactgaccccaggagcagcgggagcagctgcaggtcctacgccaggctgccttcgaggtggagggggagtcctcgggtgccgggctaagtgctgaccgtcgccgttccctctgtgcccgagagttccgcaaactgggcttttctgtgagtatcacccctacccaactccccacccctgcctcagcccagggctgttgttccaggcggccgtggcccttcttgaactgcctgtgcccacttcccccagaacagcaacccagcacaggacctggagcgcgtgccccccggtctgctggccctggacaacatgttgtacttctccagaaacgcgcccagcgcgtacagccgggtcggtgacagggtagggtgggggggtggcagcatcccccaggcagggtccccatgggcttagctgtgactccttgccccattctctgcgcccccagtttgtgttggagaacagcagccgcgaggacaagcacgagtgcccctttgcccggggcagcatccagctgacggtgctgctgtgtgagctgctccgtgttggggagccctgtgagtggcctggactgggcacagcatggccaagagcaggggacggaagggcagagagggccaggggctgtatgcactttctccctgagcccctcctgcccccccactccaggctctgagacagcccaggacttctcacccatgttcttcggccaagaccagagcttccacgagctcttctgtgtgggcatccagctgttgaataagacctggaaggagatgcgggctacacaggaggacttcgacaaggtgggtggggtgggagctgggaggcctgggccagggcagggggctgatctgggtacagagcttaggccctgagctgagcttgggcggccccaggtcatgcaggtggtgcgggagcagctggcccgcactctggccctgaagcccacttccctggagctcttccgaaccaaggtgaatgcgctcacttatggggaggtgctgcggctgcggcagactgaacggctgcaccaggagggcacactggctccccctatactgtgagtctggggggatggatcctcagtcctagccctaccttccttggtgccccctgggctactccccaggtcagatgtgctcagtgacacccctctatcagggagctgcgggagaagctgaagccagagctcatgggcctgatccgccagcagcgcttgctccgcctctgtgaggggacgctcttccgcaagatcagcagccggcggcgccagggtctctgaatgggcatgggcagggggcagagggcaggcagagggcaggcagagggcggctggcttggtgtcaggacctctcagcactctggccctcttccctttctccacgcagataagctgtggttctgctgcctgtcccccaaccacaagctgctgcagtacggagacatggaggagggcgccagcccgcctaccctggagagtctgcccgagcaacgtaaggcgggcaggggcgggggccagatacctgctctccccagaccgccctgggccccggggctgccagggctgcagtgctcagcccagccttcttcctgcagtccctgtggccgacatgagggcactcctgacaggcaaggactgcccccatgtccgggagaagggctccgggaagcagaacaaggtgagtacagcgggccaggggctccttcccacccgcccccgcctaccctgtcccctgctcagtgtccccgctcccttgcttccccaggacctctatgagttggccttctcaatcagctatgaccgtggggaggaggaagcgtacctcaacttcattgccccctccaagcgggaggtgagtgtccgccaggctgaggtcggcaggtgggcaggggaggcagatgggcagaccctcacggctctgtgccacccccagttctacctgtggacagatgggctcagtgccttgctgggcagtcccatgggcagcgagcagacacggctggacctggagcagctgctgaccatggagaccaagctgcgtctgctggagctggagaacgtgcccatccccgagcggccaccccctgtgcccccaccccccaccaacttcaacttctgctatgactgcagcatcgctgaaccttgacagtgtggctggccatgggccacagctgcggccactgcagcagccatgaagggcagtgggtagaggagtgcaggcaccctgaccagcagagattgctgcagaaataaagtctgcttggctcttgggatatgttgagccagctctgtaccttgcgggctgagcctgtgacagtgacagtcttccccttctgccttcaaacttagctggtggataagatggggcatcaggccaggccacaaactttgacagctacggttgaggggctggtgttctgaagggggtggggagaggctgggactgcagcctttctccaaggtgagtcctcagcctccctccatgctgggcctgcagggagggttggcctgtggtctgggggcacctgccaagggagaggctgagctgccggcctgctgcaggagaactggcagggtaggaggcactgccccaaatggatgccttcctggacagcgttaacaggggcgtagtctgggagccatctccagaaggctcctgacaatc

SEQ ID NO: 1886598 - DNA, 4001 bp, Homo sapiens
ttgggaggccgaggcaggacgatcgcttgagctcaggagttcgaggctgcagtgagctttgactgcaccgctgcaatccagcctgagtgacaaagagagaccctgtctcaattaaaaaaaaaaaaaaaaaaaaaaaggttgttttgggggaatctccaacagctcaggaaaccatctcatcggctccaggcttttctcacttgaggtccccgacactgtgcaggtggaaagatttaaggggctcctgagagcccagcccccatcctggcaggctgcagggggtgggtggggggtgcgttctggcagcagggccggcagctgtctgcaggcctctcagtgcctgctctagctggccagcgggggcccgctgccaccccccaccccatgatgcagcagaaagtgaaaccgcagttggcccctgccggctgggactgatcacccatggtttccctgcaaaaccagagtcccagggggctggtgggcagctggctcccaggtccggcacagtgaggcctgtcaggcaagtgcccctagaggccaagggaggtgccctggccagaaaggagggtgctgagtcatcgtgaccctaaaatgagagagaaatctgagctatggatcaatgcaggagtgggggggtgaggggtcccagtggtgtcggtgagcagggaagggtggtttcccgacccccaaaaggaagatgtgtgacacccagttttgtcatgctggagccctctacagatctgaactggcaactcccccatctccccccacccctccccacaccgactacaggagtgcggaaaatccctgagataaacaagaattctctaaaagtggacctctgaaactttacacacgactttctgatttctgtcccatcctcagggcagctgtagttgcttaatatttttcttccaaaacacccactcttttttgtttaactgacatcaattgatggacaaaaaaagggcccctgtctcccgaccctaaatggaaaaccaaccaattgcctgaagtacaaatcagcggtgcaaagaatacctactagaataattttcacctttagccggcgccgcttaaaatcagagatgtgcaaatcagacttgggagtctgagttacaggtttcatgcctgaggagctggtggctcagagagactgactcacttgtcccgggtgacacagcaagagaggcgcagagctcgggctggaatgcaggcctggctgatcccagaaacccaggctcagtgctgggctgccgtctccccacccatgaattcctctgtgtgtattcatattattaccttccatgtttaatgcatggactctccaattttcaaagcaccttcagagcttatacaacgttagagctttttatatataacattggctacatccaagaaccctttgaagccagagcagggggtgctgcccctcccttggtgtatggggaaactgaggcagcgagcggggaaagtgttctgtctcagggagctagcaggaaagccaggactgccccagggccccctgccaaggcgatgatcccggaggccctggctgcaaggaccaggcctcgtcaaacaggtaacacttgtttctttccgctttccctacctccccctacaaccccccagagcaaatgctgacgctgatggggagccacagctgtactccttcccaggccggatctcagcgtctgcccctggagggcaaaagcacgtttagcaaccagtgtctgcgcatggcgtctttcaatttttcacagtgataaccggttttgagcacaagaaggcatctaccagggacccagaaggcgctacagcggaagagtttggggaacagctttctctcttctttgagttgctggaggaactccgagctgatgtctttctggcccagggacccccgaggaatactgcaagagcaataaggatttttaggggcattatgatagtggaatggaaacacatctgcccccaaaagtccctcattttccctgcggtaacgaaccagctggcaggaagtggtagctctcagagcaccaagagccaaaactaaaaaggaaaaaatgtacaaagttagagcaaactttaaacaagtgagcgctttcatggtgtacggcggctccgtgcagactcacgaaagggacctcatcttctcaataattggctaaataggtctcagtgcagcagcttccacacagacgtgctcagaaaaccacagatctggaatcccagagcaggttcccaaaatggatacaaggattattccctaaagccaggcgcatcataggagacgtgacgtttcccccaaacttcagatgactgttccagaccctcattaatgatctaagttatccttcaacacctcctcctctggaatgggagaaacttagtccccttggaaatgctgatgaaaatacctggtttccacaacacggacagaaggactaaggcttgggtaggggagctgagtggttatcgctggtggtgcaaaaggggcaaaccggctggcgtgggggctcacgcctgtaatccctgcactttgggaggccaaagtgggaggactgcttgaggccaggagtttgagaacagcctgggcaacacagtgagaccccccccaagtctctgcaaaaaatagccaggtgtggtggtgtgtgcttgtagtcccagctactcaggaggatgaggcttgagcctaggaagttcaggctgcagtgagctgtgctcaccactgcactccagcctgggcaacagagtaagacactgtctcaaaaaaaaggggacgggttttactgctaaggtcccaggtgccatctcttggttcagccactaagatctgaggactaaggagttcagggtgtcttccccaaggcatataacctttgaggccctgcaggtgggtgccccctgtgccagccagcaccctcagagccaggaaagggttaacccctccacatggctgacaccagaggaggagcttactacgcagcctgggatatcacactgggccatctcagagaggagaggcctctgtgagttctgtgaatggaagtggattcactgccttcagattgagaacggggtgaaaaggcatccccacacagaaccgacgccccagtcgctagctggctccttggcacccgtcgcatggccccgaagctctggcagggactctgggcacctgtaccagtgagcacccggccatctcggccaggtctgtgagggagcgattctacccttgccatgtgacagccggcaactagggcccagatctcttctttcaagtagcacctaaaatattctccgggtgaacctagggctaaatacggcatggcctacaggtgccgggtctggaccttttaacgccattctaagatacgatcgagaacccacgaggcctttggtagcctggagtccagttactggggccaaatgggagtcccacgggtttggctgactcagggctgggtgcaacttcctggagcaggcacatgttggtgccagggcagagaggctgcagacagttttcttgtgtgtttgaacccagaatgccagcccagttctcactctgggccgacccccaaggtggcttagttggtggcccctttttctgtccacctggcccacttctttccacttccagcctgcagcccggcccttcctggcctaggttttcctcccagcctgatcaaagcaaaaggctcagctcccaggtgggaggcctcacggagctggagaagagaccagcaaacacatgcacggtaactcagatgtgttatgtgttgtcttgctggctgggagctacgcctcctaggcccaccccaagtcgaaggatcgcagccctggtgctcgagagcaagggcttggggctgggctgcaaaagctcagctttgcctctgaatcttctagaaccacgtttgcactcacacaggacagatttgctctgagcctgtgggatagcctcatctgttcccctttgagcatttggaaagcaaagtggg

SEQ ID NO: 1886599 - DNA, 4001 bp, Homo sapiens
tgcctaactactctcagaccgtttcctcatcagtttgttttgagagtcaaatgagaaaattactaaaaagcccttagcactgcatctaagatggggaagagacagtcaatgaattcaagtttcctgaagcccagttgcatccctgccctgccctgggctctgagagacagttgccgaagctagtgttaaagtgaactaaatatggcctgagtgggacttcgtacttctatagttgagtccttgtggacaaattgcaacctagcttaataggtagacaagattgaaaacctaacttaggagtatgcgcctgtaacaatagctgagtcttggccaatcccagaggccgtagttcaaccgctcatacgctgctgagtgttcaaactgtactcaaataaggcaaacgccaacttgtaacaatccagccattctgtacttcacttctgatttctgtacatcatttcccttcttttgtccataaatcttcttccaccacgtggctgcgctggagtctctatgaatctgctgtgattctggggtctgcccaattcgcgaatcattcattgctcaattaaactactttaaatttaattcagctgagattttcttttatcactaatttgagctggttttctaatgtttgcaaatgggagggctgactaatataacactgctccaaatattaacgtctttctcccaacccatcacccaggcagaagtggtccagcctgggcaaccctaggaggaggctagctctcctctaggaaggcttaggatgcagccagtgggcagtaactggctcactgtcccctgcaactgaaatcagaactggttccagaaaccaagttgacccccaaccagtctttcccaaaatatggctctatgcccatctctggtcaggctgggctgttttcctggacagagaagtctcagacaagcaggcagtggttagtgggctgtgcccaggctgagaacatttcccagagaagatggcatctctggcagtcccttaaagccagcagaggccaagtcatgtccaagaggccaaaaggcccaatatggtggagacagtatacagtccccatgaataagggatgctgatgccttccctatgtaccaggtagtcactgcctgaggggcccagagcagcaggagggcagagccagcctgggcaggggcactgggccggaagtggggctcacatcctcagcacacacacacacacacacacacacacacacacacacacacacacaagcgaatgcacacacacacacacaaatgcacgcacacacagataggtgcattcaaacatcacatacacgtgtacattccttgcaaaatcaacttctgctgatagcacaacaaacaatggggccacagtgtggcatggaggaaaccctggagtctgatctcatttttttttttttgcatctgtcaggggataaagatatttgataaaaatccttgagtcacatccccaccaggtccctgcctacctgtagaccccatcaagccagctccatggcccttcagataccgcctcactgggtccccagggattgacctcagtcctggaaatgcagaaatatctgtatctgtcacagctgagactggcggccttccgccggctttcctggaggcagagctggagacagggacttgggtggatgtggtttttgtttttgttttgaaaggggctttcaggagaagggaggtgaggactacaggatgcagaaggggacagagcagagtgagaatgtggtcccttaaagtcccgccttgacctatcccacgagcagcagagagcacgccacaggatcgtccccaccgtggggcagggaccagccattcacgttgctgtatcagttagtcactgggccattactgggcatggcatcccatcccaggcaatgtggctcccatctgagggtgattctctagagaaggacagctgtgagctctcagcaggtgaggctccaaaagcagctataccagtctagacctcaggggaagggggaattcatctctaggcagggatgattttcataacattgaactcttgacatgcaggagcaccgaccaatcagaacagacacggtgaccaaacaggcacagccacaccagtggataccagcggaatgtccacgctgcctctgcgaagggacagtcccatgagccaagccctagaccagctgttctgggagcactgcatcattgcactgaattctcacaaccgccccataatgctgggaccatccccattttcttgcccaacagcctccgtctcatagacactaggcggctctcccagggtcacacggtccagtcaataacgggcagaactcgcactccgatctgtctggctccaaagctgctaaaaattttctacttggcctcactggcttgacaaagataaaaaagaaggcaagtccttctttccaagagatgctgaggtccctcggtgacactaggtcatgattttatcatgttcagagggcaatgaaagggacagaaaacaagcgatgtgtgatctcctgtcatgtcaagagacgctgttttcaaagaaacgtacgtttcgcagaatcaatacgctgtggggcctcagaaagcagaggcagacacacggccccaacccgtgcacgtgggagccctgttacaagagacggcagaaattaaactgaatcacctggagcaagtacattgtaaatgttcaatattaatgacccacctcggccccaaagaagagagcgttgggctttgtccagctgtgtgctctgttgttaaaagaccaccttgtggccaggcacggtggctcacacctgtaatcccagcgctttgggaggccaaagcaggtggatcacctgcggtcaggagttcgagaccagcctggtcaacatagtgaaaccccgtcgctactaaaaatacaaaaatttgctggatgtggtggctggcgcctgtaatcctagctactcgggaggttgaggcaggagaatcgcttgaacctgggaggcggaggttgcagtgagccaagatcacgccattgcactccagcctgggcgacaagactgaaactccgtctcaaaaacaaacaaacaaacaaacaacaacagaaaacaatttgtgccttaatgggcattcctttcccttcttgctaagggatgagatgatggcagaacttgtggccactgtcctggaggttgacaagctttttctgtaaagtgctagataataaatattttgtgggccacacgatctctggtgcaactactcaacactgccattgtcatgcaaatgtagccatagatgataataaatgaatgggtgtgactgtgttccaataaaactttatttataaaacagacagctggccagagttgggcaatgggcagtagtttgccccccactccccgcccatccgtcctattccttggcttttttgggtacatcaaggagtgcagtctggatgctgggctattttatggccactgggcataaccttaacctgggccttttgtctgttaacctgggtcagtggctacggtgaaggtcgggcaaccaaggtttagatggctcagtacacattcacgcccacaaaccaaaccaggaaaaagatgtgctaagttgagcatatgacactgttggtactcaaatggtttgtttttttttttaaataaatgtttaagtaaattttttattttagaacagttttagaaaaatggtgaaagcagtacagagagtttccatgtaccccatagcttgatgcattatgaactaaagtccatactttttttaggggggtggggacagggtcttgctcgtcacctaggctggagtgtggtggtgtgatcatagttcatggcagcctcaaccctccacctcccctggctcaagcgatcctccatctcagcctcccaagtagctggaaatacaggtgcctgctaccatccccagagaatttgtttttgtttgtttgtttgttgtttgtttgttgagacagggtc

SEQ ID NO: 1886600 - DNA, 4001 bp, Homo sapiens
gaaaagctgcctaactactctcagaccgtttcctcatcagtttgttttgagaatcaaatgagaaaattactaaaaagcccttagcactgcatctaagatggggaagagacagtcaatgaattcaagtttcctgaagcccagttgcatccctgccctgtcctgggctctgagagacagttgccgaagctagtgttaaagtgaactaaatatggcctgagtgggacttcgtacttctatagttgagtccttgtggacaaattgcaacctagcttaataggtagacaagattgaaaacctaacttaggagtatgcgtctgtaacaatagctgagtcttggccaatcccagaggccgtagttcaaccgctcatacgctgctgagtgttcaaactgtactcaaataaggcaaacgccaacttgtaacaatccagccattctgtacttcacttctgatttctgtacatcatttcccttcttttgtccataaatcttcttccaccacgtggctgcgctggagtctctatgaatctgctgtgattctggggtctgcccaattcgcaaatcattcattgctcaattaaactactttaaatttaattcagctgagattttcttttatcactaatttgagctggttttctaatgtttgcaaatgggagggctgactaatataacactgctccaaatattaacgtctttctcccaacccatcacccaggcagaagtggtccagcctggggaaccctaggaggaggctagctctcctctaggaaggcttaggatgcagccagtgggcagtaactggctcactgtcccctgcaactgaaatcagaactggttccagaaaccaagttgacccccaaccagtctttcccaaaatatggctctatgcccatctctggtcaggctgggctgttttcctggacagagaagtctcagacaagcaggcagtggttagtgggctgtgcccaggctgagaacatttcccagagcagatggcatctctggcagtcccttaaagccagcagaggccaagtcatgtccaagaggccaaaagacccaatatggtggagacagtctacagtccccatgaataagggatgccgatgccttccctatgtaccaggtagtcactgcctgaggggcccagagcagcaggagggcagagccagcctgggcaggggcactgggccggaagtggggctcacatcctcagcgcgcacacacactctcacacacacacacacacacacacacacgaatgcacgcatgcacacacaaatgcacgcacgcacaggtgcattcaaacatcacatacacgtgtacattccttgcaaagtcaacttctgctgatagcacaacaaacaatggggccacagtgtggcatggaggaaaccctggagtctgatctcatttttttttttttttgcatctgtcaggagataaagatatttgataaaaatccttgagtcacatccccaccaggtccctgcctacctgtagaccccatcaagccagctccatggcccctcagataccgcctcactgggtccccagggattgacctcagtcctggaaatgcagaaatatctgtatctgtcacagctgagactggcggccttccgccggctttcctggaggcagaggtggagacagggacttgggtggatgtggtttttgtttttgttttgaaaggggctttcaggagaagggaggtgaggactacaggatgcagaaggggacagagcagagtgagaatgtggtcccttaaagtcccgccttgacctatcccacgagcagcagagagcacgccacaggatcgtccccaccgtggggcagggaccagccattcacgttgctgtatcagttagtcactgggccattactgggcatggcatcccatcccaggcaacgtggctcccatctgagggtgattctctagagaaggacagctgtgagctctcagcaggtgaggctccaaaagcagctatgccagtctagacctcaggggaagggggaattcatctctaggcagggatgattttcataacattgaactcttgacatgcaggagcaccgaccaatcagaacagacacggtgaccaaacaggcacagccacaccagtggataccagcggaatgtccacgctgcctctgcgaagggacagtcccatgagccaagccctagaccagctgttctgggagcactgcatcattgcactgaattctcacaaccgccccataatgctgggaccatccccattttcctgcccaacagcctccgtctcatagacactaggcggctctcccagggtcacacggtccagtcaataacgggcagaactcgcactccgatctgtctggctccaaagctgctaaaaattttctacttggcctcactggcttgacaaagattaaaaaagaaggcaagtccttctttccaagagatgctgaggtccctcggcgacgctaggtcatgattttatcatgttcagagggcaatgaaagggacagaaaacaagcgatgtgtgatctcctgtcatgtcaagagacgctgatttcaaagaaacgtacgtttcgcagaatcaatacgctgtggggcctcagaaagctgaggcagacacacggccccgacccgtgcacgtgggagccctgttacaagagacggcagaaattaaactgaatcacctggagcaagtacattgtaaatgttcaatattaatgacccacctcggccccaaagaagagagcgttgggctttgtccagctgtgtgctctgttgttaaaagaccaccttgtggccaggcacggtggctcgcacctgtaatcccagcgctttgggaggccaaagcaggtggatcacctgcggtcaggagttcgagaccagcctggccaacatagtgaaaccccgttgctactaaaaatacaaaaatttgctggatgtggtggctggcgcctgtaatcctagctactcgggaggttgaggcaggagaatcgcttgaacctgggaggcggaggttgcagtgagccaagatcacgccattgcactccagcctgggcgacaagagtgaaactccgtctcaaaaacaaacaaacaaacaaacaacaacagaaaacaatttgtgccttaatgggcattcctttcccttcttgctaagggatgagatgatggcagaacttgtggccactgtcctggaggttgacaagctttttctgtaaagtgctagataataaatattttgtgggccacacgatctctggtgcaactacacaacgctgccattgtcatgcaaatgtagccatagatgatgataaatgaatgggtgtgactgtgttccaataaaactttatttataaaacagacagcaggccagagttgggcaatgggcagtagtttgccccacactccccgcccatccgtcctattccttggcttttttgggtacatcaaggagtgcaatctggatgctgggctattttatggccactgggcataaccttaacctgggccttttgtctgttaacctgggtcagtggctacggtgaaggtcgggcaaccaaggtttagatggctcagtacacattcacgcccacaaaccaaaccaggaaaaagatgtgctaagttgagcatatgacactgttggtactcaaatggtttgtttttttttttaaataaatgtttaagtaaattttttattttagaacagttttagaaaaatggtgaaagcagtacagagagtttccatgtaccccatagcttgatgcattatgaactaaagtccatactttttttgggggggtggggacagggtcttgctcgtcacctaggctggagtgtggtggtgtgatcatagttcatggcagcctcaaccctcgacctcccctggctcaagtgatcctccatctcagcctcccaagtagctggaaatacaggtgcctgccaccatccccagagaatttgtttttgtttgtttgtttgtttgttgtttgtttgttgagacag

SEQ ID NO: 1886601 - DNA, 4001 bp, Homo sapiens
cctaactactctcagaccgtttcctcatcagtttgttttgagagtcaaatgagaaaattactaaaaagcccttagcactgcatctaagatggggaagagacagtcaatgaattcaagtttcctgaagcccagttgcatccctgccctgccctgggctctgagagacagttgccgaagctagtgttaaagtgaactaaatatggcctgagtgggacttcgtacttctatagttgagtccttgtggacaaattgcaacctagcttaataggtagacaagattgaaaacctaacttaggagtatgcgcctgtaacaatagctgagtcttggccaatcccagaggccgtagttcaaccgctcatacgctgctgagtgttcaaactgtactcaaataaggcaaacgccaacttgtaacaatccagccattctgtacttcacttctgatttctgtacatcatttcccttcttttgtccataaatcttcttccaccacgtggctgcgctggagtctctatgaatctgctgtgattctggggtctgcccaattcgcgaatcattcattgctcaattaaactactttaaatttaattcagctgagattttcttttatcactaatttgagctggttttctaatgtttgcaaatgggagggctgactaatataacactgctccaaatattaacgtctttctcccaacccatcacccaggcagaagtggtccagcctgggcaaccctaggaggaggctagctctcctctaggaaggcttaggatgcagccagtgggcagtaactggctcactgtcccctgcaactgaaatcagaactggttccagaaaccaagttgacccccaaccagtctttcccaaaatatggctctatgcccatctctggtcaggctgggctgttttcctggacagagaagtctcagacaagcaggcagtggttagtgggctgtgcccaggctgagaacatttcccagagaagatggcatctctggcagtcccttaaagccagcagaggccaagtcatgtccaagaggccaaaaggcccaatatggtggagacagtatacagtccccatgaataagggatgctgatgccttccctatgtaccaggtagtcactgcctgaggggcccagagcagcaggagggcagagccagcctgggcaggggcactgggccggaagtggggctcacatcctcagcacacacacacacacacacacacacacacacacacacacacacacacaagcgaatgcacacacacacacacaaatgcacgcacacacagataggtgcattcaaacatcacatacacgtgtacattccttgcaaaatcaacttctgctgatagcacaacaaacaatggggccacagtgtggcatggaggaaaccctggagtctgatctcatttttttttttttgcatctgtcaggggataaagatatttgataaaaatccttgagtcacatccccaccaggtccctgcctacctgtagaccccatcaagccagctccatggcccttcagataccgcctcactgggtccccagggattgacctcagtcctggaaatgcagaaatatctgtatctgtcacagctgagactggcggccttccgccggctttcctggaggcagagctggagacagggacttgggtggatgtggtttttgtttttgttttgaaaggggctttcaggagaagggaggtgaggactacaggatgcagaaggggacagagcagagtgagaatgtggtcccttaaagtcccgccttgacctatcccacgagcagcagagagcacgccacaggatcgtccccaccgtggggcagggaccagccattcacgttgctgtatcagttagtcactgggccattactgggcatggcatcccatcccaggcaatgtggctcccatctgagggtgattctctagagaaggacagctgtgagctctcagcaggtgaggctccaaaagcagctataccagtctagacctcaggggaagggggaattcatctctaggcagggatgattttcataacattgaactcttgacatgcaggagcaccgaccaatcagaacagacacggtgaccaaacaggcacagccacaccagtggataccagcggaatgtccacgctgcctctgcgaagggacagtcccatgagccaagccctagaccagctgttctgggagcactgcatcattgcactgaattctcacaaccgccccataatgctgggaccatccccattttcttgcccaacagcctccgtctcatagacactaggcggctctcccagggtcacacggtccagtcaataacgggcagaactcgcactccgatctgtctggctccaaagctgctaaaaattttctacttggcctcactggcttgacaaagataaaaaagaaggcaagtccttctttccaagagatgctgaggtccctcggtgacactaggtcatgattttatcatgttcagagggcaatgaaagggacagaaaacaagcgatgtgtgatctcctgtcatgtcaagagacgctgttttcaaagaaacgtacgtttcgcagaatcaatacgctgtggggcctcagaaagcagaggcagacacacggccccaacccgtgcacgtgggagccctgttacaagagacggcagaaattaaactgaatcacctggagcaagtacattgtaaatgttcaatattaatgacccacctcggccccaaagaagagagcgttgggctttgtccagctgtgtgctctgttgttaaaagaccaccttgtggccaggcacggtggctcacacctgtaatcccagcgctttgggaggccaaagcaggtggatcacctgcggtcaggagttcgagaccagcctggtcaacatagtgaaaccccgtcgctactaaaaatacaaaaatttgctggatgtggtggctggcgcctgtaatcctagctactcgggaggttgaggcaggagaatcgcttgaacctgggaggcggaggttgcagtgagccaagatcacgccattgcactccagcctgggcgacaagactgaaactccgtctcaaaaacaaacaaacaaacaaacaacaacagaaaacaatttgtgccttaatgggcattcctttcccttcttgctaagggatgagatgatggcagaacttgtggccactgtcctggaggttgacaagctttttctgtaaagtgctagataataaatattttgtgggccacacgatctctggtgcaactactcaacactgccattgtcatgcaaatgtagccatagatgataataaatgaatgggtgtgactgtgttccaataaaactttatttataaaacagacagctggccagagttgggcaatgggcagtagtttgccccccactccccgcccatccgtcctattccttggcttttttgggtacatcaaggagtgcagtctggatgctgggctattttatggccactgggcataaccttaacctgggccttttgtctgttaacctgggtcagtggctacggtgaaggtcgggcaaccaaggtttagatggctcagtacacattcacgcccacaaaccaaaccaggaaaaagatgtgctaagttgagcatatgacactgttggtactcaaatggtttgtttttttttttaaataaatgtttaagtaaattttttattttagaacagttttagaaaaatggtgaaagcagtacagagagtttccatgtaccccatagcttgatgcattatgaactaaagtccatactttttttaggggggtggggacagggtcttgctcgtcacctaggctggagtgtggtggtgtgatcatagttcatggcagcctcaaccctccacctcccctggctcaagcgatcctccatctcagcctcccaagtagctggaaatacaggtgcctgctaccatccccagagaatttgtttttgtttgtttgtttgttgtttgtttgttgagacagggtc

SEQ ID NO: 1886602 - DNA, 4001 bp, Homo sapiens
ccttgaaaagctgcctaactactctcagaccgtttcctcatcagtttgttttgagagtcaaatgagaaaattactaaaaagcccttagcactgcatctaagatggggaagagacagtcaatgaattcaagtttcctgaagcccagttgcatccctgccctgccctgggctctgagagacagttgccgaagctagtgttaaagtgaactaaatatggcctgagtgggacttcgtacttctatagttgagtccttgtggacaaattgcaacctagcttaataggtagacaagattgaaaacctaacttaggagtatgcgcctgtaacaatagctgagtcttggccaatcccagaggccgtagttcaaccgctcatacgctgctgagtgttcaaactgtactcaaataaggcaaacgccaacttgtaacaatccagccattctgtacttcacttctgatttctgtacatcatttcccttcttttgtccataaatcttcttccaccacgtggctgcgctggagtctctatgaatctgctgtgattctggggtctgcccaattcgcgaatcattcattgctcaattaaactactttaaatttaattcagctgagattttcttttatcactaatttgagctggttttctaatgtttgcaaatgggagggctgactaatataacactgctccaaatattaacgtctttctcccaacccatcacccaggcagaagtggtccagcctgggcaaccctaggaggaggctagctctcctctaggaaggcttaggatgcagccagtgggcagtaactggctcactgtcccctgcaactgaaatcagaactggttccagaaaccaagttgacccccaaccagtctttcccaaaatatggctctatgcccatctctggtcaggctgggctgttttcctggacagagaagtctcagacaagcaggcagtggttagtgggctgtgcccaggctgagaacatttcccagagaagatggcatctctggcagtcccttaaagccagcagaggccaagtcatgtccaagaggccaaaaggcccaatatggtggagacagtatacagtccccatgaataagggatgctgatgccttccctatgtaccaggtagtcactgcctgaggggcccagagcagcaggagggcagagccagcctgggcaggggcactgggccggaagtggggctcacatcctcagcacacacacacacacacacacacacacacacacaagcgaatgcacacacacacacacaaatgcacgcacacacagataggtgcattcaaacatcacatacacgtgtacattccttgcaaaatcaacttctgctgatagcacaacaaacaatggggccacagtgtggcatggaggaaaccctggagtctgatctcatttttttttttttgcatctgtcaggggataaagatatttgataaaaatccttgagtcacatccccaccaggtccctgcctacctgtagaccccatcaagccagctccatggcccttcagataccgcctcactgggtccccagggattgacctcagtcctggaaatgcagaaatatctgtatctgtcacagctgagactggcggccttccgccggctttcctggaggcagagctggagacagggacttgggtggatgtggtttttgtttttgttttgaaaggggctttcaggagaagggaggtgaggactacaggatgcagaaggggacagagcagagtgagaatgtggtcccttaaagtcccgccttgacctatcccacgagcagcagagagcacgccacaggatcgtccccaccgtggggcagggaccagccattcacgttgctgtatcagttagtcactgggccattactgggcatggcatcccatcccaggcaatgtggctcccatctgagggtgattctctagagaaggacagctgtgagctctcagcaggtgaggctccaaaagcagctataccagtctagacctcaggggaagggggaattcatctctaggcagggatgattttcataacattgaactcttgacatgcaggagcaccgaccaatcagaacagacacggtgaccaaacaggcacagccacaccagtggataccagcggaatgtccacgctgcctctgcgaagggacagtcccatgagccaagccctagaccagctgttctgggagcactgcatcattgcactgaattctcacaaccgccccataatgctgggaccatccccattttcttgcccaacagcctccgtctcatagacactaggcggctctcccagggtcacacggtccagtcaataacgggcagaactcgcactccgatctgtctggctccaaagctgctaaaaattttctacttggcctcactggcttgacaaagataaaaaagaaggcaagtccttctttccaagagatgctgaggtccctcggtgacactaggtcatgattttatcatgttcagagggcaatgaaagggacagaaaacaagcgatgtgtgatctcctgtcatgtcaagagacgctgttttcaaagaaacgtacgtttcgcagaatcaatacgctgtggggcctcagaaagcagaggcagacacacggccccaacccgtgcacgtgggagccctgttacaagagacggcagaaattaaactgaatcacctggagcaagtacattgtaaatgttcaatattaatgacccacctcggccccaaagaagagagcgttgggctttgtccagctgtgtgctctgttgttaaaagaccaccttgtggccaggcacggtggctcacacctgtaatcccagcgctttgggaggccaaagcaggtggatcacctgcggtcaggagttcgagaccagcctggtcaacatagtgaaaccccgtcgctactaaaaatacaaaaatttgctggatgtggtggctggcgcctgtaatcctagctactcgggaggttgaggcaggagaatcgcttgaacctgggaggcggaggttgcagtgagccaagatcacgccattgcactccagcctgggcgacaagactgaaactccgtctcaaaaacaaacaaacaaacaaacaacaacagaaaacaatttgtgccttaatgggcattcctttcccttcttgctaagggatgagatgatggcagaacttgtggccactgtcctggaggttgacaagctttttctgtaaagtgctagataataaatattttgtgggccacacgatctctggtgcaactactcaacactgccattgtcatgcaaatgtagccatagatgataataaatgaatgggtgtgactgtgttccaataaaactttatttataaaacagacagctggccagagttgggcaatgggcagtagtttgccccccactccccgcccatccgtcctattccttggcttttttgggtacatcaaggagtgcagtctggatgctgggctattttatggccactgggcataaccttaacctgggccttttgtctgttaacctgggtcagtggctacggtgaaggtcgggcaaccaaggtttagatggctcagtacacattcacgcccacaaaccaaaccaggaaaaagatgtgctaagttgagcatatgacactgttggtactcaaatggtttgtttttttttttaaataaatgtttaagtaaattttttattttagaacagttttagaaaaatggtgaaagcagtacagagagtttccatgtaccccatagcttgatgcattatgaactaaagtccatactttttttaggggggtggggacagggtcttgctcgtcacctaggctggagtgtggtggtgtgatcatagttcatggcagcctcaaccctccacctcccctggctcaagcgatcctccatctcagcctcccaagtagctggaaatacaggtgcctgctaccatccccagagaatttgtttttgtttgtttgtttgttgtttgtttgttgagacagggtct

SEQ ID NO: 1886603 - DNA, 4001 bp, Homo sapiens
  modified_base (1)..(121): a, c, t, g, unknown or other
nnnnnnnnnnnnnnnnnnnnnnnnnnnnnnnnnnnnnnnnnnnnnnnnnnnnnnnnnnnnnnnnnnnnnnnnnnnnnnnnnnnnnnnnnnnnnnnnnnnnnnnnnnnnnnnnnnnnnnnnngaattcaagtttcctgaagcccagttgcatccctgccctgccctgggctctgagagacagttgccgaagctagtgttaaagtgaactaaatatggcctgagtgggacttcgtacttctatagttgagtccttgtggacaaattgcaacctagcttaataggtagacaagattgaaaacctaacttaggagtatgcgcctgtaacaatagctgagtcttggccaatcccagaggccgtagttcaaccgctcatacgctgctgagtgttcaaactgtactcaaataaggcaaacgccaacttgtaacaatccagccattctgtacttcacttctgatttctgtacatcatttcccttcttttgtccataaatcttcttccaccacgtggctgcgctggagtctctatgaatctgctgtgattctggggtctgcccaattcgcgaatcattcattgctcaattaaactactttaaatttaattcagctgagattttcttttatcactaatttgagctggttttctaatgtttgcaaatgggagggctgactaatataacactgctccaaatattaacgtctttctcccaacccatcacccaggcagaagtggtccagcctgggcaaccctaggaggaggctagctctcctctaggaaggcttaggatgcagccagtgggcagtaactggctcactgtcccctgcaactgaaatcagaactggttccagaaaccaagttgacccccaaccagtctttcccaaaatatggctctatgcccatctctggtcaggctgggctgttttcctggacagagaagtctcagacaagcaggcagtggttagtgggctgtgcccaggctgagaacatttcccagagaagatggcatctctggcagtcccttaaagccagcagaggccaagtcatgtccaagaggccaaaaggcccaatatggtggagacagtatacagtccccatgaataagggatgctgatgccttccctatgtaccaggtagtcactgcctgaggggcccagagcagcaggagggcagagccagcctgggcaggggcactgggccggaagtggggctcacatcctcagcacacacacacacacacacacacacacacacacaagcgaatgcacacacacacacacaaatgcacgcacacacagataggtgcattcaaacatcacatacacgtgtacattccttgcaaaatcaacttctgctgatagcacaacaaacaatggggccacagtgtggcatggaggaaaccctggagtctgatctcatttttttttttttgcatctgtcaggggataaagatatttgataaaaatccttgagtcacatccccaccaggtccctgcctacctgtagaccccatcaagccagctccatggcccttcagataccgcctcactgggtccccagggattgacctcagtcctggaaatgcagaaatatctgtatctgtcacagctgagactggcggccttccgccggctttcctggaggcagagctggagacagggacttgggtggatgtggtttttgtttttgttttgaaaggggctttcaggagaagggaggtgaggactacaggatgcagaaggggacagagcagagtgagaatgtggtcccttaaagtcccgccttgacctatcccacgagcagcagagagcacgccacaggatcgtccccaccgtggggcagggaccagccattcacgttgctgtatcagttagtcactgggccattactgggcatggcatcccatcccaggcaatgtggctcccatctgagggtgattctctagagaaggacagctgtgagctctcagcaggtgaggctccaaaagcagctataccagtctagacctcaggggaagggggaattcatctctaggcagggatgattttcataacattgaactcttgacatgcaggagcaccgaccaatcagaacagacacggtgaccaaacaggcacagccacaccagtggataccagcggaatgtccacgctgcctctgcgaagggacagtcccatgagccaagccctagaccagctgttctgggagcactgcatcattgcactgaattctcacaaccgccccataatgctgggaccatccccattttcttgcccaacagcctccgtctcatagacactaggcggctctcccagggtcacacggtccagtcaataacgggcagaactcgcactccgatctgtctggctccaaagctgctaaaaattttctacttggcctcactggcttgacaaagataaaaaagaaggcaagtccttctttccaagagatgctgaggtccctcggtgacactaggtcatgattttatcatgttcagagggcaatgaaagggacagaaaacaagcgatgtgtgatctcctgtcatgtcaagagacgctgttttcaaagaaacgtacgtttcgcagaatcaatacgctgtggggcctcagaaagcagaggcagacacacggccccaacccgtgcacgtgagagccctgttacaagagacggcagaaattaaactgaatcacctggagcaagtacattgtaaatgttcaatattaatgacccacctcggccccaaagaagagagcgttgggctttgtccagctgtgtgctctgttgttaaaagaccaccttgtggccaggcacggtggctcacacctgtaatcccagcgctttgggaggccaaagcaggtggatcacctgcggtcaggagttcgagaccagcctggtcaacatagtgaaaccccgtcgctactaaaaatacaaaaatttgctggatgtggtggctggcgcctgtaatcctagctactcgggaggttgaggcaggagaatcgcttgaacctgggaggcggaggttgcagtgagccaagatcacgccattgcactccagcctgggcgacaagactgaaactccgtctcaaaaacaaacaaacaaacaaacaacaacagaaaacaatttgtgccttaatgggcattcctttcccttcttgctaagggatgagatgatggcagaacttgtggccactgtcctggaggttgacaagctttttctgtaaagtgctagataataaatattttgtgggccacacgatctctggtgcaactactcaacactgccattgtcatgcaaatgtagccatagatgataataaatgaatgggtgtgactgtgttccaataaaactttatttataaaacagacagctggccagagttgggcaatgggcagtagtttgccccccactccccgcccatccgtcctattccttggcttttttgggtacatcaaggagtgcagtctggatgctgggctattttatggccactgggcataaccttaacctgggccttttgtctgttaacctgggtcagtggctacggtgaaggtcgggcaaccaaggtttagatggctcagtacacattcacgcccacaaaccaaaccaggaaaaagatgtgctaagttgagcatatgacactgttggtactcaaatggtttgtttttttttttaaataaatgtttaagtaaattttttattttagaacagttttagaaaaatggtgaaagcagtacagagagtttccatgtaccccatagcttgatgcattatgaactaaagtccatactttttttaggggggtggggacagggtcttgctcgtcacctaggctggagtgtggtggtgtgatcatagttcatggcagcctcaaccctccacctcccctggctcaagcgatcctccatctcagcctcccaagtagctggaaatacaggtgcctgctaccatccccagagaatttgtttttgtttgtttgtttgttgtttgtttgttgagacagggtct

SEQ ID NO: 1886604 - DNA, 4001 bp, Homo sapiens; identical to SEQ ID NO: 1886599

SEQ ID NO: 1886605 - DNA, 4001 bp, Homo sapiens; identical to SEQ ID NO: 1886600

SEQ ID NO: 1886606 - DNA, 4001 bp, Homo sapiens; identical to SEQ ID NO: 1886601

SEQ ID NO: 1886607 - DNA, 4001 bp, Homo sapiens; identical to SEQ ID NO: 1886602

SEQ ID NO: 1886608 - DNA, 4001 bp, Homo sapiens; identical to SEQ ID NO: 1886603
  modified_base (1)..(121): a, c, t, g, unknown or other

SEQ ID NO: 1886609 - DNA, 4001 bp, Homo sapiens; identical to SEQ ID NO: 1886599

SEQ ID NO: 1886610 - DNA, 4001 bp, Homo sapiens; identical to SEQ ID NO: 1886600

SEQ ID NO: 1886611 - DNA, 4001 bp, Homo sapiens; identical to SEQ ID NO: 1886601

SEQ ID NO: 1886612 - DNA, 4001 bp, Homo sapiens; identical to SEQ ID NO: 1886602

SEQ ID NO: 1886613 - DNA, 4001 bp, Homo sapiens; identical to SEQ ID NO: 1886603
  modified_base (1)..(121): a, c, t, g, unknown or other

SEQ ID NO: 1886614 - DNA, 4001 bp, Homo sapiens; identical to SEQ ID NO: 1886599

SEQ ID NO: 1886615 - DNA, 4001 bp, Homo sapiens; identical to SEQ ID NO: 1886600

SEQ ID NO: 1886616 - DNA, 4001 bp, Homo sapiens; identical to SEQ ID NO: 1886601

SEQ ID NO: 1886617 - DNA, 4001 bp, Homo sapiens; identical to SEQ ID NO: 1886602

SEQ ID NO: 1886618 - DNA, 4001 bp, Homo sapiens; identical to SEQ ID NO: 1886603
  modified_base (1)..(121): a, c, t, g, unknown or other

SEQ ID NO: 1886619 - DNA, 4001 bp, Homo sapiens
taatgtgtccagcagggaaccatcctgtttgctttgcttttctgagttcctacaaccaaccggccagggcgcactgtggggcacagggatgcaggccctggagtatggccacttctgcctgggggcgtctggggggtttcctgagtgaggtggggtctcaccagctccaggagacaccactgccatgcacaaggtaggtgtgggggtggaggatcacctccgtgaggacccagaccccacccactgtggctgtggtggagactgcaggtctgtctcaaggccccaggcctgacacctgcaagaacagaacctgggggtgacggagaggggattccaccaggccagcccggggcttgaaccccagccagggcagctgctgtctgctgccccaccaggtaacgcaccgacccagctgctgttcagctccccctctgggccagcaccatgctcatggcataggccggctgggccctctgagacccccactcccacacagactggtctgcatggaggctggtgcagcctgtgccgtacagaccctgcccggctgcactactggccagagccccctgcagacaggcggctcgaggggagctccaccatgcaggagatggcccagcactgcagtcacttaggctgctcatccctccccgaactgacatgtccctccctccagatgccccccaccgccgaaccccagcatgctgggcatgctctggccatcccacacagggatcagggtgggagggctggaggctgcctgtcaggggcaaggcctcctccaggaggtaggacggggtggtgcaggtggggtcccctcacctgatgggccctcgaggccaggctgtaggcaggcaggagggggctgaagcagtggggtcaggcccggggagcgggggccctgccttccttcctcaacacacggggctgcccaggccccgctcctggggccgggcccacacctcacagacactggtgttggatgcttcggcttgaaggagctccaaatggactagccgcagctgcccctgggtccacctggcccaggcaataccacagaatcaccaaggctcatctagccatgggcccaaacccaaggccctaagaggcaccccgggtgcctcagtcacagtcccaggcagctcaggtcccaggcggctcacagtcaccatccttgacttcatggtagcagaaatggagtgctttgagcttgtgatgagcacaggctcccaaccctgggagagttcagacatgcccactggagaggccccaggccctgatgatacccactcctcagacatgcaaacctggagccagggaggccccaatgaactgcatactctcccaacagaccaagctcaccccacaccagcgcaaggccctttcagacccagcctggccacccccatggacctggccagcacctcccccagccccaccctctccagacaggcaccaggctgtggtgacccgcctctcagcagctcctcctctgatgcctccccacggtccagtcgttaccccctcgtccacctgactgggctgcgcatggcctcagtgcagagccaggttttagtagtgggtaaaagggctcccttgctgtgctttaccagagaatgcaacacccccaaagctccttcatgacccactgtgacctgcagcaccaccaagcccatcctcatccctgtgtcccaggccaccagcctctgagggcaggcactgcaggagccaccgggccacagaggatggaggcagggaggacattctgccttcatgagggcatgctctcaaagacagagccgccccaaactgtcagcaggtgaccctccgctctgggaaggcaaggggaggagctcagggccgtggccagagcccacgagaagcccgtgcccagctcagcaggtgaccctccgctctgggaaggtaaggggaggagctcagggccgtggccagagcccacgagaagcccatgcccagcactgcagggctctggccactgcctaatgccctccatgaagccctgcctgcccttccagcaaaccagggcccctgaggctccagaaaccccagctccactgccctcagcctccatggccttagcagcctggctctggggctgagctcctggaagggcagggtgggggtaggctcctgagttttattttctcacatttcttccagacatgcttctgctgatcctcaaaatggcaaaagccaggatgctcaattctcaaagctcaacagctgatggcacatttgataacaaaaatcagtaatatttagaaacaaatttgattaaattcgtaagtgcctgaataaatcatacttgtagatttaatataaaatgtgtgaaagcttattcgcaggccaaatgacattactgcagagcattaaaaaccagcagggggagggctgtcggcccagctggtgctgcgtcacgcccacccatgtcatgtggggtcaccaggctgcccctgcccaccaggtgtcagtggggccctgggcatgggctctaggtttggggccttttagcacctctgaccactggactccaatgccacctcagagaattccgcctatgcctgcctggaccaccgaggctgccccctcccctagcgccgactctggggccccttcagcaggggggcggcccctctgttccacttaatcttccatgcctgggcacagcaggtgtgacagtaatgcagagactctaactcactttacatgtcatcaaacccaaatccaacgggtacccaaaccagactgatgggcctgccagcctccacccacaggaacacactggtgacttactgcagcagactcgggaggtagctcctcctcctagctgcctttgtccccaactccttggacatcccttagcccagggtgaagggtcaagggcacacttgacaccctcggacagggccagagggagtgggtctcggcaggaagtcaccaagagctggcttcccacacagggaagagggcagtgatggcagaccacatccccactatctatccatccattcacccacccacccactccgggtcaccaagctgcaccctgtcctttgctctgacatctaaagtctccaagtcatgctggttctctcctcccaaagatcggcttggatctgttcccttctcccttccttgctgccacgaagctgttcagacaaagtctgaagctcagcgcaccgtcaatccctccacaaataaccacagggcaacgactgcctgacaggcacagcagagaacaaaacccgccctcggccgggggcggtggctcacgcctgtaatcccagcactttgggacgcccaggagcgagcactttgggaggccaaggcgaacctaggagcggatcacgaggtcaggagttctcgaccagtctggccaacatagtgaaaccctgtctctaccagaaaaatacaaaaaaaattagccgggtgtggtagtgtgcgcctgtaatcccagctactcgggaggctgaggcaggagaatcgcttgaacccgggaggcggaggttgcagtgagccgagatcgcgccgctgcactccagcctgggcaacagtgcgagactctgtcaaaaaaaaaaaaaaatccgccccgtcagtgtggggagttgacgcggagcctcctgcctgcacccctacagcgtcaccccctcctctgtccctgccagaggcgccacctctggactctcccagggtcggaccctggtcgacagtgctccctgcccggaccctgcaccggccgatggatgaagcctcggcgctgcgccgttcacacgctccgtgccgctgccgcgaagctcgcgcgggcctgcgagccggtacccgggcctcccttccctgcttccagcgaacctcggcgcctgctgttcccccgccgggcgcgcccttccattcgggtctcagcggcagtgtcacctccccggagaggcccgccgttgcaccccatctcccactctcaagctcgtcgctcttcctgcccgcac

SEQ ID NO: 1886620 - DNA, 4001 bp, Homo sapiens
gggtagggagggagggagaagaagaaagagaaaacgcggggcaccatggatggctgactcctgtaatcccagcactttgggaggccgaggtgggtggatcacttgaggtcaagagaccagcctgacaaatatggtgaaaccccgtctctacaaaaaaatacaaaaattaaccaggcatggtggcgcacgcctgtagtcccagctatttggggaagctgaggcatgaggattgcttgaacccaggagccagaggttgtagtgagccgagatcgtgccactgaactccggcctgggtgacagagcaagactgtctcaaaaaaaaaaaaaaaaatcatttagatgaagtgattcatgcctgtaattccagtgatgggaggctgagactggaagatccttgagcctgggagttataggccagcctgagcaacatagtgagacccccatctctacaaaaaaaatattaaattttttttttcagacggagtttcactcttgtggcccaggctggagtgcaatggtgtgatttcagctcactgcaacctctgccttccaggttcaagtgagtctcctgcctcagcctcccaagtagctaagattacagacacatgccaccatgcccggctaattttgtataaaaatttaaaaatttttaaaattagacaagttagaaattgcttgagcaactggacacaatctctggtactacctttctttttcttttttatttttttattttattattattattttttgagaaggagtctcgctctgtcgcccaggctagagtgcagtggcgcaatctcggctcactgcaagctctgcctcccgggtttaagccattctcccgcctcagcctcccgagtagctgggattacaggcgcccgccaccaagcccggctaattttgtttttttgtatttttagtggagacggggtttcaccgtgttagccaggatggtctcaatctcctgacctcgtgatccgcccgcctcggcctcccaaagtgatgggattacaggcgtgagccaccgcgcctggccctctttttctttattggtcaaaatattatccaactaggcatatggatgtggaggcatgcctgtgatcccaattacttgggaggctgaggtgggagaatcgcttgagcccacgagtttcaggctgtggtgagccataatggtgcctctgcactccagcctgggcaacaggatgagaccatttcttaaggggacggaaaaaatcactctggctgtggcagatttccttaggatagattccgagaagtggagttattggggaaaaggctgttaatgattttaagtctttggatacagactgttaagttgctttccaggaagtttctgccaatgatagtgtgatactttctgtgtcctcacaccaccctttgtcaacactgagtgtttttgagggttaattatttctatgagagaagttaaaaaaaaaaaagacaacaaagaaattgcttcaggtggggcatggtggctcacgcctgtaatcccagcactttgggaggctgagatgagagaatcacttaagcctaggaggtggaggttgcagtgagcctagatcgtgccactacactccagcctgggcaacagagtgagactccatttcaataaaataaatcaaatgaatcaaacgtgagcaactctcataacttccaacatttttttcttcttcctgttggtggttctgcctctctggctccattaggatttccctactccatttcagtcatgggagccgagtttctgttcctgaaacacaccaggcctttctggcctctggatttttgtacttgctgttcccgccatctggaatgccttccctgcatttgttcccatcagggttgggactagcaaagtgacaggtgatggagttgctgagggtgcaaaatttaaggaggcacctactcccagggtcatgcaaaagccaactttgcatttgcacaatcctgtgagtgagtccctccttaaatttgaggctgtactgtaatcccagctactcaggaagctggggcaggagaattgcttgaacctgggaggcagaggttgcagtgggccgagatcctgccattgcactccagcctgggcaacagggcgagaatccgtctaaaaaaaaaaatgaggctctaggcaccacatttgccctactctggcccctgccctgattttcctggcctgtctcatctccagacaggtttgctttgacctccctgcccataaaagctggccagtgccctttccaggtactctgtcatataccctatttctttccttggtagtacccagcaccatctgcaagtattgggtttctttgcacatttagcatctgtccaacccttagtatatcagctttgcaagagcaaaggtcacatctatctcagcctacctcctccatactcagcacacagcacagcacctgaccataggaagcactcaagaaatgggaggaatgaaatggaaattatctaaaataaggatcaagattgatacagaagtattcatctcagttttacttattaatagcaaaacaaaaacaaaacacctggaaactatactaatgctcaacaataggaaactgattaggatgcagtacattcagagctgaaattttctgcagccattacaaattatatttgtgaagatttttttttttttttttgagatggagttttgctcttgttgcccaggctggagggcaatgtctcgatctcggctcactgcaacttccgcctcccgggttcaagcgattggtctgtcattttcagaccccacagaaacacaggtgctcctgccaggcccccggggactgcctccaggagtcatttgtaatgacagggtgcgttctgcgcacggtttcagagtctgtccaaagggccaatgctggggctggggcagaaacggtccaaggcctgtgagctgtgcagctttataggcaaatgaagatcgtttacccagaattgcctgctggagagagcatagaggaagtggcggcagcttcaccagttccaggaagcccaggcagcctggtcccccagggtgcacctggcacagcagttcgcacagggccagagagcggcagctgaccgctgcaactacagctggcctgacaccgggcacaggtaccagcccagcccagtcccgcccagcgcagcctgcggcccctagcggagccagcacctggcaaacctgacacccagccttggagcttgggcccccctctgcagctggctggggctcctgagacagcttctttgtcggaatccactcggtacacacacggtccctaacttagtggctgcccagtgaacatggggcttagtagaaccagtaccttcctccctggccccttcaagtctaaatatcccctgctctgagtacaagcttccaccttctccaccgacagacagcccccaccatctccaccgacagacagcccccaccatctccaccgacagacagcccccaccatctccaccgacagacagcccccaccatctccactgacagatagcccccaccatctccactgacagacagcccccaccttctccactgatagacagcccccaccttctccactgatagacagcccccaccttatccactgatagacagcctccaccatctcccgtgtcatcccctggggggacttgtaaaagcagtggtgggggagtgggatggaaacccagagcttctgatcaggcaggtcgggggagagggagacaacacatctgcacagaacaaggtcccagggaggccggcgctgctggtccagggagcaccccccagcacaggcgcgtgcttccctgatggacacgtcaccgccctgggctccagaaaatgaatgtctgacccagtgacccctgtcctcacccaaggccaacctcaccccagaatgggctggaatgctgagcctgcccatgccggctccagatccacccgcctccccaccattgctggccacagagagaggtca

SEQ ID NO: 1886621 - DNA, 4001 bp, Homo sapiens
gagggtagggagggagggaggagaagaaagagaaaaggcagggcaccatggatggctgactcctgtaatcccagcactttgggaggccgaggtgggtggatcacttgaggtcaagagaccagcctgacaaacatggtgaaaccccgtttctacaaaaaaatacaaaaattagccaggcatggtggcgcacacctgtagtcccagctatttggggaagctgaggcatgaggattgcttgaacccgggagccagaggttgcagtgagccgagatcgtgccactgaactccagcctgggtgacagagcaagactgtctcaaaaaaaaaaaaatcatttaggtgaagtgattcatgcctgtaattacagtgatgggaggctgagactggaagatccttgagcctgggagttataggccagcctgagcaacatagtgagacccccatctctacaaaaaaaaattaaatttttttttttcagacggagtttcactcttgtggcccaggctggagtgcaatggtgtgatctcagctcactgcaacctctgccttccaggttcaagtgagtctcctgcctcagcctcccaagtagctgagattacaggcacatgccaccatgcctggctaattttgtataaaaatttaaaaaattttaaaattagacaagttagaaattgcttgagcaactggacacaatctctggtactacctttctttttcttttttatttttttattttattattattatttcttgagaaggagtctcgctctgtcgcccaggctagagtgcagtggcgcaatcttggctcactgcaagctctgcctcccgggttcaagccattctcccgcctcagcctcccgagtagctgggattacaggcgcccgccaccaagcccggctaattttgttttttgtatttttagtggagacagggtttcaccgtgttagccaggatggtctcaatctcctgacctcgtgatccacccgcctcggcctcccaaagtgatgggattacaggcgtgagccaccgcgcctggccctctttttctttattggtcaaaatattatccaactaggcatatggatgtggaggcatgcctgtgatcccaattacttgggaggctgaggtgggagaatcgcttgagcccacgagtttcaggctgtggtgagccataatggtgccgctgcactccagcctgggcaacaggatgagaccatttcttaaggggacggaaaaaatcactctggctgtggcagatttccttaggatagattccgagaagtggagttattggggaaaaggctgttaatgattttaagtctttggatacagactgttaagttgctttccaggaagtttctgccaatgatagtctgatactttctgtgtcctcacaccaccctttgtcaacactgagtgttttttgagggttaattatttctatgggagaagttaaaaaaaaaaaaaagacaacaaagaaattgcttcaggtggggcatgctggctcacgcctgtaatcccagcactttgggaggctgagatgagagaatcacttaagcctaggaggtggaggttgcagtgagcctagatcgtgccactacactccagcctgggcaacagagtgagactccatttcaataaaattaatcaaatgaatcaaacgtgagcaactctcataacttccaacatttttttcttcttcctgttggtggttctgcctctctggctccattaggatttccctactccatttcagtcatgggaaccgagtttctgttcctgaaacacaccaagcctttctggcctctggatttttgtacttgctgttcccgccatctggaatgccttccctgcatttgttcccatcagggttgggactagcaaagtgacaggggatggagttgctgagggtgcaaaatttaaggaggcacctactcccagggtcatgcaaaagccaactttgcatttgcacaatcctgtgagtgagtccctccttaaatttgaggctgtactgtaatcccagctactcaggaagctggggcaggagaattgcttgaacctgggaggcagaggttgcagtgggccgagatcctgcctttgcactccagcctgggcaacagggcgagaatccgtctaaaaaaatgaggctctagacaccacatttgccctactctggcccctgccctgattttcctggcctgtctcatctccagacaggtttgctttgacctccctgcccataaaagttggccagtgccctttccaggtactctgtcatataccctatttctttccttggtagtacccagcaccatctgcaagtattgggtttctttgcacatttagcatctgtccaacccttaggatatcagctttgcaagagcaaaggtcacgtctatctcagcctacctcctccatactcagcacacagcacagcacctgaccataggaagcacgcaagaaatgggaggaatgaaatggaaattatctaaaataaggatcaagattgatacagaagtattcatctcagctttacttattaatagcaaaacaaaaacaaaacacctggatattatactaattctcaacaataggaaactgattaggatgcagtacattcagagctgaaattttctgcagccattacaaattacatttgtgaagatttttttttttttttttttttttttttttgagacggagttctgctcttgttgcccaggctggagggcaatgtctcgatctcggctcactgcaccctccgcctcctgggttcaagcaattggtctgtcattttcagacccaacagaaacagaggtgctcctgccaggcccccggggactgcctccaggagtcatttgtaatgacagggtgcgttctgcgcacagtttcagagtctgtccaaagggccaatgctggggctgggcagaaacgatccaaggcctgtgagctgtgcagctttataggcaaatgaagatcgtttacccagaattgcctgctggagacagcatagaggaagtggcggcaacttcaccagttccaggaagcccaggcagcctggtcccccagggtgcacctggcacagcagttcgcatggggccagagagcggcagctgaccgctgcaactacagctggcctgacaccgggcacaggtaccagcccagcccagtcccgcccagcgcagcctgcggcccctagccgaaccagcacctggcaaacctgacacccagccttggagcttgggcccccctctgcagctggctggggctcctgagacagcttctttgtcggaatccactcagtacacacacggtcccaaacttagtggctgcccagtgaacatggggcttagtagaaccagtaccttcctccctggccccttcaagtctaaatatcccctgctctgagtacaagcctccaccttctccactgatagacagcccccaccatctccaccgacagacagcccccaccttctccaccgacagacagcccccgccatcttcaccgacagacagcccccaccatctccaccggcagacagcccccaccatctccactgacagacagcccccaccttctccaccgacagacagcccccaccatcttcaccgacagacagcccccaccatctccaccaatagacagcgcccaccttctccactgatagacagcccccaccatctcccgtgtcatcccctggggggacttgtaaaagcagtggtcggggagcgggatggaaacccagagcttctgatcaggcaggtcgggggagagggagacaacacatctgcacagaacaaggtcccagggaggccggcgctgctggtccagggagcaccccccagcacaggcgcgtgcttccctgatggacacgtcaccacccctgggctccagaaaatgaatgtctgacccagtgacccctgtcctcacccaaggccaacctcaccccagaatgggctggaatgctgagcctgcccatgccagctccagatccaccca

SEQ ID NO: 1886622 - DNA, 4001 bp, Homo sapiens; identical to SEQ ID NO: 1886620

SEQ ID NO: 1886623 - DNA, 4001 bp, Homo sapiens; identical to SEQ ID NO: 1886621

SEQ ID NO: 1886624 - DNA, 4001 bp, Homo sapiens
atgtgagattagaaatgaaaaaaaaaaaaaaaaaaaaacctcaccctaataaaaggtagcaaaatgtcagatacactgcaagagaaaagcaaaaccacctatgttttaaaggggctcagagaaggaggaagtacagctgagtggagaaattgggtacagctttgggaaaaccatgacattttgcggcctagaaggaaaggtgggtgtgacaggcagagacatgggacatgtgggtggggttattccaggtaaaggaaactgtgcaccccaagacagggagacagcagggtacagggcacaggctagcgcagttctgttctgcctggatggccggcgccagcccatgtgctctgctgacgggccatgctgacctgggtagctggtgacagcaacggaggggagctgaggcgggcaaagatggccccagcagtcaggtggacagtggattagactgcggggagaagaggaaaaaagggccacttaaggaagctgttactctggcagagggccacatagataggggccttaacttggtaaagtgggcattttatttattcttaataccttctattgatgtcatataatcttttgcatgtacaaggcattacataatgaagagccctacttgattaattcatttagtcaacaaacacaaattaaacattcgctctttaaaaaacctttttgaagagaatgacacccagggaggggagaggagaggcattctgggaaagggttgtcagagaggaagagggacaggaggagggaagtgacagcagcagactagcaatgatcactggagtgggagggcacatgacggggaacatggacacacagagaacaagctccacagcagggcgctgtggggacagcggtgccgtgtgagcttttccttatgggaaaccctaggcagaggacaaagacctctggttcgtggacacactgggtcctcgtgcctctcaggctgcagctgcgaagtttacgtgagctgcctttagccaggagacactgaacttgatcgtccagtatccagaagtaccctccaggactgggcgatggtggggccagagtgcctgcaacaggatccgtgtttctgtgaacgggactctgatgttccagattgtgacctgggcatgttaccaagaacagacattcccaggaaaaggctttctcactgatgccctttgtgattacagctgggaggctgaagtaggggttttccacaacatgacctttgaagaaaggttaacgactgcttcaggagggcctgagccttgcatgtctgccctaagcagtctgggtgcttgggctgtccctgacctcacctccaagagcacagtgtggagtcagccactgatgggaaacatcagccaggcagacaggcatgtgccctgaggcagcagctcaggcagcaggtaggctgtgaggaaagagggctgacccagggagttgggaggcctgacttctgtctctgattcacccaggggccctgcagagatctcagctgggaggaagcagggcagtaattatgggtgtgggctctggaaacattaagatccgagtttgaatcctggtgccccttacccccctacacacccaatctgaattataaacctcccattagtctctcctaaaaggcctgcattttcctttcccaacacttttcacaatttttataagtctaccctccagacttggtactgtgtctcaattgctatgttttttgttctccatgggccatgttttgacagagaaagtacaccatatcagtttcccaatcttattgattctataggggccagctcaaatgccacctcttccagaaaacttcccttgggcttcttgtacccaagaattgctctctttctattcaagtgccctagccctctgtctggcctaagcattctctgcctttgcttagggtggctggtgctcgtatctacaaaaatgcttaccttcatagatacaaccatcagctccttctgggacaggaacacatccacatcagcttctttcatacccccaaatacttagggcaatgcctgttctgtttgtgggttaatgaatgagtcagtggacaagattttctgactgcctgagggcacaccaccctttaactggccagtgttgtgaactcttctacaaaagacctgagcgttaccccagccaagctgaatcaaatggaacgtcagggccgtgattccaagccaaatccatacaaactgaatttagcagttgcacagagccgaagcagggctcaccagatttctaagaatggataaattgccctgatcatcagctcagccgcaacagcctagcagaggccacatctccctggaacaacaagggtagatgaagcatctttaacagagtttttttttttatctataaaataaataaatgttgtctagtgctttctcctggctcagctatcctaagactctagtgtaggctgattctaaaggcatgattttgcccagtggaaaatgttttagtgaaactttctttgaaaattagtgccagagaaaatgcactggatagacccgaggggccatcagtagcccacatcctgactattcccaatctggtttattttcagagctccccaggcatgactggagaaggtgctattcagtgggaaacaggcctttgccttctgcctgtaggaagagcagaagcggtggtggactctgagcaccgggagctctgtccatgctcctgacagcacgtgcatttgcccagcttggctatactggccagcccacactctgcacatccaccttagcttgggcctgccacagggaaccctgggtgtggtggaaaaaatagctgggaccctagagactagaggaaagccagggagtccaagggagggcaagtcccagggggtcaaatgaccttagagaatcgcagcggaagcccctagacctgagggtggccttccccagcaagtggtcccagaacaagcaatgagggatccagtttcttattcttgtcaagcagagtcagatacgtgactgctaatcgaagcttctcatcagctggaggtaaccagggttactaccctggtgggacgtaatttcagccaagagcaaagatgctctatggtctccaggcctgaatgcaaatataatgttaggttttttttttttttatgctaagtgttatccatagaccagcattactactttcatgaaccccaggatggggccctcttttatccagcctaagacttggtttaaaagaggaagaaactgaggcccaggaattctgtgccttaactgaagtctcagagcgaattagtaggtggtcatcctgacagtttctcaacctctttcccatttacgtgcctacactcaagtagattacagctccccatgggcaggaaccctttgctttgcctgtagtatagcatggcgagtggccaagagtggggtctgggatcacactgtgattctgcctccgctgtaccagctgtgtgaccacagacagaacacaaactctaaactctgtgcctcattttccttatgcactagaaggagatattaatagtgccctgggcaactctgcctcagtttcctcagctgcaaaatggtgacatttgtataacagggcctacctcactgggtgaccgcaaatgagttaatgcacgtaaaatgcttaagaactgtgcctggagctcaataaatgttttcaacagcttcactgagataaaattcacacatcatataatttgcctatttagagtatacaatttagtttgttttggtacagtcacagatatgtacaaccatcactatagtcaattctggaacatatatctgctaaaaaaaaaataaccctgtagcctctagctgtcaccccctaccctcctgggctccctccaattccttggcaaccagtaatctactttttttctccatccatttccctgatggccaataacgtcaagcatcttttcatgtgctattggtcatttgtatattgtctttggaggcgtg

SEQ ID NO: 1886625 - DNA, 4001 bp, Homo sapiens
aatcagtcgagctcctggtgaaatggaaccaggagactctcaggaggattatatgttatgtccaatgcagtagagaagataaagaccatgcccagaagaggggttctccggggttaggttatcctagaaacaggctttcaaacaaagatttgggtgcaaacaatttgttaagatgggttccaggaggcaactatgggagactggagaaatgagacaaggtagtaaaatccataaagggtggcatagtttacaggttattgcttttgtaccgtagggctccctagataaactattatctcattcagaagatggggcctgggttatttattcaccagctctcatctgtccttggctaagggcttctcctttgcacttcccacttgccaagaacatgggctgatcaactactgacagtcagaagtctgttttgacaaagctaccagtggccgggttcagtggctcactcctggctaaggcgggtggatcacctgaggtcaggagttcgagaccagcctggctaacatggtgaaaccccatttcccctaaaaatacaaaactggagaggaaaaatacaagaaatagccaggcatggtagtgggcgtctgtaatcccagctactcaggaggctgaggcaggagaatcacttgaacccacgaggtggaggttgcagtgagtcaagattgtgccattgcactccagcctgggcaacagagcaagactaagaaaaaaaaaaaaaaaacacaagaaagaaaaagaaaagccatcagcagtgcttgcatctggaagccattgagtgagcattgagtgatggtctctgaggacatgtggtgaacaccagcagcatatactccaaagagaaatataagcaagaatcagaaaatgaaaattgaattgtgatcaattcccctaatcaagcagaagtaaaaagggagtgctgtaagttcttgagaagtatcttgtaaagattaatctaaagacagtttcaatggattgcagaggaaagcatagaataaggtagaccactgagaaataaagacaaaaatgtaaaggtctttattgcctacagaaagtaaccactccctgtcctacaccctgaaaaaaatcaggagtgttaaaaaatctaaaggtaaagtaacagacaaaaaaagttcctgaaaggatttactagagagggaacacattctgtttaatacagaatgacactgacactttgtatttgaaaaaagaaaacctgtaatcccagtactttgggaggccgaggcaggtggattacctgaggtcaggagttcaagaacagcctggccaacatggtgaaaacttgtctctactgaaaatacaaacaattagccgggcatggtggtggacacttgtaatcccagctgctcgggaggctgaggcagaagaatcacctgaacctgggaggtggaggttgcaatgagctgagaccacgccattgcattccagcctaggcaacaagattgaaactccatctcaaaaaataaataaataaatatataagaaaaataaaataaaaaaacacttctatatatcaaaataacaaaaatattaattaaaaacaattaggaaacctatgattttcatataaattatgaggttgatagcttcttcttcttttttttttttttttttagttcatgtcttttattaactcatacagttacttgtcttctggtttgttgaagcagtaagtcagacaacatttgccacaataatgtctgtcaaagtggcttgccataaacaccccagcaccacattcatcagaagggcactctcgacgaaggcgactaattttgccattctcatccaccttatagtatttcaggacagccagcttaaccttctttctcttgtgcttattcttcttgggagtggtgtaagacttcttcttccttttcttagcaccaccagaagtctcaacacaagatgaagagtagactccttttgaatattgtagtcagacaaagtacgtccatcttccagctgcttgccagcaaagatcagtctctgctgatcaggaggaattccttccttaccctggatcttggcctttacattttctatcgtatccgagggttcaacctcgagggtgatggtcttccccgtaagggttttcacgaaaatctgcattttggtggcggctccactgcagatagcttctcaatctatagaactctttattatatgaaaagcttggtcaaactgcctaaattagataaataagtttcttttggaatcaatttagattcttttaattggtataaaaatagtgcccagcacaaagtattacatgggcattaaataaggtaatagatgttaagatcttaacacacgctgagaatggagttaatagtagctcatatgacctactactattacttgtaccatcagcatcaggcatcaccactgttctactactgccattaatgtcataatttctacaaagactgtaatcacacaaaagggtgaagctgagtaaacctcattaccttactccctctcattgtctcttgtcttgtatgcatctaggcacaaaagttcccagattacgttaaagactccctgaaaatttttgaaagatgaattctgtaaacaagatactatactcaattattgaacaccttaaaacaaaatggtgtcatattatagtacatggtgggaagagaatgtttctatacttttggtgagtagtaaatagcaacatttttctttgcaattggctctatgtatcagttccaaaatgttctaaaaaattatgaacatacatttctaagattattaatcacagcaataattgtgacagataaagtttggaaacaatataaatacccatcaagaaagatttgattaaaattatctgttcatataacataatactaagcaaacattgaaatgatattttggatatttaaagagataggtttaaagagatatttaaagagatagaaaaaaatcttcacagtgtatttttggtaaaaaatttgatgaataaaaaatatccagtctctgtataaaaagtctatataataataaatgatcatgatcatatttaaaatgtattcaacatctgatttttttggtgctctctgctaaatgtattatgtgagtttgctaatttaattatcataaaaatcctatgaaaaaaaatactcttaccctctttggtatacagctttcactaccgtagccaaaagaacgaaggttgcatagtcaggttaaataccaaaaaaaaaaaaaaaaaaaaaaaactggagagggaaaactcatgtttacaatgattatcgaaggtggtggtggtggtggtggtggtggtggtggtgtgtatgcgtcaatgtgacagagtttatgtatgatatattgggagattggtatttttcacattatcattgaaattttctccaaagaatatattttacttcgctatattaagttagattttttgatgaatgataatggttatgttacaattatagatttgggtttccttttaataactgaaatttaacaaagtagcatatggagtgtacttagtacctagcacagatcataaaaatctgtggtcctggtaagcatctggactagtagataagttatgctgtttcttcaaattgtggaaatatatagaggagggagagcatttatgttataggagacttagctagcacacctacagctttaagatataaacagaaatttataagctgactattttaatatcatgaagagtcctatatttttgctaatggtaatattagtagaccttgttttttttaagagttcaagtctaaattttattccacataccaaccacaactagtgttagaatttgggttattcataagtagtgatggccctgggtaggcttctactatcatagaaagcaggtatctgccaaggtactcactggcaacatccatacctctactcattaatttactttatacatatttattgagttccaatcatattcaaaacatgttgat

SEQ ID NO: 1886626 - DNA, 4001 bp, Homo sapiens
agggggcggcagggaagagttccaggaggtgtctggaaaaggatttgatggatgtgcaagaattgggctgatgcttaggaaggggcgatgaggtgggtccagaagaaggggggtgaacggtgtgagcaaagaccgtgaggctggaggctggccacgggaggtgtgaggggtaggggcagggtgggaggtgggctcgcgggtgggctggggtcatgaagggcctcaggcgctctgctattgggttccaaggctatcctgagaacaggggtgaggggggattgccgtggggggttaaagccttgtcatgttcgctttcgggagataaaaacaacaggtggcctttatggagacgctgcccagagccaggtctgtgccaggctcctgttgggggtcgtcatgcggaatcctgactctgaccatccgaggcatagggaccgtggagatttgcatttcacagatgaggaaacaggtttggagaggtgacacgacctgtcccaggcatcacagccgggatgtgcatagcaggggtttggaactatgaggtgcccaggacccagggttggattgaaaagggcggaggggactaagataagcagacagttgtccccagcgctggggagagtcttgggaccagtctgatgccttgtatttcccaggctccaggctcctcgccgggacagtgtctccttgggtgcgtgctggatccctgggggacgtggcacatccccaggcttgctaaacattgggtgggttctggcatttggttttgtaacgtttctgggtcactcccgcctgtggccacccttccttaggggagccgtgtgtccttggggctttgctgggtggtctcgagggtgggagaagaatgggttctcctggaccaatggagcccgtgcccctcggggccacattgctcctgcgctccctgactgcggacgcgtgtgtctcgcggctgtctctgtggagatggcctcctcctgcctggcaacagcacccacagaattgcatcagacctaccccacccgttgtttgtgatgctgtagctgagggctcctctgtctgccaggccggtcactggggactctgtccagggcctggtggttcctgcttcccagcacctgatggtgtccatgagagcagcccctcaggagctgtccgggagagaagggcgctggtggctgctgagcggagagcaaggcccgtgttctccaggcccttggcacagcagtggagcccccgcccctgccttgtgttgtcctcttaggctctggtcctggggtttggaggagggggaccctgggagttggtggcctgtcccagcctgagctggcaagattccgaatgccaggccccccaagtgtgcaacagggcacagggtgacctcatgtgggcaggtgggtgctgttctgtacacacctggggccgccgctgggagagttctggaaggtggggtgaggggacccatggcaaactagggccttaggaaggatgtgaaggccctggctggccccccaggccaccctctgtgctgtggggcagcccagccattttgctgtctaccctgcaaactcctcctcggggagacggctgggttttccccagggaagaggggtcaagctgggagaggtgaaggacacagatcacagctgctggcaggtgttcaagggtccaagagcgttgctgtctgggtgtcaccagtagccttcctggggggctcacgcaggtgcctctccacttgtggctccctggctgctgaagctcagcagggacagctgtgtccagttccaggtggaggacagccggggcttctgaggccacagcctgccttgggttaatgatgctgccgagaggtggtggcttttggaaaagatggcgtactgcaaaacgtgctgctctgcgtggctcgaagcttcgtggggagacgtgggcagagccgtggctgactcacagaccccccaccccagagcctgccctgccctccctgccccgacccttctccctcctgacccatgtgttttttttttttttttttttttttgagacagagttcactcttgttgccaaggctggagtgcaatggcacgatctcggctcatggcaacctccgcctcctgggttcaagcgctttttcctgcctcagcctcccgagtagctgggattacaggcgtgcaccaccatgcctggctaattttgtatttttagtagagacagggtttctccatattggtcaggctggtcttgaactcctgacctcagatgatccgcccgcctcggcctcccaaagtgctgggattacaggcatgagccaccacgcccagccctgacccatgttttgaaccaaattccagccacccttttatctgcaagcattttggagggcatcgcaatactgcagacccacctaacacaacagacagttccttcatgccaccgaaggcctggtgtgttcacatttttggtttaatagtttgaattaagagccaaataaggtccacacactgcaattagttgatgtctttttttttttctttttttttttttttttgagacggagtcttgctcttgtctccaggccgcagtgcagtggcatgatctcagctcaccgcaacctccgactccctggttcaagcgattctcctgcctcagcctcccgagtacctggtagctgggtttacaggcatgcaccaccgtgcccagctaatttttgtatttttagtagagacggggttttactgtgttggccaggatggtctcgatctcctgacctcgtgatctgcccacctcggcctcccaaagtgctgggattacaggcgtgagccaccgcacccggccaatgtcttttaaaaatatatactttttttttttttttgagacggagtttcgctcttgttgcccaggctggagtgcagtggcgcgatctcacctcacggcaacctccgcctcccgggttcaagtgattctcctgcctcagcctctccagtagctgggattacaggcatgtgccaccatgcctggctaattttgtatttttaggagagacggggtttctccacgttggtcaggctggtctcaaactcctgacctcaggtgatccgcctgccttggcctcccaaagtgttgggattacaggtgtgagccaacgcgcccagacaaaaatatatgtgtgtctttaaggctggtcaagcaaagcagtaggactggagaaagaatgaagaattctacctggctgtgatcaattcgttgtgaacaccactgtgcttggaccagctagctgatgtcttttgttttgttttgtttgagacggagtctggctctgtcacccaggctggaggacaatggtgtgatctcggctcactgcagcctccatctcccgggttcaagcgattctcctgcctcagcctcctgagtagctgggattagaggcgcgcgccaccacgcccggctaatttttaaaaatatttttagtagagatggggtttcaccatgttggtcaggctggtcttgaactcttggccttaggtgatctgcttgcctcggcctcccaaagtgctgggattacaggtgtgagtgatgtattttatttatttatttatttatttatttttattatttgagatggagtctcactctgttgcccaggctggagtgcagcagtgccatctcagctcactgcaagctccgcctcctgggttcacgccattctcctgcctcagcctcctgagtagcctggactggtgcccgccaccatgcccagctaattttttgtatttttagtagagacggggtttcaccgtgttagccaggatggtctggatctcctgacctcgtgatcctcccgcctcagcctcccaaagtgctgggattacaggcttgagccaccgcctgtcttttaaatgtccgatgatgtctaggagcttcccttcctctctttttccttgtgcaatttgttgaagaaactggctcctgcagcctggatttctcgctgtgtcttgggggtgcca

SEQ ID NO: 1886627 - DNA, 4001 bp, Homo sapiens
taacttattttctagatttcacgggtccgcagagagagagagagaggaattttgtcccagaatggaccataccaagtctcatccaaaactgatttaatgatttagaaaataagattgggacttcttgagttgattatatttaaatgagattttgggcttaagagttgatgctgggatgggttaagacttgtagggatattggaatgggatgtatatattttgcagatgggaaggccatgaatttggtgggggctagagaacagtgtgttaagggttgaactgtattcccctgaaaaggcactttgtggtcctaacccctagtaaatgtgaatgtaaccttatttaaagtagggactttgcagatataatcaagttgagatgaggttgtgcttggttagagtggggctagcccaacatgacctatgtctttccaagaagagagacgaacacagacagagacacatggagaacaccgtgtgatcacagagggagagactggagtgacacagctgcaagccaaggaactctggccaccagcagaagctagaaagaggtaaggaaggtttccactcagattctcagacggaaccaggccctgccaacaccttcaattcagacttctaggctccagaagtgtacaggaataggtttctattgttttaagccacccaatttgtgtatttcgttaacagtagacttaagaaatgaatgcagcaggccaggcgcggtggctcacacctgtaatcccaacactttgggaggccaaggtgggtggctcacttgaggtcaggagtttgagaccagcctggccaacatggtgaaaccctgtctctactaaaaatgcaaaaattagcccagcacgtgcacctgtaatcccagctacacgggaggctgaggaaagagaatcacttgaaactcggaaggcagaggctgcagtgagccaagatcatgccagacttcagcctgggcgacagggcgagactctatctcaaaaaaaaaaaaaaaaaaaaaatgactgcaccaagttgcttattccacctctctagaactcaatcttcttattgccaaatgaggataacaacagtgctttgtggcccacatcagattgttgtgaaattaaataagatcctgaatgtgaggaaattatcctcagcacggggactagcacttagccgtgtggccttcattgttattttgatgggttttattgattaccgtctaagggtcctttctgttttaatcagaaggagtcaggagaccgagggagcacccagactagggcagagggtaccagtagaagcggggagggaagttgaacgatgggttttcccactacctaggatggctgggaacccaagaacatggagggcagtgtctcctgcaagtcaagattaggggaatccatcctccattaactgacaagagagacaagaggcagcagaggacagggtgaggggcgtggagagccatctctcccactcactcgagacagtgagacttccagtgtctggtgtttctcctttccctgcacccggagctggagctgttgggacgtctctgtggcctctggagaacttgttagtaccacacagtctgtgggaggcagaatcaggaagccagggctaagtgggggcttggaagcagggcccgtgctgaacctctccccatatccccttcccctggcaaatgcctcaaggccccacctccctgccttcctctcaccaatgatgtcagccactccgagctttagggtcctgggagtggcagtaggtgatagctctgtctctccaaaaagcaaaaggatcctgcttggggacaccccaaggtgggtggccatgtggtccaccacactctgcaggggctccgactagggatggggacaacaagcaaaagaggtcttcctgccttgaaatccatgcccccagccacaccacccaaacacaagctctggccttagctacttgctaagctcctcagctgtgagtttcatcatatttacctggcaaggtatagaataaaatcgtgtcagcaaggggtacaggcgagtaacacaaagaaatatagcagccatgggttagaacaaagaaaggggtggtggggattgcagcaaactggaattcacatgccacctagacaggctggctgttacgcagctccagctgattggcactgtgtgggaacgtgggccagtatgacatcttcctatatttttcttttttttttttttgagacggagtttcgctcttgttaaccaggatggagtgtagtggcgcaatctcagctcactgcaacctccgcctcccaggttcaagtgattctcctaccaggctggtcttgaactcttgaattcgggtgatccacctgcctcggcctcccaaactacagggataacaggtgtgagccaccgcacctggccacatcttcttattttttaagagaagccagaaatctggaccttttttttttctttctatttttagtagaggcgggcttcaccatattggccaggctggtcttgaactcctgatctcaggtgagatctgaggcagagtctcgctctttcatccaggctggaaggcagtggcaccatgcccagctaatttttgtatttttagtagagatggggtttcaccatgttggctaggctggtctcgaactcctgacctcaggtgatctgcctgccttcacctcccaaaagtgctgggattacaggcgtgaggcactgcacccggccagaaatctggacctttgtatgaaatcacccatcacaaaggtgacaacaaactcgtatatttttaaagcacttggtcaggcatgatggctcacacctataatcccagcattttgagaggccgaggcgggaggtttgcttgaggtcaggagttcaagatcagcctgagcaacaaagcaagatcccatctccatttttttttttttttaagagacaaggtcttgctctctcacccaggctgcagtgcagtggcatgatcacagctgactgcagcccccaactcctggactcagaagatcctcttgcatcagcctcccaagtcgctgggactacaggtatgtgccaccatgcctggttaatttttttatttttagtagagacaaggtctcactattttgcccaggctggtctcgaactcctggcctcaagtgatcctctcaccttggcctcccaaagtgctgggattacaggaatgagccaccatgcctggcccccatctctatgtttaaaaaataaaataggccaggcacggtggctcatgcctgtaatcccaacactttgggaagctgagacaggggaacacttgagatcaggagttcaagaccagcctggccaatatggtgaagccctgcctccactaaaaatacataaattagtcgggcatggtggcgggcacctgtagtccaagctactcgggaggctgaggtgggagaatcgcctgaacctgggaggcggaggtttcagtgagcagagatcgtgccactgcactccagcctaggcgacagagtgagaccccgtctcaaaaaataaaaataataaaaaataataaaataaaataaaataagtctacaaagaaagcagacacactgttggaaaagccatgggctgccagtttgcagcctctgccttagttgcttgactgatgcactgtgcatcagtaatggtaatgtctgttatcattcctggtgttgaaacagggtcatccctacaaaaatatcaggcttcgccaggaagctggtggagttcagggtgactgagtgacatctgctgtgtccagggcagtgagagcaagcccaggagggaagcccaggttcctagggaggaaggcaagagagactaccaaaaaaagcttcttagaagacaggatgcttcacacctggaatcccagcactttgggaggtcaatgagggacgatcacttgagcccaggagttcggaaccagcctggacacagtaagaccactttttgaaggaaaaaaaaagacacagga

SEQ ID NO: 1886628 - DNA, 4001 bp, Homo sapiens
gttccatgagggatttgctttttattttatttgctttttattttttagagatagagtcttgctctgtcacccaggctggggtgcagtggtgcttactgcagcctcaaactcctggctcaagccatcctctgcctcaatctcccaagtagctgggaatacaggcatgagccaccgtgcccagctaatttttaaatttttttttagtgacagggtcttgctatgtttcccatagctggtcttgaactcttggccttaacgaatcttccccctttggttggcctcctgaagtgctgggattataggcatgagcccctgagttcagcctcaaatttctcagaaaaggaaactaaggcccaagagagggaagtggtgtctgcaaatgacatatctggtgagtggagtggggggtcttaaaacagagtggatgggaggctggagggtgggaggccttactgaccttgcaggagagaaggacactctcaagtttgcctcacacttcttgtcctccccacagttcttctcaaaagggatctgaaacaccaagaagaaaggagtaacaggctcagatcaggagggacttgttcccaggcctctctgcctgccccttctcccctcttacctcccaggtttccgagtgcagggagggtctcaggatgggcggtatgtccttgccctgctgagcgaggggtagtgggcaggatggagagaggagagattaactgaggcagcagacctcatgaaggagagctggaggggcaggggcttagctcaactgggctggctgtggttggccctgcccaggagccagctgcctttccagggctgccccactctgctgcctcagcctactgccatttgtgcagtcttactctgctggcagctcttttttttttttttttttaagactgtcttactctgttgcccaggctggagtgcagtggcacaatctctgctcactgcaacctctgcctcctgggttcaagcgattcttatgcctcagcctcctgagtagctgggattacaggcatctaccaccacgcctggctaattttttaaaaatatttttagtagagatgggttttcgccatgttggcacactggtctcgaactcctggtctcaagcaatccacccccctcagccttccaaagtgctgggattacaggtgtgagccacaacacccggccggctcttttttttttttttcttctttagagacagggtttcgtgctgttgcctaggctggagggcagtggtgcaatcatagctcaatagctcactgcagcctcaaccctctggctcaagtgatcctccctgctcagcctcccaagtagctgggactacaggggcgcaccatcacaataactaattttttatgttttgtagaaagggagtcccactatgttgcccaggctggtctcaaactcctggcctcaagtgcaccatcacacccgactaatctttgtatttttagtagagatggggtttcaccatgttggccaggctggtcctgaacccctgaccttaagtgatccacccacttcagcctcccaaagtgctgggattataggagtgtgctgcccggccatgggcggctcttcttgccaaatggatttctctgataaactccccaccatccctagccatctcttcttaccgccctttggtccctcggtgtcccttcctcctcccaaagagagaaattcagggaaacattgatgggggagatgaggtcttgaacacatacctgagggtgataagaatacagcctatgtcatgaatctaacttttaccgcacttccgattagatgtataccttgtcagcattttacaagtgatgaaattctggtagttctttgtctaagaccctaccagtattgaaaatccattgactacatagcaggtgtgtacagcacacccagggggcttctcagcacagttatcatccctgagccccggttccccagcagacatcactaatcaatcccagcacttttcccccactgtgtcctaactgaagcccctgaattttgacctaggcagccattatcaaagtttgcttaagaaaatttcagaataactagaatatcctagttctagaattttgttccttgagaatagggctgggtcttagtcatttgctattaccaatgcctgacactggcattttgtaggtactcaaattgtttttcacctgaaggttctactagccctaagaggtaggtattattaccccaacatttaaaataaggaaaatgagctctcccttccttccttttctttcttctcttttccttccttctctccttctttcttttctttttttctttcttcttttccctccctccctccttgcctgcctccctccctccctcccttccttccttcctccgttgtccttccttccttccctcctttctttctctttctctttcatcctccctccttctgtccccctctagaaaagaaaaaaaaaaaaagaaaatgaaaactaaaaaggtggcacagttgtcctaagagcttggagtgacagtcaagatttgaacccaaatctgtccaaatccaaagtccaggatctttccaccatgtcacactgctttcttttctggcaaatttatgtttaaaatgtctaaatcttataagaggtggaatgggagtaggcagaggggcactgagtagaggtttgaatgaaatagagggtgagtcgataattgttgaaactgggtgatgaggacctggggattcattaaactattttttttctagttttgtgtgattcatattctcataataaaaagtttaaaacaggctgggtgcagtggcttacacctgtaatcccagcactttgggatgccgaggtgggtggatcacctgaggtcaggagtttgagaccagcctggccaacatggtgaaaacccatctctatcacaaatacaaaaattagccaggcatggtggtgttcacctgtaatcccagctacttggtaggatgtggtgggagaattacttgaacccaggagggcagaggctgcagtgggcccagatcataacaatgcattctagcctgggcaacacagtgagactccatctcaaaaaaaaaaaaaagtttaaaacaaacttcaaattcttatgtcccaatcctatactgtcttatatgaatttttttttttttttgagatggagtttcactatcattgcccaggctggaatgcaatggcacaatctcagctcactgcaacctccgcctcctgggttcaaatgattctcctgcctcagcctcctgagtagctgggattacaggcgcctgccaccacacctggctaattttttgcatttttagtagagatgggttttcaccatgttgaccaggctggtcctgaactcctgacctcaagtgatccgcccacctcagtctcccaaagtgctgggattactggcatgagccaccatgcctggccttttatgaaatatttaagagaacataacaatttgatatcaatccttttttttttttttttttttttttgagatggagtcttgctctgtcgcccaggctggagtgcaggggcgcgatctcggctcactgcaagctccgcctcccgggttcatgccattctcctgcctcagcctcccaagtagctgggactacaggcccccaccaccacgcccagctaattttttgtatttttagtagagacggggtttcaccgtgttagccaggatggtctcaatctcctcacctcgtgatccgcccaccttggcctcccaaagtgctgggattagaggcgtgagccaccgcgcccggccatattaatcccatttttatacaggattgcttataagcaactgaatctgggtatttcaacagttgttcaaactttattgttttggagacagagtctcattctgttgcccaggctggagtgcagtggcacaatcacagctcattgcaacctccacctcctgggttcaagcaatcctcctgcttcagcctcccaggtagc

SEQ ID NO: 1886629 - DNA, 4001 bp, Homo sapiens
atagagacagaaagtagatttgcagtagtctagagctgtagtgggaggaaggcttgggagttactgttaatgggtatggtttcttttaggggtaatgaaaatgttctaaaattgactgtggtgatatttgcaaaactgtgaagatactaagaatcattgaactgtacactttaaatgggtgagttgtatggtgtgtgagtcatctctctcagtaaaggtgttattttaaaatacgtatatatgggccgggtgtgatggctcagacctgtaatcccagcatttggggaggctggggcaggcagatcacttttgagctcaggagttccagaccagcctgggcaacatagcaaaaccctgtctctactaaaaatacaaaaattacccaggcatggtagcagcagcctgtaatcccagctactcgggaggctgaggcaggagaatcgcttgaacctgggaggcggaggttgcagtgagccgagatcgagtccctgcactccatcctgggccacagagctacactgtctcaaaaaaaaaaaaaattgtacagatatatatacacacacacacatatagaaaaattatataatttttcctcctctctctatatacatatatatatagatatatgtatacacacacacacacacacacagaggaaggtataggtgtcaaacctttttttttttttttgagacagattcttgctctgtggcccaggctagagtgcagtggtgcgatcttggctcactgcaacctctgcctcccgggttcaagggattctcctgcctcagcctcccgagtagctgggattacaggtgtgtggcaccacatccgtctaatttttgtatttttagtagagacagggtttcaccatgttggccagactggtcttgaactcctgacctcaagtgatctgcccgacgtggcctcttaaagtgctaggattacaggcgtgagccactgagcccagcctaaattcaattattaaactccttgagttaattaaagggtagccaggtgcggtggctcatgcctgtaatcccagcactttcagaggccgaggcaggaggatcgcttgagcccaggagttccagaccagcctggacaacatagcgagatcctgactctacaaaaaacagaaaaattagccgggcgtggtggcgcgtgtttgtagtcccagacactcctgaggttgaggtgggaggatcacctgagccctcgggaggtcgaagctgcagtgagcggagatcgcaccgctgcactccagcctgggggacagtgaggcggtctcaaaacaaaacaaaaacaaaaggggagggcggggggaagacttaaagacccctgagccagggccattattatttaacttggtcgggtctctgaaccattcggaggaagcttgggtttctatccttcccgactgagccacagacctgagtcttgactccggataaatcaccccagactgtttttctgtctgtgacacgggaacggcagcttctgcctcgcgaggtggagagagaatgagaagcgccgtgtgtggcgcgcctgacacggtcagctcgcgggtggaggcccggagcagaacgccctcgggcgcccgctcttgcagccgcactggagaccgggaatggctccggccacgcctctgccgactgcggcaacgcgagggacagctggtctccggggttgcagcgtaacgccctccttcccggcctcatctttcctgactgcataacgggcatacagtgggttccatggcgcaagggagctgaagaagccgcccgcccccagctcgcccgggatcctcacgcccctataacgccccgaggggccacgatgctgcccacagcccagatcgcgagtgcggaccctgcgggagggtctggcctagatgcgagtttcccgccgcagaccaggcgaggccacgcgacatatcccctacccgcttactgcaggccgcagacggagacagtgcagccctgcgcactgctgaggttgcccgaggtctcagcctcggcgggtcgggaacacgcggcgcgcgcccgcgccccaaccggaagtccgccaccggccgctctagcacgcgcagggctgcgtctgtggccttaacccttcccaaggctgcgccgccggcctttgtctccgcggagcgtcacaaaggttggaagggtcgcggggcctctgggtgccgagctgcagatgcctccactgcgagcacagccctgagacaagggcccaggcgcccagcggggctggtttcactcagtccagccgcacctacccgtgccctcaccagatcttaagatacagacattaaaacctccaccgggccgcggcacaggacagcagttttactttctgtttttggcattgcattgcctccatttcctagagtgcacgtaataaataccgctggtgattccaaaatataaaggttgaaaatatttactttacaaaaatttggttcccatactgcttttaaggccatcctctgcacttggttcccgctgctcctgatgtggttgaaagatggatgaccccaaagacgaggaaaagattattggctccattttttagatgcggcagccagctaaggtctagacaggggaagggacttgccccaaatcacagttagagcaaatcagtctgaatcaggaataactccattcctatcccgcatcctgccctttcactacgccacagctgcctggctgcctggaggaacaaaggagggccgggcaagaacgccattaccaactgcaaatccacaggcaaatgcaagaggacagaaagtaagttcttgggctctgcccttgtgccgtacccggaggggttctggggtcaccagccaggtgcatccctgccttcacagccatgcacagcgacacccagttaactaatgggggggattatgccacttgctgggtatgcctgtgccaccagtgcactcactctgtgcctggggaaataaccacggatgaatctggggatcccctgggcccactgtgaaatggacctgagctaaaactccattgatcacaggacctcagggatcttttgggtctcgagaacagaattggatgctacaggagaaatgtaaccagaaaaggattaggattttgccagtagagaaagggagatgtgcttgctttcattcatttatcattaatgagcacctactgtatgccaggcaccacactaggccctaggaagacagagattatgagacagatgtggccttattctagcaggggaagtgagatgaaggaggtgagaaagaggaagtatagtgactaaccagggacctgacctagtttgaaggtcagggaaccttggaggaggtgaaatcaaacccaaagcctgagataagagagagaaggggagggtggagggaaggaaagggcttcacagacagagggaacgggagtgctaacagcctggccagcttccttgtggtagaagttctatgcatgagttggaagaaagcttggggaaaggggcaggagaggtgggcaggggccaaatccagcaggggcttttctaccataaggaacttggtgggagaactccatgggcaaaaacaggtgtggaagggaccaagaagcccatgtggctggagggcaggacatgagatgaagatgactagagcagggagtgaggaggtggagaaggtgagcagaggccaaggctgggaggcctgaaatgcctggccgcaaaactcagccattagcctggaggccatgcaagtgaacagcaaggaggagagtggaacaccagggagcggtagggattgcggggactgaagggcagagactccgcccccagggcagtcagtgttctgcaccccctacccccctaccccaccaacctccgccccatgaccactccaggaggcaaactcagtatctcagaatatctgctttcaagggtagctggagtccagatttctttttttatttttggtagagacaggatcttgctctgtcgcgcaggttgaa

SEQ ID NO: 1886630 - DNA, 4001 bp, Homo sapiens
atcttacatcctctctctccaagtttatctcatcctttatttttaatcacttttttctatgatggatatgaaaaattcaaggcagtatgcacagaatggacgagtgcagcccagccctcatgcccaggatcagcatgcgcatctccatgtctgcatactctggagttcactttcccagagctggggcaggccgggcagtctgcgggcaagctccggggtctctgggtggagagctgacccaggaagggctgcagctgagctgggggttgaatttctccaggcactccctggagagaggacccagtgacttgtccaagtttacacacgacactaatctcccctggggaggaagcgggaagccagccaggttgaactgtagcgaggcccccaggccgccaggaatggaccatgcagatcactgtcagtggagggaagctgctgactgtgattaggtgctggggtcttagcgtccagcgcagcccgggggcatcctggaggctctgctccttagggcatggtagtcaccgcgaagccgggcaccgtcccacagcatctcctagaagcagccggcacaggagggaaggtggccaggctcgaagcagtctctgtttccagcactgcaccctcaggaagtcgcccgccccaggacacgcagggaccaccctaagggctgggtggctgtctcaaggacacattgaatacgttgtgaccatccagaaaataaatgctgaggggacacagtcacagtctgtgggtcacacgcgcgagcggtcacagggctcaatcactcgcccacaatctagacatgaggctctcctttcacatttcaatcacacaaacgtgggacgttgcttttcccagaagggagcacacgcagagaatacactgaggtgaaggaacaggcccataacacaaaggaaaaagccggctagatcaacgcccggtgacaggctcttagtctaaagacaagagcaggtggggctgtgtgggaagcacaggtctggtgggagagaagctgctggcatcagggtcacccgtgggcatttgccatttcccagaaataactcctcatcagctccctttttagttatttatggagtcttgctttgttgcccaggctggagtgcagtggcgcaatcttggctcactgcaacttctgcctcccgggttcaagccattctcctgcctctgcctcccgagtagctgggacaacaggcacgcgccaccacacccagctaatttttgtgtttttagtagagacggggtttcaccatcttggtcagcctggtctcgaactcctgacctgaagtgatccacccacctcagactcccaaagtactgggattacagccataagccaccgtgcctggcccctttttatgcactgttttgtgttttgtcttttggagacaggatcttgctctgctgcccagcgtggagtgcagtggtggtatcacagctcactgcagcctcaaacacctgggctcatgcaatcctcccaccccagcctccggagtggctgggactaagggcatgcgccaccatgcatggctaaattttatttttagtatagacgaggtctcatgttggccaggctgctgccaaacccctgacctcaagtgatccacctgccttggcctcccaaagtgctgggatcacaggcgtgagccaccatgcccggcgaatgcactattatttcttatggttttctaaacccgatttgaacttctgcattttacattcccttagaattcagagttttagaaaagacttgttttcatcactttggctcatttgggacaatttcaagtctgtgtttttatcagtctctggaaatttatgaaagctgcaaatcgtctccagtagctcttttattccctttaaacttctgccatctagttccatgttataaaaaatataacgtgtttgggcagtgtttaggccacagccacccatgtgtagccacccctacacatgggtggctgtggcctaaacactgcccacgagaaaagttctgaagtgggcccttctggccccacagcctgtccgcaggggctgtggcctctaggtcgggcctggggctaggaagagggaaaggtcagtgcacgaggccacccagctccatgtccatgcccatggcccttctgcagggcatcctcagacttgttttcaagcccatgtgttagagatttaggaatgtgtcatttttctcctgtgacaccctaaaagagggttggggagagcgtataggactgagggcacagcccgcatgaggcacacacgtgtgaggccagcgtacacaggacacgcacaggagataccatccttcccggtagcacgctgccagcaccagcaggggtctttaagtaaggactggcacaagtagaatgccttcttaggaaaatgatccgcagctcaggaggctgctgcgtggggaccgggaggggcaggtgcattcagggcgtctgtggcaggggcccagggctgcacccaagcctggagcttagatgaccccaggagcagcaggaagggcccatctggcatcccagggaaatcctcaaggcctctggaaactcagtgctggagctgggtcaccaggggtgccctaaggagcctgggactgaagcctcaggaccctgccctggccgatttttgtctgagctgtggcagttcccagcccacgggagggcaggggaaaagagccttgggcccagggataggagtgaccggcctatccacgctccaccctagaccacggaggggggccacacattctctacggacactgtccccaaacaactgtggcatctgacagagccaactcctgccctgctcccagttcaccttagacctgggaaacgaggttttgacttcactgctctgcatggcctggtgcagggctcccgtgagcagacggcccatgggccacgagccaggtatgtggaagagcctgtgccttctgtcctccaggccggcccagtccaacggcgtggctcaactgaaaccacacccagaactcggagaggggaagacctcgcggtggggcgggcccaggccaagcccctccactgccatcacaggtttacagcggagcagaggggcaggccggatacaggcagcccaggccacaggtcaggggacccacaccaggccacaggaacaggcttgctgagggtatcagaaaaccccaggtcacagtggtttgaaaaagaagtttatttctcagccatgtaggcaggaggaggcagtccagcactcggtcacctgaggtctcagggaggcaggctccatctgctgccccgtcatcctggttcacgcctccctcctcatggtcacctctgtgttcaaggaagtgcttggccgggcatggtggctcacgcctgtaatcccagcactttgggaggccgaggcaggcggatcatgaagtcgaaaaatcaagaccatcctggctaacacggtgaaaccccgtctctactaaaaatacaaaaaaattagccgggtgtggtggcgggcacctgtagtcccagctactcaggaggctgaggcaagagaatggcgtgaaccggggaggcggagcttgcagtgagccgagatcacgccattgcactccatctggactacagtgagactccatctaaaaaaaaaaaaaaaaaggaagtgctcaagttcaggccggggtagggtgtgtgcagtggcctccgtcaagtgtgtgtcacccccaggcagctccctgctgcgcctggacccaactgtgcccttggctcactccatcttgctgggtttcccatctctgtcttactggctgctttcagagaccaggcccagagtccccaggactcaggtgaccttggctaccctggaatcctggactaaagatctgcaatagaaatgtgtccagcagggaatgtaatgtgtccagcagggaaccatcctgtttgctttgcttttctgagttcctacaaccaaccggccagggcgcactgtggggcacagggatgcag

SEQ ID NO: 1886631 - DNA, 4001 bp, Homo sapiens
gcatctacttacctgagggcgatattgattttgttgttcttttggctgctgcttatattgagctgggaagtccactcgctgccaccccgaatgagtaaaaggctccattagtggcctgttacatcacctgactgtttctccgcttactaaggttgtcctgctatttaatttaaaattttccagcagtggctgagtgtatcatcatcagttctcctttgagttgccgtgccttcagggaatagggattagcgaggtcttattttctttaactaagcagcatcttttcttgtctgtttgcctcagagaacattggtttgcttgttcttgctgggaaaaaaaaacattcttactaagacagtaaatggattcataacacagttgaagtctattcacagaatctgttatttagacaacctccatagcggagagaaaatattttgaaggtctcagaggtggttggtttttaaaaattatttgctagtagaatcttagcagctctgcatattgctggctgggatggtctggttgttatttatttatttatttattttgccttttttttttttttaagacggaatcttgctctgtcacccaggctagagtgcagtggtgtgatcttggctcactgcaaccttcgtctcccaggttcaagtggattctcccgccacagcctcacaagtagctgggactacaggtgcccgctaccatgcccggctaatttttttatttttagtagggacgaggtttcaccatgttggtcaggctggtctggaactcctgacctcaggagatgcgcctgcctcagcctcccaaagtgctggcattacaggcgtaagccatcctgcccagccccggcctcctttttttgtattttttctctactcctagttccagcaagcagaggggtggtctggttgaatgggaaggtcaacacttgggtttgccatttgtttctcgttctgtctgttttataaccgggttatattccttggtactttgcagcagtttccttcttcttttaccctcagagagaaacacaaaatgtgtatcatcttgatgtcttgggcttggcaggtaagtactaagtttccgtggtatctgcctgtctttctgattgagatggactttcagtgaagcatagtggtcattttcccttcagaagatagagccttaatctgaaaaaaataatcgtggtaacgtggacacctatgttcttggaaatgaagtcactccacctgggttcccagtaaacgataaattgtagtatattaaaatcctaagaaaagctttgtggccaagagctcatcctatccatctagggctttaccagtggcttctgaaatactatggcaacatgccattcatagccatcctagggacattccaaatcttgtttacttttagtcccccatgccaaaacagtttaactgagggataaatgaattgggcatgggatttttatcctaataacatataattttgtttatttgtgttgagctgtaaactaagctttgcacagaatttgtataaaataaaacagtttgggctgggcacgatggcgcacgcctgtaatcccagcacttttgaaggccaagacgggcagatcacctgaggtcaaccagcctggccaacatggtgaaaccctgtctccactaaaaatacaaaaattagccaagtgtggtggtgcacacctgtagtaccagatactcaggaggctgagtcaggagaatcgcttgaatccaggaggcagaggtttcagtgagccaagattgcgccagtgcactccagcctgggcaatagagcaagactcagtctcaaaataaataataaataaaataataaaacactttgttaatatcaaaggtaaaggtacagaaaacaagaagtttccttcactgaagcacaaatcctttggtgtgcgggatttgaacacctctttaggaaaagcttgctagtaactgaagccaagtcacaaacaggtgcttggtttcaggtacagctacaaagaacacagaagagaagctgacacttttgtatttttagggcaaaggcttctttctccaaggctgaaaaaggcctggtcccacactgctctgattgatttatctggggtgccatctcctggggagaaaaccattgccacacactcaccaaaccaagagcgtatctctctcgggaagacaggatcggtgtgaaggcatctgtgctctcctgtctaggcctgtccagaactatatgaagtcatccagttttgttcagttttaataatggcctgataaaaacagataggtgtgtgtgtatgtgtgtgtgtgtgtgcacatagtgtaatggacatataattaacgtacacgtatttatataggtgtttaaattttttttttttctgtgatggagttttgctcttgtcgcctaggctggagtacagtggcatgatctcagctcactgcaacctctgcctcctgggttcaagcaattctcctgcctcaccctccagagtagctgggacttacaggactgtgccaccacgcccggctaatttttgtatttttagtagagacaggcttttgccgtgttggccaggctggtcttgaactcctgatctcaggtgatccacatgccttggccttccaaagtgctgggattacaggcgtgagtgaccgcgcctggcctaaaggtgtttaatttttaaggtcatttgtgcgtatggagggaaaaatcaaatcctatatataggtaaggtatataaggacatggtaagtcaatctttccgtcttcgctcctggagaccacatccagtttcttgggtatctttccaagagacatttctaggcatatttgcataatccccacgtgtcaaggaggtggtgctaggtggacataattgaatcatgggggcggtttcctccatactgttcttttttttttttttttgagacgcagtctcgctctttcgcccaggccagcatgcagtggcgctatctcggctcactgcaagctccgcctcctgggttcacgccattctcctgcctcagcttcccgagtagctgggactacaggcgcccgccaccgcacctggctaattttttgtgtttttagtagagtcggggtttcaccgtgttagccaggatggtctcgatctcctgaccttgtgatccgcccacctcagcctcccagtccatactgttcttatggtagtgaataagtctcaggagatctgatggttttataaggggtttttcccttttctcttggttctcattctcccttgcctgccgccatgtaagacatgcctttcaccttctgccatgattgtgaggcctccccagccacatgaaactattagcccgtgaaacttttttgcttaagaatcttgcgctgccacccaggctggagtgcagtggaaggatctcagctcactgcaacctacccctcctgggttcaaatgattctcctgcctcagcctaccaaatagctgctattattggtgcatgccactacgcccagctattttttgtatttttagtagagacagggtttcaccatattggccaggctggtcttgaactcctgacctcaagtgatctgcccacctcagcctcccaaggtgttggaattacaggcgtgagccaccgctcccagctgaatgtgcattttcagatttgaataaaagaaaccatttacatcccagccagccatataagagaatccctgtatccccatgctctcaccaacaaatcgtattatcaacaccttttttttctttctttttttttttttttttttaagacagagtcttgctctgtcacccaggctgcaatgcagtggcacaatttcggctcactacaacctcggcctcccaggttcaagtgatcctccagcctcagcctctcaagtagctgggactataggcacctgccaccaggcccagctagtttttgtatttttaatagagacaaggtttcaccatgttggccaagctggtctcgaactcctgacctcaa

SEQ ID NO: 1886632 - DNA, 4001 bp, Homo sapiens
ctttaagcaagagcatgatatccctgggcattatttgtttcataaaattatcctaagactcagtaattcttctcgactcagtgttgaaagtatgctcttagggcatacttaggcatgccccaagttatcctaagaatcaacaattcttttggtttctgtcttctctattataagctgggtgtctaagagatagacagtatatggtggtagaggcacaggatacactggtgccaggaaaagcaggcacaggaatttcatctatgatggtagaatttggggagactgatgagtccttaatcaaattagatcatagcattttgtaggtgaagaaaatgagatgcatctacccttttctctttcagtcaaaatttaatagttcaattctaatacgaattttaatttaattttatgttgtgggatacatgtgcaggacatgcaggtttgtttcataggtaaacctgtgccacggtggtttgctgcacctatcaacccatcacctaggtattacactccgcatgcattagctatttatcctgatgctcttcctcccctggtgcctccaacaggctccaatatgtgttgttcccctccctgtgtccatgtgttctcagtgttcagttcaattcttatcttgatttttttttaatctaagagaagccagtcaaggcctttaacaagaagtgggcagcagtggaagatgggtaactcgacttgatttttattttccaagaatatggtaacaaccctatgaagaaaagttggaggaaaacaggactggaggtggggagatctgttatatattcattagagtaatccaaataagaagcgatggagactcaaactcaagtagttgcagcagtagtggagaagaaatagattgggcagttattatagaattaaaatgtataggtcttggcaatcagtcaaatgtagaaagtggagaaaaagaatggatatggaatgtgaggaggacatgaggctgagactggctgaacaggcaagatgtaatgccacttattaatcaatagaaattagaatcagcctaaggactgaagggaaaatgacaagttgaatggagatgttgatgcagaggtgactatggaacccctcagcaaagataatggaaaatgcaattcaacaagcagctttgctacttagaagaaatgactttcaaagttcctatcccagacatcagtattgtcatcaataaaaccaaaaggtattaatttactcgtcaaggtctcaaaccattatagactaagactggtttcttgacttggctacaactctacacaaaatagctagtgttacatttacagaaatattaagaaaatataggtatatgcattaaactcaatttccccttcatattctggatgtatttgagattgccatatatctacatagttttaaatatttaaacctaagtaactatttaatattcaataaatgtgtcacattttatcttgtcttatatcagatgttttgctgttagtttcttgcattttatcattaatgtaattcattttcacagagtaatgcctacattcataaaaagaaaaatcactacttgaaagacttgatgttgtcatgtttgttgaagaatgttcctgagacaatcttggaaatgtgagtgagaagtgggatttggcagaatctggaaagttggtcttcaatctgattgtaatccacttggaaagaagaacatcaaccagtgaaagacttaatgcatctgcatgaatgtaaatcaatcaaatagatatttaagaaacttgttcctttgctgccatttcaaaagtcaataccatgtaatattctagaacaggtcatgacaaagttcaacataaaaggaaataacgttttactaaatgcataaagatttatataatttaaggcttttgcaaacgtatagttttcacagtgatgacctgcatattatagatttgtgaaattttaagttttaatgtaatcacaaatctataacatacaagtcatcattgtgcttttcagcactaagaaatctattcttccactgatgtgtgaaagatttaagtgaccagacactcctaacagtaatagctttgctctttttccctcatgcatctgtaccagatattattgcccagaggactctgagcagtgtttctgtgtatatttaagaattaaacggtaaaattctactaaatcataatgccaacatgataaaatatctgcagtaatcatgtccatcagataatgacaataaaacattattattccattaaaactaaggagagaaatcaactaaaatttgtatgcaggagtattagttcttacacatttttaagaaacatttgtttacaagtgctggtaatttttaaaaagttaactaaactgcttaaattgtattagtaacaatttcaggtttactaaattgtttataagcaccgcagctctatcatttttaaccttgggttgtaaatatataatataatataaacatgtaagtgtgtttgtatgtatgtctgctcaggtgataaaaaataaaaaagtaaacaagaaaaaaagtcacttaaccatttctatataaagcagtaatgtcaactgaacatcaggataaaatcaagcaacaagaagacagactgtcacataggatatgtgttatttgtatctagagagagtatattcccttcaaatctctttgggatgacaacttcagtcatccctagagaacacagatttcacagcaccaaaacttctgctgccagagtgtgtgacgtggaggcagctccatgtactagaggagaacttgcctactgcaaggtgcactcctgcccatccctccatgccaacacactgggtcactgtctctcatgtcagtgagaactgcttaagaataaaccctctgaggacagcatgattctcctctgcatggagaaaactaggttctgctgtccagaattatgtccacagaatatccctggttcctccaacattaaagggcctagttgaactctagaaaagaaaaaaaagcaatcttttaatccaatctgctaccttccaccaaaagacaactgagaatgatagcagggaagaagaggggaaaatacctgtaatatactcaaaactcttgatgggaagccagtatcgtgcaaggcatgcaacatattttaaatctataaccacatttaaccttcataaaaacacagtgagatgggcatcctctccattttccacacgatgaaaactaaagctatcaaagttaagtagcatatcctgtttatacagctaactcagggccagggcaaactcaaactttagatcatctggcaccagagcccatgtcctttaagtttcattgttttgccaacacgtcaagtgatttttttaaattttaaaataatattatgtattttgacttgagtatattactcaaaacagagccttgtatgtgggatagtgtaaaattcctgcttgttttaatatttttatgcacattaacatttgggaaaaacagcccttgccactttgtctccatatttgttgcctacagatgacctgaataaatttaactctctactttcttcaagtgtgaagccatcagcactgctaataagtgatgagcatggcagatagtcccttctgtcaacagcaagctgcttaaattaaaaccactcatttccatctgaggccaccctcatccacgtgggatattcagctttctctctcagccaggttttcagactcaaacctgcaagtcacttgcattgattttgtcttgtttgccaatttacatgtaactttggccctggacttccagtaatgacaacaacattatgctttgatgctatccattttcttgatttatgtgggaatacttttctgattgtctctaagactcattatataaggtgtgtgtagcccagtcaattggcaagggtaccaagatatcaatgggattgcagagttttccttctctggttattccctgcaagtgatgaaaaaaaaatatgcattttctc

SEQ ID NO: 1886633 - DNA, 4001 bp, Homo sapiens
aacctggctattcagccgacttctcggtcctttgttaaatcctacttctacttccctttctttcttttcttttgagatggagtttagcccttgttgcccggctggagtgcaacggcaccatctcggctcaccgcaacctccgcctcctgggttcaagagattctcctgcctcagcctcccgagtagctgggattacagacatgtgccaccatgcccggctaattttgtatttttaatagagacggggtttctccacgttggtcaggctggtctcaaactgccgacctcaggtgatctgcccgccttggcctcccaaagtcctgggattacaggcgtgagccaccgcgcccggctgttctacttccttttcacattcagagatcaagaatgactttatcaaatgtcttattgaaatcaagacaagctgagcacattatatactcctacctctgccagtctcataacctaaccaggaaaagaagtgtatgataccatagaaggattaagtagttcactgtttgtaccactttgttaaataaccttctttatgcaaaggtacaaaagttccacacacacagacacatgcacaaacacacatgcacgtacacacaagtacttgtaacacatatttgtttgtttttaagtttcatgtaacatccaagttaagaaagcacagttaggtctactggtctaaaacagagatctaggaattatctcgtttctttgaccaatacagattactacctttgctatttcaatgaaaaaaaaggaaaattcaactttagtaaagagttttaagtattattagagaatttcactgggcaaattctaaacagagggttatttataacaaactctaagtattctaaacacatattttgggctgtttcagctatctagaattgtgttgaatttaaatactagagatgtagatggagagaggtgatatgggtctagaaagcaaatcattttctggctggatgctcacacctgtaatcccagcactttgggaggttgaggcaggcggattgcctgagctcaggagctcgagaccagcctgggcaatatggtgaaaccacacctgttctaaaaatacaaaaaattagctgggcatactggtgtgcacttgtagtcccagctacttggcaggccgaggcaggaggatcccttgagcctgggagatggcgccactgcactccagcctgggtgacggagcgagactccatctcaaaaaaaaaaaaaaaaaaaagtattttatgaacaccaacttctaatacatttacttgtatatcatgtggcagcagacgtgagaatgtggaaagctataaggcctgggacactcagtgcaggcagccttggcctcatccacagggcctcccaccaccccatgttgagaggtgacataatcatggtggcagcaacagtggtcactgcacacaaggcactctcccagctgcttacagtcatcacccagttaatcctcacaacaacccgcagaggtgagtcctcctgctattcttcttccacataagaaacggagccttgggagccttaagagcttcccaagtcacagagtagtaagtgtggcagaagcccccaagcccagatgcacctgccaccaaggcctatgctctcaaccactgggtttgtaaggaaagtatataaagatgattgcctgaaaataattaaaataacaaagtttggggtttaagttaaaggaataagcctttgttctcatggaaatcacttccaggaaatgtctcatgtcctgagctaagtcagtctcatgtcctgagctaagtcaacagggtgctaacagattgtcattggaggagaagctttgtcattctactattgaaagcaagccctttactctgaaaagcacaagcataaaaattaaatcttattaatacacaacgacagttaaacttggctatacttggtacaacttaagcaccagattttacctggtgcttaagttataccaaatatgccaggcttttagaaatgggcataactcttttggccacggcatcactgaactcctccatttaagtagaatgtgtacaactgtgccctgaaactgggccattattacaagatctcccgagaggaagagtcttgcctacaactggtgagcctcctcatcttcttcctcctgacttggtgaccaggcaagctgacagacactagggaggatggaggcgaccacgtgtggagtgcagaaggcgcataccggaggaaggtgagggatgttccacagatacatggaacaaatcacatcattcatgattttcagtatcatccaactctatatagttctgccaacctcaactctgcactgaggaaacactttaagtgaggaggatcttagcaatgagtagattttcatcaaaattaaagatttctgggaaacaatagcaccttataagaaatgaaaaaaatagtatcctcaagcacccaaatcccaaatactgggtcagatgacagatagacacattttcttgtctgatgctaacaagaatggaaatcgagccccctgttttacacagcagtggcgtttaaatagactacttttctgcattatgaaaacagccttttaaagactctttaaagttcaagttgagtttcaagtaatcagtttgcagcaactctaggagaattattattcctcctggttgtaagtgcttttttttcttttcttttttttttttttttaagtagtaaaatggaaaacaggccttagagaattgtattcctcaaggcctctgactgcctgcttccaagcttttgttaaagaacagaatgtgttgaattcttctcaattggcaggggatcaagcacaatactacataatgaggtagctgagaacagagtttttcctataaacacaaagaacaactgaataagtgcatgtaattctcatccaattaaacaggaaacatgataaagcaagttagtacagttgtatttaaaccaagttgactggtataacttgaaaaaatttaacccaagtttctaaggtatgccttattcataactgatgagtaaaaacaataaaaataaggtacccaaacctattacttgtaatgaaatgctaaaaataagatcctaataaatataattcaccaaccagaagacagatgaacctccgtttgggatgtgaatgatttgaaatggccgttcatttacgtggatcctattcagtgtctactcgttcacttcatcttaaggccgtgtgtcccccggactctgtgtgttgccatccttttccacctgttccttctctaattcatatcacgactgtacaatttctggttttctttcaatgtgtgcacagaaggaagctcaacaactttgttgagccaggaagaaattattatcaacatttataatcaggccaaatttcagctgagtagtgactttaaaagaattagttttaatctcaaaataaaaaaaaaaaaagagggcaggcgaggtggctcacacctgtaatccagcactttgggaggctgaggcgggcggatcacgaagtttaggagatcgagaccatgctggctaacatggtgaaaccccgtctctactaaaaacacaaaaaattcgccgagtgtggtaataagcacctgtaatcccaggtactggggaggctgaggcaggatgattgcttgaacccaggaggcggagattgcagtgagccgagatcgcaccactgcactccagcctaggcgacagagcgagactccgtctcaaaaaaaaaaaaaaaaaaaaaaaaaaaagagagggcaacagtcatttctgactaaataattatataatgtagttttatttatttgatgtttaatttcatgaaaaggggaaggggtttaaaaatccaatcacttagagaatttcaatgacagaactgaaaaagaacaaactttctacggagcgtggtggctcatgcctgtagtcccagctgggtctccacatctgaggccaggagtttaagatcagcctgggca

SEQ ID NO: 1886634 - DNA, 4001 bp, Homo sapiens
ttacattttgggggagtcaagttatatgtgaggagccagacacggtagcttacacctctaatcccagcagttggggagaccaaggttgagcccaggagtccaaggctgcagtgagctaggatggtgccaccgcacccagcctgggtgacagtgagaccctatatctctttttttccctttgttcagcctccccatagagaccgtcgaaaattgccaatgctgattatatttcaagtcatcatggagtcattggctatgatactgccactgcacaaagctggccccatctcaaaaacaagttatatgtggatttgtggctgcatggaggagggctgacacccctaacccctgcattgttcaagggtcaactataatataaacataacttcactgagaaatcaaaaaatttgtgacctgctttattgtggtagtctggaagcaaacctacagcatctgaggtatgcctgtccagtccctgttcccacagaatgtgaatggatgctagacattcacttagtattccgaggaaacaagatgggtttggcacctgagctgaagccatgctggctccagagcgatagaacattctttcccactatctcccaggaggctgaataacggcatcctactgtgtctaggcaatcactaagctcactggacttgatttatccgttaaaactgctctgggatctcacaagctccccatctgtctggggttcaacaccctttttgtcctcccctatcctctccaatttgcacaaaggacacaggacacaggctggcttactattcaaagtttactgacctccccagccaggcaggccaacccttccgagcaggggaaatgtccatctagctgccctctgctgggttgcagcctatgccatgagagggtactggaagcaggagggagccctggctagggcaggccttaaacgcaagggaagctgagcagagatctgcacactcaaccccatttgatattcttctcctcctcagtcatggccagcgtgttggtgactagaccggtgccaatagtccggttgccatctcgcagggtgaaacgctggcctttctctaagatcattggctgccgcaagattaggttgaacttcaggtcctccccgggcatggcaagctcctagagtaggaagagaaggatcatgcgtggcctccagggtgccttcattccttaagtcttttttggctacctcggaggttaagagtcatgggagaatgcagcaggggaatggttctgcctggggacagcttcatccatcccaggctgtcaggcagatgcaaacagcatattgagacaggaaaacataaaagagaccagtgatgagtgttcctaaggtatgttcttgagaaaaaaatgtctaggaagttgtgggttatgcaggtttcttggtcacagaacttcttaagccttcatatataatgaaacgctcaaaaagaagagaccttttctaggaaatctttctgtgggtacatgctggcagagctaaacttttaacctgcttcagcttagggcacactggatgaggactcccgcccctaagtccatgggccatgccccttctgttggctagcagcggcaagcagcccctttccacctaaggaaataaagccactcgggttgtcacagtgtatctttggaactatgagtgaagcaaaggtaatataaaaagtcccccctccaccctacattcctcccacccaccgtaccttctctgggggcaggataatccgacaggccatgtcccaagtcagggagaacatgacaggcatgaagtgggacacaaagggcttgtggcggccaccttcctccttgctgaggatgtaaacctggaggagagcaagcaatgacggtgagctgggcttggctggaggctggggagagcttggctcaaccctgcccaccgtcacctggagccctcacctgggcctccaccttctggtggggcttgatggaacctggcttgaccatgaccaggccccgccgcaagtcctcccgcttcaagcctcggaccagggccccgaggttatctccggcctcggccctctccaggctcttgtggaacatctcaatgcctaggacggaaagggaaaaggagcagggagaaggaaggcgaatgtgagacagagggaaggcacaagggatctgccggggtaaggccacccttcagccaggccctgctctccagactggcttcccaaacctgtcaccacagtgcggatgttcttgctatgtcctaggagctcacactcgtctcccttctttaaaatgccacgctctagtgtacctgtcaccacggtgccacggcctgggagggaataagacaggatatcagggaccccgagctaggcttctgctagagagagtgcgtgggaacagacagagtcctcaccagggacggagtacaccgcctccacaggcagcaggaaaggcttctccaggtcccgggcgggcactgggatgtaagtgtccacagcatccagtagcttctgcacagacttcaggcctaactcagggtcccgaccctgttgaggggaagtgccaggactctgaaatccccattctacttccctcgattatcaagagccacttcccagacacaaagcagagctctgggtgcccatccagccccaccctctgcagcagctgccctgcctgaccccgcgttcacctcaagggcacagagagcagagcctacgatgactggggtctcctcccctttatagccaaactcggtgagcagctcccggatctccagttccaccagttccaccatctcagagtcctggacagcgtcagccttgttcacatacaccaccacatgctccaccccaatctgtagatgccagagagacagggacaatatacagaggggcccaactccccactcttcccttttgcatccttacccaggctctgagtacctgtctggccagtaataagtgctctcgggtctggggcatggggccgtcattggctgctaccaccaggatgcagccgtcgaggggtgcagtgcctgtgatcatattctggagaggagaaggaaaggaaacagccaagttcaacgagctcttcagttcacatccatatagccaagtgtagcagttagaaactcaggcccacctttctctaccatctcctcaccacccattctgcgtggccaagaccacaaacctgccatctcatacccaaacactgaatatcttaatctcctccccacaagcctaacatttatcctgacaagaggcagcttctggccctgtctccagtgtcccagcaaccctcaccttaacataatctgcatgacccgggcagtctgtgtgggcgtagtggcgggcggcagtgctatactccacatgagccgcattgatggtgataccccgagctcgctcctccggggcattgtcaatctcctcgtacttcttgaacttagccccacctccctcagctagaactaaaggaggaaaagaacacacctctcagctaaagttccagtgctagaggcagagcttagaccacgcccctgaaccctcccacctaaatacataacctcctccaatctctaactcttccagcagagagaactgtgggtcagaaagaaatgttagagggccttaagggtctgccctgtgacttctttagggtacagcctctgcttgcagagcattccccacgactttgtgatccccaagccattggtggatcacaaagttcttcctgttcaggagaaatttgtctcttgcatctcccaatccacctgtcgcacaaattcgggctcttggggccacagtaaactcctccagcagacactctgctggccttgcctccctggctccaggtcccatcagtagatagggcgctgctggacgccccaaccccactcactcttcgtgatggctgcagtcagcgtggtcttcccgtggtccacatggccgatggtacccacattcacatgtggcttgtcgcgcacgtaagtcttctt

SEQ ID NO: 1886635 - DNA, 4001 bp, Homo sapiens
cccagcccgtgtgattcacctgctcctcccacaatccggccacaggacaagtgagaagctggtgaagggcccccgggatggccctgctgctggcgactccggcccccgctgcctcctctgcatgtgtgccctggacgtcgacgccgctggtctgtgtttcatgctcttggggtgatgcggggagggagccagggagtgggtgtgggggctcagcagccccaggctccgtcaccccctctctgcttgcagacagtgccacggcttttggggctcagacctcctcgcgtctctcccagatgcagtcacccatccccctgactgagacccggacacccccggggccctgctgttctccaggggtgggctgggcccagcgctgtggccagggggcctgcaggaggtgagtccctgtccctgccacccatggccagctgcatggggcgggagggggacctgtccttaccccacactgcacggcattgaggtgccaaggtgggcacacagccagctctgctcccgcagggaggacccccaagcctgcattgaggagcagctgtgctacagctgccgcgtgaacatgaaggacttggtgagtacgtgcccacctgtcctgggccgggcttggggacgcgggaaggccgtcacctcgtgggtggcttgagggggtgctggcaggtttcttggcccctcgacaccggcctctgttgcagccctcactggaccccctgccgccgtacatcctggctgaggcccagctccgcacacagaggtactggggcccacactgccgtggcgcgtgggtaaggggcctcggggctggtgcccactgcagctttctctctagggcctggggcttgcaggagatccgggactgtctgattgaggacagtgacgacgaggcgggccagagctgagcgtgaggacgtgcttgccgggacagcaggcagtggccacctggtacaccacactggagccggaaggcaaggacgggggactggcctctgattgtccatttgtataaataaaacattttttaattaaaaaaaaaactctacagtacacgtgggggacggcagcgccacgcaggccgtggggacgcagtgtccttctctgacagcagcatcagggctcaggcaggccgggaggatgcatcacagctggcggccttggacggggcagtggctcccccggcctgaggagtgccgccccttgtggccacgctgcccagcaggccggctccttccctctcgggcgccagcagcagctcctactccttctcacgagtccacttgatcatggtctccggtgagcggtagaggaagatgagcttggcgtacaactcctcctccagctccagctcccgagtctcccgcaccaggaagatgtcctggcagagcttgaggatgcggtccacgcacggcagctcctcgaacataatggagtgcgagatctcgctgaagaatccgcgcacgaacttgccgatgaccagcacgatggacacgtacagccccatgatgctgcgggggaagctggtgagtcctggggccgcccggagccccccgagctgcggggtgcccccccagccactcactcacccgtagccagccaggaagccgaggctcggtgggctgaccttgtcactgaaaatgaccatgggcagcaggttgcagtcggtccggcactcctgcagctcgatgacccaccattcgaggaagccggtggcccccgcaccctgctccctccgcagctggatacgcacgccgaggtagtcggcctcctcatctgggatggagggagaagatcgttgaggccgcaggtcacccctctctagcctcccccaacccccacgcccatactcactgggctgcagctgcttcacagggttggcttcgggcccgttgggggcacggatgtacttggggaagagattagggatgaccctgcagggaggtgctggcaggtcaggcctggcccagccaacctggcacagccctcctgcccaccacccgggcccttcactcacacagactggtccgaggtgccctcgagcaggctggccagctgccgccgtgcagtgctgttgggggccagggccagcatgtgcttctcgttggcatactccacagtgcctcccttcgccaggtccctgggggtgggaacacagcgtgacccactgtagtgggtccacccacccaggcactgccccaagtccaggacgaacctctggaagttccaggtgaagcgcagggtgatgtcggccgtgccgttgtagagctcccgcttcatctgggcacggctggggggactgatgcgccacagcgccccggagctgccctcaatctgcgccgtgacgatgtcctcagggctgtactggctgatgaactgcatggccagctgggtacaagtgacaccctcagtgactgcagccgcctccccacaccagctttcacagggcagaggccacttaccggctgggggtcaaactgccgggacagctcctcataggcctgggccgtgaaggggatgatggacggctgctgggcgctcatggtgaacagcggctggggcaggcacggggacacggggccacgaagatgagcgtggaggagcggctgggggtggtgcaccaccttggccagaacccccaggggatgggaatggacaggcggacccacacatgctcacctcatagccgcccagcttcagggtgacggtgacatcgatgggctggttgacaaccccaaccacggagcgcaccagcgacatgaagagcagtgggaaccagatgatggcgatgaggaagaggatgatgaggccacccatgccgtacttgacgatcttcttcttcttctgccctttgggctgcgggtatttctggaggggaacgacacaggtcatacgctcagctctgcccttcctgcgggtcacacaaccgcattctccagctcacccagcagcccagaaaagccccagcctgacctcagtatggcacagcggtagtaatggtgggcagacacaggccagtggagtagaactaagagtccagttggaaccctcatgttcaggggtcgttgatcttagacaagggagctgtgaccgttcagtgggaacggacaacctttttcaacacggtgcaggcaccgccccaggcaggagaatgaaacgcaactcctgcctcataccatgtgccaaaatttacctcaaagtggatcaaagagcgaaacttcagagctaaaactatagaacttttagaagaaaacgggcaaatcttcatgaacctggatttggcgaaggaaacaaagtaaaccagatattaccaaaataaatactttgtgcttccaaagacaccaagaaaatttaagagacagtccatagaattggagaaattttctgcaaattttaattgataaggttctagcaaccagagaatacagagaattcttccaattcagtcatttctagccaatgtatctgcagaaaaacagaaaaaactctaataaaaaacaacccaactgctgggtgtggcggctcacacttgtcatcccagcactttgaggtcaggagtttgagacgaacctggccaaaaatacaaaagactagccaggcctggtggtgcacacctgtagtcccagctactcgggaggctgaggtgggagaatcgcttgaacctgggaggcagaggctacagtgagtgaaggtcatgccactgcacttcagcctgagatcctatctcaaaagcccaactaaactatggagaaaggatttgaatagacatttccccagagaagatacacaaatggccaagcacatgaaaagacgctcagcgtcggtcaacagggaactgagaagagcccacagcaagccacccgttcagcagcatggccagaacaaaaaagacatagtaacaggttgttgaggatgtggagaaaccgcaacctcgtgttggtggtgggaaccttagatggtggagctgctatggaaaaccagcagctcctcatgat

SEQ ID NO: 1886636 - DNA, 4001 bp, Homo sapiens
agaatgccaagctaagtcaaacaaaatgtgtctgcttggtaaaaaggaatctaaaagaaaaatatacatataaagaaaatgtggtcaagctcgttggctcagccctgtaatcctaaagaggccgaggcgggaggatcacttgaggctaggagttcgagaccagcctggccaacatggcaatatcccgtctctactaaaaacacaaaaattagccaggcatggtggtgggcgcctgtaatcctagctactcaggaggctgaggcatgagaatcggttgaacccgggaggtggaggctgcagtgagccaagatcctgccactgcactccagcctgggcaatgaagcaagactttgtctcaaaaaaaaaaaaaaaaaaagtaaaaaggaaatgtgtctgcattctttgatgttttctggctaaaaactattttttaaaaaaagcaattagaaacctacaattaccttgtttcttaagatttttagttaatatggcttgtgttgaaacatactcaactgaaataaaatggggaaaaaacacctctgaagagtagcgtatttgtttggtactttgaaaaaagccaaaacgctagaaacgggtttttcatctattctaatctccacttggaaaatactacctatacacagacataatgaagatttttttctttttctttcttttctaaatagtgatagggtttcaccgtttcccagtctagtctcaaatttgtaggctcaagagatcctccctccgtagcctctcaaagtattgggaatacaggcctgagccactgcgcccagcccacagtcaagatttagtcagcagtaataaatacctacgcagggagaggatgtgtgcttgtcatctgccttctggaaaattaaatacaggcacaaaggattcttcagctacatgtctgatcctgccctccacaatacccgtctacagggatgtttacagggatgtgttaatccccacgtaatggggattgcctattgaaataacctcccagtaaggatttttttgggcaaaatattctcgtttggcaatttcgacttactgattcttttgcaaagtcaacttgtttctgggcaaactttaaaaataaactcctaaggtagcatttagctagcagctagcacatcctaaatcgtgtctagatttaacttacacaatatgtgctttgcttttttcctaatttgcaacagaaaatagtaatcagctggtagtttcagaaatcacccttttgctgagtcttaaatttttttttattccagggaaacgtgaagattgtggggcgctatttttttttttaaagcaaaccacacagcatatctggccacctaaaacacaaagtgtttgaaactaaccgtaagatttcctttctgctcgcccaacctgtcactggaaacgcagtattcatttgtaaccagctttggagcagggcttttaaaaataacgttttcttgctaaagtccccaaaaatctcttgattcttggtggcaatgtccagttgagtctttgcacacactgtatttttgccaactgggtcgcaactttgcgagaactccgggggacctcgtaggaagccaggttggcagttatttttttctccacttgccactaggttgcactagatttaggatgctggggaatatgcgccatttaatttttaaaaataaagtaggaccatcacgtgacgagacccgagagaggaaaaaaaaaaagccgaagggacagggtttttcattgaaatcccgttcaaatcgccttccctccaaagcctgaaagagctgaattctattaaatcctggttggcaggttttttcctcgggtccacgtcacgagctcattctccgcttcaaggttcctttcgactccacaacgtgaagccagggggaaggcctccttaaactgggggttttcgccaaaaaagccagggtcaccccccgggaaagtccctatttaggggtttatcgggaggggactgagcctgacgaggctgcagggccgcgaggccccgccccccccggggttcccagcatgccccgcgcggacaggacgcggcggcggaggcggggcgaggaaggggcggggcgaagaggagagaagggcgtcggttttgcgacaggggcggtgcggtgcggaagcggaagtgaagggtgcgcttggcggcggcggcgggagctgcggagtcgggaatcaaaacaaagggcctggggggggcggggggaaggcggcggggccggaatgtgagcggaggtggagccggcggcagaggtgagtttgcagacagtcctgcgaccagaccccggcaggctctgctccgaggccagcggggcgggacggaggacagtgtcccctctttccccgcctattgctggtgggatggtggtggagaggggaggttagctaactgggacgcgccagttgggccccccacgaaagagttggcttgtctccctttcgggtccattcactactgtcactgttggcgccgctgttccccttcgagggcatttggctccccgcccgcccctgtctgacccctggtggggccctccaggagtgaagtgcacagctggaaggttaagagagaaggaaaggggcgggtgtttttgcaacacactcccccctccccggccgttttgcattctcctcggccttttagcaacacatagggtgtagtctcagggttgacaatgtctagggcttcagccactctcactagtagttgtaacgcgacctcgtgatacaccttttagagtttctcaagcacctttccggtattaccaagagctgtccaattgcatttgtgtcttttggacttctctgagcggtaaatattcttctcttttgcatatcggtgtattgaaacctaaactgttttcctatttattaagctttattcgttcaacagttatttattaaaatatgccaggcattgtactaaggacaggagttggaatagtggataagaaaacatagtctctgctgtcatggagtttatagcctaatgggggagaaagataataaaataagctaaaaaggccgttttggacagaagagctatgggggagaaaacggtaatgggatggggtggtgtggggtcaaagactagattgggtgctaaggaaacaacatttgctaaatgttccccgtggattacctcatgtaatccaaacaacggccttgtaaggtggtttctattattatcacacccattttagagatgggatctgaggttcagagaggttgtgagttgtccaaagctgcaccgcagtcaaattggagaccaaaatgcagacagtcgacagagcctatgctctcctcattgaattggtcaaaagacttgaagagagtgacagaaaggagactgtcgctcaagtcaaacagaacctgcttttggctacctaagttgcttcgtggatggtatttgggaagttttcagggtgcaggcacctgaaagtttttacttttaatcgcttgtattgagcagtattgaaggcaccttgatgtagtggaaaggggtgaacaagcctaatcttgtgtcaggctcgctacaaaacttcattaagtttctttttctctctctgcaaaaatgtagctaatttctcccctgtctatttcacaggattattgcaaaaattatataagaggatcccaccgtctgggtttttttcatcattatattccttgtgccaagcacaggcctgctgcatagtagatactaagtaaatatttgctgaatgaagacataagtaatgttaagtgaaaatactttataaactagattatactgtgaatgttagctcactttcaggatttggctttgaagaagtttgagagaatgtttaagttatgaacactgtgaatatcacagattcttacgattttgagaggagttttttgggggacataaaacctgtatctaataggaaagacaagaatcgtaatttactatcagtggtagcagttaaatccatctccaaattaaccactcc

SEQ ID NO: 1886637 - DNA, 4001 bp, Homo sapiens
ctggctacagccaggtggggagaggccctcggtggggccggggctctctagcagaggggctgggtgcctgcattctgtgggggctgggccccagctgactcctgggcattgtgggtgaggcagggtagcccgcccgccaggggcagtgccctcagctctgtggagctcaggctctcccatgccaggagaagcacccaacgtgtagcttcagaaaggaaagggaagtggggagcttttgagattgaaaagctgcatggcagctgccaagccgggggcgggggggtggggcatcccttttgccttgagtccaccaccaaacctggtgtcagctgagaacgtgaaaagccacctgttggcagctgggccgtgatgttcctgcctgaacataaataacacctgcagaagatggcagagacaggccagggccctctcgacttcactggggataagacagcgaccaggccgctctgcagccacagaatgactcaatgtccccctctttcaaccagcgttgttcattgctgttcctttacctgtgacaactctaaccttgctttaaccttttgagcccctaaaaaaaatgaagatagcccagcactgagtgacccctgcttcctgactgtccaacccagtgtgggacccacttccacacccttctcaggcccgcccaacacaagcccacatcctgttaggagcccatccagcccagctcaactccttatgagaggccctcccattcccctagggcacatgccatcctgggccgcagcttgtcctggtgggctctgccctaggcaagcagctccctgggccatctccagattccccacccccatgactggagcagggtctacacgtgagaatcacctggagagctctccacaaaatactgatgtcctggcctcgttccagtccgcgaagctagaatctctgacgatggaccctgggcatcaggatgatgatgatgattattattatttggaggtggggtctctgttgccgaggctggagtgcaatggtacaatcatggctccctgcagcctcgaactcctgggcccaagtgatccccctgccttagcctcccaaagtgcttggattgcaggcatgagccacatgcccagccagcatcagttttttgttgtttttttttttttgtttgtttgttttgtttttgagacggagtcttgctctgtcacccaggctggagtgcagtggtgcagtctcagctcactgcaacctccgcctcctgggttcgagcaattctcctgcctcagcctcccgagtagctgggtaattacaggcatgcaccaccatgcctggctaattttgtatttttaacggggtttccccatgttggtcaggctggttttgaactcccgacctcaggtgatccacctgctttggcctcccaaagtgtcgggattacaggcgtgagtcactgcactccgcccagcatcagtattttttaaagttcccctggtggaccgcacatggtgtctcacacttgtagtcccagaactttgggaagctaaggcaagaggatcacttgaggccgggagttcgagaccagcctggccaacatggtgaaacaccgtctctactaaaaatacaaaaattagccggatggtagtggtgcgtgcctgtaatgctagctactcagcaggctgaggcgggagaatcacttgagcctgggaggtggaggttgcagtgagcctagatcgtgccactgcactccagtctgggtgacagagtgagaccctgtctgaaaaaatagaaaaataaatgaataaaggtcccctggtgatttggttgcagccagggttaggaactcctgctctagaaagagagaaccttcctccaagaatgtattggtctccagtttccctaaagaacagtccagccctggctgtgctcctagccagcctcatttcctaatcctcctagctcaggaaggaggctggctgggtcacgttgacactctggcatgtggacctggcgggtcaggtctgcgtgagtgcaggaggccacggtgcctgagcggcagttgagggaagtggggctgcgtcatcacaggggcgtggtcacatggtcgttgcttctgttgtgagttgtgctgagagtaagtagagtttttccggtcagagccaagggctcccctcagactgtgggtaggagttgcaggagaaaggctttgagtcagtaggggaaataactttctagcctttttttaaaaattgttttagagatggggtctcctctgtcacccaggctggagtgcagtggtacagtcatagctcactgcagcctcatcctcctgggttcaagcgatcctcccacctcagcctcttgagtagctgggactataggcatgtgccaccatgcctggctgtttctagcaatttgaggccaataagagcgggccacctccagccctgggtatggccaaacggaggcagattggaaggagctgtggacttgacagagcgacttttaggctgagcattttccggaaaggagagtggcctttcagaggccccaaacggtttgaacctgttcataaaaggcgggagcatacaggcctgggtgtccccttcctgttatgcactggggcacaagctctgctgtgacacatccagcgctgtgcccaagctcagcacaagccacccaggtgtgtgggtgcagcccaagctccttgcaggtgagggcaggttgggaagtgtccacgaggctgggccagcagctgagtttgggcagaggttgttctgtgctctggtcacacgtacaggctgcagccggctgcccgcccccgatagtgggggtggggtggggtggggtgggatggaagctcaggcctcgtttacctgctgacctgaggttgtcaaatggtttgcatggtggagaggcaggtacactccgtgtcaggcctggaggctccttgtcagtggccaccgctttctcttgtttcttttctatgttctctctggtttaaccacctgcgacgttccaaggcagcttctaagatcaccttcacttctgacacacctgcctagctcagggggccccaggacagcgctcagtttcagtaatttgttagaagaaccgcagaactggcagccgaaagctgcactcacagttatagtttattacagatgcaggtttaagtcagccaaggggagggacccatggggtgagcccaggagggttcccagcacagagcttcgagctgtccctctccgtggagtcctggacagtgttaactcctcatgacaacagcgtgtgatggcacacagcattgccaaccagggacgctccgccagcctcggtgtccagagtctttgctgggccttggtcacgtgggcacggctgacaccatgtgactgaccttaacctccagcacctccgcacgtcaagctgatgccctgtggttcaaggccccaccatgaatcttatcattagcataggctgttcagggtggctaagccctcaggtaaacaaagacactctcatcaggcgggactcttcaagggcctagaggtgaccgccccaggagccgggggaaaggtcagactttctgtgagttcagttaatccttcactgtacaccagtacttgggagtttgggaatttggattcagctgtgaagctgatagcaggttctagatcctcaggggcgggcttggttatttccctccgggggctgtgccggcagcgtggacagcttccaccaggcaggagggaggtcaggtgcggttctgtgggcaaaggagggacttggtcatggacttcagaagactccgagtaagtgtctgcatttcggtttccttgtatttcacctagaacgctgagctgctcttctctttgaattccaaagagacatctaaaggaagccctcagctctgaagaccacctagctggaatctcagagggagagctggggacaggaaaggatgactactcccaccattctgtggacaccgagtccagcctccgggaggacgctga

SEQ ID NO: 1886638 - DNA, 4001 bp, Homo sapiens
ggagctcccactgtgcgctcggcgaggatgtgtttccctatgccacatcctcacctgtcactcagcgtcaccacccggccctccacaccgtgccacatcctcacctgtcactcagcgtcaccacccggccctccacaccgtgccacatcctcacgtgtcactcagcgtcaccacccggccctccacaccgtgccacatcctcacctgtcactcagcgtcaccacccggccctccacaccgtgccacatcctcacctgtcactcagcgtcaccacccggccctccacaccgtgccacatcctcacctgtcactcagcgtcaccacccggccctccacaccgtgccacatcctcacctgtcactcagcgtcaccacccggccctccacaccgtgccacatcctcacctgtcactgagtgtcaccacccggccctccacaccaccagtcccccaacaacagcctccccagtggttctgccacagagcacgtcagacccctgtgttcactctccctcgttaggctggggttccatgaggtcacctggggtccctggaccatgcccagcacacagcaggcactcagtacaggtttggagagtacaggggacacccgtgggcatccagaggctgcccgccccaacccgtccagcagccctgtccccaggacaggtggggtggccctgacagcaaggaccccgcaggagtgagtcacagccccagcacagggacaaggaccgtggctctccacaggcgatgctcctacacgggaggggcctttgcccaggacaatgctggctctggaggccctggctttttctccgtttcctttttccttctgcttgctttgcctctggggacacagccaggcacagggagcagatccagaaatcagctggggagtatttatggagcacctactgtatgccccaagctgtcctgggagaggacagagctgcctgcatgtgtggagacccctctgcagactgggagggctgcgtggggagatcctctgggctgggcacgcacctctgaccctcaccacgtgagaggcactgcaccccacgttagggggtggggccctggccaaggtgatgtctggttctggtcggacggcccctccctacttcctctccttagatctcagcccagactctttctctcctcgccccgccactattttccacttacacatttttgacaaacacccacacctgtggctgattttcaggtgccgtgggagctgacagggcctccagccaggtctcaggccggcggagcctgcctcatcctggtcttgccagcaagacccactgtgcagtgtgggtggatgcagaacacaggtgcatgccccctaaggtgtcctaagccccctgtagacatggtctcctggcacatgaatttctgacaatgggaaatctggaagaccccaggtttccaggctatgccacagccacagacaggaggacccccagagaacctgccacctcagcctcatggtgtggaaggggaaactgaggcccaggccggcaaggggcttgctgaagagcccagaaaccatcctgggaggcagacctactagaccgccttccggttttacagatggggaggctgagggtgggcaaaggggttgggactgtcattcattaagatggtgccacgtccctggcccggccggcacttcagaagcttggcagaatgaggttccggatggaagtcagcgcggggagagggtggagcggtggggggcagcctgcaggagggtctggagtgggcccagacatgggggtgggaggctggctggccccagggccgtccctgccgggttgtgaaactcgctgttcccatctgggagtggctgctggctgcactcctctcgggaactcctgggtcctggtccccaactgaggccacgtgggtctgggctctgacggttggcaggtcatccagaggccagcctgtccatccgcctgtgcccagacagcgaggcccctaaaaggcgggcccttccagagccggtggtggtggtggcagaggtctcccgtcctggggcagggtccaggatgggaactactcccccaggtcaagggcagcccctggaggaggccctgcccccacacagcagctcagccaatccctgggcctcacccctgctcatttgcataccccatttccattggctgccaacaggctggttaggacagtggtgccctggccatgggggtggggctctggggggcggggccctgggggtatcagattctgggtgactggtcccagccccaagtctagggtcagaaagctgcatggggctggtggggggcttcagttacagtgcaggctctcccctttcctcgaaggctccctgacatccattcagggatgactctgagtgggaaagatactggtccaaggtcgtacagccaagaggccggcacagctgggacctggccccaagtcccaacccctctccaaggccggcctcttttctcctgtgggggcctgttgagagcgacttcttatttttggctgccttgtttcagggagggctatttgggggctttctttgcaaaatgatgatgatgatgactttcagagcaccccgagtgctcagctctccctctagatctggtggctctgtgcgccgcaggcagtgggctcgcgggtgcgtcgggacggtgggctcgcgggtgcttgaggggcggtgggctcgcgggtgcttgaggggcggtgggctcgcgggtgcgtcagggcctgtgggctcgcgggtgggtcaggggcagtgggctcgcgggtgcgtgaggggcggtgggctcgcaggtgcgtcagcggccggtgggctcgcgggtgggtcggggcggtgggctcgcgggggcgtgaggggcggtgggctcgcgggtgtgtgaggggcggtggggggctcgcgggtgtgcgggttgagagtgtgttctcacttttgttcctggcattagggtggggtgagataaggggaaggggggccgctcagctcgagcaagcagatagataacggcgatagcacctcctccaccgcacagcacgcatcgcccttttttatcaagttctcttttcttctttttcgttgtagggtggtagagtagaaaacaccccacccccacctcccaaagccatggaactagggggtgggggcctccccatctcaggtcccagccacaaagggcacgggtcagcttagggcccgctgtgcccaacacgcccagcagccagcccagagcccgtgactggaggagggaggggatccaaggcagctgcgaggcccggggtccggaggtcccagcatgacaggagcagctgcgcatgtgccctgcaaggcaggtctcgcggtctacaccatcagctccttgaaaggactctgagagggcgactggcaccccattttataggaaaaggcagcaaagcccagagaagtgaagtgtcactggggcgggtgctgagctccttcctcgagaagccctgggtgggcaccgctgggaggggtggggagacctcaggggggttggccatggcctgcagggcaggcttagcggtgtcggccctatttgacagatgaggaaactgagacctgagactctgggatgtgtgtgagaaccagggccatggggacagatgctgtaccccctgcttgtttgctgcggctcctggtctgggtgactgtggcaactatgggggactgacaaggggtagactcttggatcacagggacaaatgttctggagccactctggccgctgtgtgatgggacgaggccctaggtgacatcactgaggtcatcggcacactgtagccgttggcggaaaaccgtgcaggaagaatgccagtaggattcagggagggtgggctgcgggcagagagggctttggagaggtggccccaccccagggaccctcgccccggctcgtgtccccccattaataccaccgccgttttggggttcactgagccctgccgcacaagggccccagatgct

SEQ ID NO: 1886639 - DNA, 4001 bp, Homo sapiens
tcacttcataccccagggcccttgctcaggctgtttccaacacctggagtatcccctccacctccttgcctgaggccagcctacttctcacctcctccaggaacaccacctcccatgaagccatgctccaaccctctgcatctgcagtgctgccacttagcactacttggggtcctcatctctacccggtactgggatgctttctggtcagggcctaagccctcccctttttcataccctcctccagccttacccaggtgcacgtcctggctatcccatgggatttgtcccagaaatcagctccaagctccattctctaaagcagtggctcccaactggggctgcttttgccctctcgtccccgacccagggggcatttggcaatgtctggagacatttttggttgttacacagtgggtgtggcaggggtgctattgtcatctagtggctagaggccagggagattgctaaacctcctgccatgaatagggcctcccacagtaaacacttaccccactcagaatgttcatagtgccccaaggtagagaagccctgctctcaggaggcacctgctctccttcagagagggtgagctctggggttccgggtaattcgattctcaggacaacgcacatcctggctgggcggacctctccgcgcggcagcctccagcacctggagctgtctgcccctgacgcggagccctccctcgcccgccccttgtcacagcatccgcggatccctgcggatttgtatgaagcaattgacctgtgactaaggccagctgagctcgccttgttcccgcagggcggggacaatacccctattaactggaaggcaaggtcccagcacagcagcgcagagcatggattggggaggggcgtggatgggggcggggagaaaaagggcagctccagagctgtcctaggtcgggggcggtagtccctagtactaatggttataattagcccaacatgaatatcagcatcttctcctagatgcctagtacatgagagctcatgctgattcacatccctgatgagatgcctccacctgccaacctcaggggtatagtccttgttcccacttaacgtaagaggaaactgacagagatcccaggcgatttacccaaagtcacccagctggtagatggagaagtagaggcaggaactcggattatctgaattatggtttgtattaagcactcattctgtgccaggcgcagtgaaagtaccagatggggagtttgtaaactgggcaaatgggggtcccggaaccccagaacctgatgaaaccctggccccgcctcctctgagtgtcggccccaacaacagcgcagaagaggcccctttctaccaccaggctccacccccagcgccattgattggactgtgcagaaggggtggggccttccaagcgagatgagccaatcagaacctctcttcaaggaactggaaattagaacagtgtttgggccaaatagatgggggtgagcaggggaggaaaggtcttgagggagcagcacgcttgcctgatgggtgcccaaagccaggggcaggtggaggtgagagaaggacaagctctgcaaacgttgcggaagcgctctgtccatggagaaggcacaggacttccatgtggggagcagcttactcctgctgagaactttggggagacagagtggagcagccatctcagacctgagcggctaaggagctgggtccccctctgtcgcactgtgcagagctgctggactttgcagtaagcagccttcaggtctaaaggtgagtgcccaggggatatgggcggggcactgatggggtgagctacaccagatttttagccagatcattgggaatattctcatgccatcttctgagacacaacgtcctgctcaataccctcctagggcttcccaatacatttggaataaaataccaagagattatcctgttctagaaggccttagaggatcaggctccaacttttgcaccaacctaatacgcagctgttcctctcactacattcaagcctctgttcaaatgtcacgtgattattgagttcttcactgtatatcctccttacaatagaccctcctctcatctctcttcctgtccacctcctcatcctgctatcctgctatatatcctgctataattgataatatgtatttatttgcttatctgattttgtttggtgtccctaaactagaatgtaatctgctttggcctgtgcctggcatatgctagttaataaatacagtattggttagggagggaaggaaggttcagctgcttggatttaaatcttggctctgccacgtatcagctgaatgaccttggaagtcttcactctctgtgtctcagcttctcgtctgtaggacaggaataaataagaaagcaatgataataatttctatctcatggcattgttgtgggaatcaggtgaaatcatgtatgtacagcgcctggcagatattcaagtgtttaataaatgctagctgtgtttattcttggaccccaattaccccctttgtgaaatggggttgttgtaaaaattaaatgagatagcaaatgtaaagcgctttgcacgtagtgcaccctctataaagatttgtggttatttttcattaatacatgcacacatacacacacacacacacacactccatccatgaaggctatccatttgtgccttccccaagcagagttcccataagccctggaattagcatggatctaagcaaaacctagaagtcaatggttgaaggaggacagctccagcttagcaacttccacactcattgcctctgagctgatgccagcacagctttcccttcctgtgcactctgggagctttcccttcctgtgcactctgcagcccctagtctccaacaggcagcctggtgtccctacaaaacagtcccacacaagcatcggaaccccggctgctccccctccagagcccagaccaccaggctgagcaacaaccgcgcctctgtgcaatgttgctccttattaggcatcattaggtacacagtaattataataattatgtgcactgcttaagcgaccatcctcagtaacaaccactgctattcagaagtcataattgctgcatcgagacttaaaatgaaggctaattagatgtcagttgctaccccccccaactcacagcctcctacataatctctatatccaaaatgccccatgaccaccagctatccttgattaatctgcagaacccaaaacaaacaatttggtccacaggagagcgtggatatgccagcgggattaagagggaacatgtggatgctttgggggggaacttgcaggacttgcatcatttcaaaagaaaagaatttgggatcagagggtggctgaagaactcgggccgagagtcaggagatggggtctaagtcctggttctctcagggtcttgatgtggtgttgaacaggtcacctcttcctccatctgcaaagttggaggaatggacctagggatgcattgcaggggccactttgtaaagtatcaagtgatactttataagggagcaataaacaaaacagatgcaagcagagcctttgattaaggcaaaacaagaaggtctggagactccctgtccttatcctatctgccagcaccctctgaaataactctgcaaaccactgggtttcctgggagacagattggaaactgctggtgcctgtgctctctaaagccctggttctcaaagttggccccacattggaatcacctgggcagattttaaaactgttgatgaccaggtttcactccagaagttgttttctttggtctgtgctgtgacctggatatcagggttttttaaattctcccagatgatcctaaaatgcagccaagcgtgagaagccctgttctatatgccccgacatctgaacattgaaagcatttacgattctgctcggcctagtacaaggcttcccccctctgggcctcagtttccccattttctaaaatgaaag

SEQ ID NO: 1886640 - DNA, 4001 bp, Homo sapiens
tcagaggccaggcgcggtggctcacacctgtaatcccagcactttgggaggccgaggcggtcggatcacgaggtcaggagatcgaaaccatcctggctaacacggtgaaaccctgtctctactaaaaatacaaaaaattagccgggcgtggtggcgggcgcccgtagtcccagctactagggaggctgaggcaggagaatggcatgaatccgggaggcggagcttgcagtgagccaagattgctccactgcactccagcctgggtggcagagacagaccttgtctcaaaataataacaataataataataatagtgttcaatgtgtgaattacatcattctctctctctgaaacaagggattcaacttacgggtcatgggtagatttcatggtagagaatctcctaaagttgtaggcaaaatatggtccctgtggaagcatttttctcactgtgtccattttaggggtcagcattccccaaagacagaaccttcgctttacttaagtaatactgcctacccctgcagtcgtcctctccttccattcttgtttcattctacttgttattaaacatacaccaggcctcctgtgccagtagttaaggacaccaaaccatatgagggaaagtctccgtcatggtcatttgggtctcacagtgccacgcatgcagtcagcatctcattcgtgctgccaaatggaggaaggaagtcagattccacttcagctgcggaaccccgggctgaaatgttgcctgtaatatctaccctggaatccccaagcagagaaagcagcatgagtctcagcactggaagcagatggaaccacctggaggtttctacagatcgtggtgccccacctcaggctacttggatcagtgtgtctcagttggggcaccagcatcggtatgttttaaaagctcccgggcctggctgggcgtggtggctcacacctgtaatcccagcactttgggaggccgaggcgggcggatcacaaggtcaggaggtcgagaccatcctggctaacacagtgcaaccctgtctctactaaaaatgcaaaaaattagccaggtgtggtggcggatgcctgtaatcccagctacttgggaggctgaggcaggacaatggcatgaacccaggaggcggagcttacagtgtgctgagatggcaccactgcactctaacctgggcgacacagcgagactccgtctcaaaaaaattacaaataaaaataaaaagttcccgaggcatgcgatggaatattattcaacaacaacaaaaaaggaatgaggttctgagaactgattttaaaccacgatactacattcaaactacaccatgagtgaacgtggaaaacacggtgtgtggaagaaggcaggcacagaagaccacttattatatggttccatctatgggaaatgtccagaataggcaaattcgtggagacaaaattagattaagcctgggcagcatagcaaaaccccatctctataaaaagcaaaaaaatctggccaggcgcagtggctcacacctgtaatcccagagattcgggaggccgaggcgggcagatcacttgaggtcaggagttcaaaaccagcctggtcaacatggcaaatgctgtctttactaaaaatacaaaaattagctgggcatgttggcacatgcctgttttcccagctacccaggaggctgaagcaggagaatcgtttgaacccaggaggtggaggctgcagtgagctgagatcacgccactacactccagcctgggtgacagagtgagactatctcaaaaaacaacaacaacaacaacaaaaccttttgtacacccatgttcatagcagcactattcacaatagccaaaatgtggaagcaacccagatgcccattaatgggtgaatggatgaacatgatgtggtttatattaggttggtgcaaaagtaattgtggtgtttgccattgaaagtaatgacaaaaaccgcgattacttttgcaccaacctaatacacattgctatggtctgaacgcttgggccctccggcaatgcatatgatgaaattctcacccccactgtgatggtgcattaggaggcggggcctttggaaggtgattagttcatgagggcacagccctcatgaatgggattagcacccttataaaacaatcccatgagaacgggttcacacctttcgccattaaagatccaacaagaatccttctttccggtctgtgaaccaataaacaggcccccagcagacattggatctgccagcaccttcatcttggacttttcagcctccagaactgtaagaaataaacgtttggccgggtgcagtggctcatgcctctaatcccagcactttgggagatccgaggcagacagatcacctgagggaaggagttcaagaccagcctggccaacatgatgaaactccgtctctcctaaaagtacaaacattgcccaggtgtggtggtgggcgtctgtaatcccagccactcgggaggctgaggcaggagaatcacttgaacctggaggcggaggttgtagtaagctgagattgcactactgtactccagcctgggcaatagggtgagactctctcttaaaaaaaaaaaagaagaagaagaagagaaagaaatttctgttgttgataaactccctagtttatggtagtttgttatagcagcccagattgactaagataacatgtagtggaatataattcagccctaaacaggaagagaactctgacacatgcaacagcatggatgtgcctcaaggacattatgcaaagtgaaagaagccagtcataaaaggacacaggtcatttgattccactcacaggaggtacccggagaagtcggattcagagaaacagaaagtggaatagtggttgctggggcaggagggaggggaaatgggagttgcttaacaggtggaaaggttcagttttgtaacatgaaaagagttctggagctgcatggcggttatggttgcacaacaatgtaaaaatgtacttaacatttctgaactgtgcccttcaaatggttcaggtggtaagtcatatgtgtattttattacaattaaaaattttcttaggctgggcgtggtggctcacgcctgtaatcttgttgcatgatccttggggtgctgcttttatggccagaaacctctgtggctggtggcatcttttggccaagttttgcttgggcccactgggctagttctgcccactcagcctggcaggctgtgctcggctcacactaccagcctggatcccacccttgcttgggcaagccaggtgtggcacagtgaggggtgtgtgagcaagtgcgcatggggtctggccactgtgcatagtcaggcacactggctgctacaacggggcagggaccaggtgcccgcacaggcgccagctctctgcgaggctgcggcgggaccaggtgtaccacaggcagcctccacggctgccactggggaatgcattggtgcctggaagcctggaggctccaggaaccacagggccccaaagagggagtcccagtcctgacttgggctcccaggtctgggctccctgaagggccacagctcttctctccttctcttcacccacaatatggcaagcaacgggcgtgtttctgccctgtttgtgttacagttccttcagccctgccattcggcagttcccgagttcttgtcttgcttccaagaagaatgaggtacgcagacaagcgtagggcgaacaaggtgatgaagagctttattgagtgacagaatagctcagaggaggccttggagtgggtagctgctctctgcagctggttgacctgacgtctgctcagctctggctgagtccggtgcttttatgggtctcagagaagaggaaatgcatgccaaacggtccatgggtggccgtgagtgggcccagaaaaggcaccacaagttcccactctggtcctgtgggactggcagcctggcccacagccttcggaccctccctgggtgaa

SEQ ID NO: 1886641 - DNA, 4001 bp, Homo sapiens
tcttatgaatggaactatctgtagtttcctgacagcatggctacagtccaaagtaatccccagttcagagttttacttttgtttttgacaagtgaaacagattttactttaagttttattttaagaagtaaaataaatatttcttcatagtccaaaggtctgcagttgggacttcggcagtagatatttataagcaggggtactctgaagaaacagaaagtactgccttatgaataaagattcattgcttcagaggtctatcatgagtcctatgggattttccaaatgcttagcctacggattcatgtgcacgcaaaaggtttagcatttatcatttaaatgtcccatgaggacatctcccttccactttgccctacacagcggaagttcctggtggctctttcttctttgatagcttgagcaccagtgccatttctcatatcagactcagagcgtacatctgattggtccaaaacaattatgacgaccccacttctcttgccagtgtttcatgcggggctggacgtgtaatcaaattctggagaaatgacatgagcagaaatcagctggggagcttctgggaaaggtttcctttctcagacacaggggtaccaaaaagtgatgtcatatcttgtttttccatattcttgttcttctggagagagttgattctggaggtgatgcctaatattgctgtatctgtttcatgactatggggcaaagctagcctgcatggaaaactgacataagataatagcaaaggagaaagataggaataaccagatcattggtgacatcattgagctactgaattacccaaccttggagccactctaccttccaaacttcctcctaggtgcaataacgaactattcttatggtgtaaactgatgcaccagagctttctgttgtgaccaaatgcatcctttctgactaagccctagtatattggcttttgaaatccaagcattggtcctggttatcaccctaaggagaaactagggaggtttctcaaaaacgatgttgtttccggccgggtgcggtggctcacgcctgtaatcccagcactttgggaggctgaggcaggcagatcacgaggtcaagagatcaagaccagcttggccaacatggtaaaaccctgtctgtactaaaaatacaaaaattagctgggcatggtggcacacgcctgtagtcccagctacttaggaggctgaagcaggcagaccacgagatcaagagatcgagaccagcctggccaacatggtaaaacgctgtctctactaaaaatacaaaaattagctgggcatggtggcacgtgcatgtagtcccagctacttgggaggctgaggcaggagaattgtttaaatccgggaggcagaggttacagtgagccaagatcacaccactgcactccagcctggcgacagaatgagactccatctcaaaacaaaagcaaaaacaaaggaacaaaaaaagggtggtgttgttgctaagccttccagaagttccttggtaaactgaattccctgttattgcctacgatcccatgatgtgacatcaatcaatgttgcagaggcataggagcctgccctagcctttagcatttgccaaatagttgacttcatcagccctctgtaccctctaataaagaaccagtggcacatcacaagccaatcaaaaactcctttgcgtggcagcgttccagttcttctgagacctaaactctgtttcaaacaaagtggctggagtttctgggattgctggcttttgtggcctgtagatctgaataatcccataaaatatcccttcaaaagaagagcacgagtgttctgaggagcatgttggatatcagatgtgagacccagcgtacgaatgaaacggtaatagatgatggaaagtgcaaggagacttggcaatcaacctattagattggtgcaaaagtaattgtgggttttgccattatgttgaaaggcaaaaaccgcagttacttttgcaccaacctaactaggccctatcttaacatcaggtgatgttacagtcctttcctcttggaaaaatttgtccttttattaaaaagtggcatggcttctcatacattagaggtatcttaggaatgtaattttttattctctgcaaatctatataaaagcaacatgtacccaacatggtcttaaggggataggatgaaatttagtaaaaaaaaaaagttggaactttacccattagtaactttactaagaatgaaatgggagaggggaggtccacagaataaagataagtcatattccacaaacaagtgctttgctggccatgcaactgttagcaggtcacttagataatccagcttttggtttactcacctagcatgggggtgctggacttgacccacagcctgtgctagattacactctgtcaatttggctaaggctggaattacacaaaggataaagatcattaaaagtgttctataaaccataaagcactacgtaaatgagacttttttttgagatggagtcttgcttttgtcgcccaggctggagggcagtggcacgatcttggctcactgcagtctctgcctcctgggttcatgcgattctcctgcctcagcctcccgagtagctgggattacaggcacctaccaccatgccctgctagtttttgtatttttagtagagacagggtttcaccatattggccaggctggtcttgaactcctgacctcagaggatctgcctgcctcagcctcctaaagtgatgggattacaggtgtaagctactgcgcccagccctgagacttgttttaaaagcaaatgaagtggccagagggtgctcttcctacatggactcttatgccacagttctaaagggaagatggattatcaaactgggccatgaggcagcataactaatgaactattatgataagcagagatctcacttactgacatgtcctggataccatgcactgagctaagtgctttacagacattgccttttttttttttttttccttttgagacggagtctctctctgttgcctgggctggagtgcagtggtgtgatctctgctcactgcaacctccacctccgggttcaagcgattctcctgcttcagcctcccaagtagctgggattacaggcatgtgccaccacatcagctaatttttgtatttttagtagagatagggtttcaacatgttggccaggctggtctcaaactcccgatctcaagtgatacacctgcctcagcctcccaaagtgctgggattacaggcgtgagccaccgcacccattgacattgtctttaatacccagaatgacctcacagaggaagcattttctgatgaggacactgagactcaatctcaataattcttgaggtcacacaacttataagtgacaagccagggtgcaaactcctctctgtcttgcagcaaacatcatgtgcattctaccccactctgctatatcaaccagaaaatcagagataaagactaggtaggagagctcctttatgcacattaaattattggccaggtgggatggctcatgtctataaatcccagcacattaggaggctgagacaagaggaacacttgaggccgggagtttgagaccagcctggccaacataacaaggccccatctctacaaaaaaataaaataaaaaaattagccaggcctggtggtgtgtgcctctagtactagctacttgggaggtagaggtgggaggatcatttgagctcaggagtttgaggttgcagtgggctatgatcatgccattgcactctagcctgggtgacagagtgagaccctgtcttaaaaaaaaaatttaagacagtaaaaaattgttttaattctattcttctatctatttgaataaccttcttcttatcagagcagttgtgccaatgtttgaggcagaaatatatatatatatataaaacatatatttatgtatatatagtcaccatacttatacctacagataaaaatagtttt

SEQ ID NO: 1886642 - DNA, 4001 bp, Homo sapiens
aggaagcgagctgctcaccagcctcctgctcccctgcgctcactcagaaaacctttcttgagctggagccagtctcaggcaactgaccctgtgggccccatctggacaggagggaggcctgtcctaggagagcagggacagcacagtcccctcccgtgggtgctcggaagagaagagaggaccctgcagagaaaagcaaacgtccctgtcacagaggctggacagctggctctgttaagccctctccggggtttttccagcacacgccaggggatctccagagatggtatcgctgaaccgccccgatccgctgccagaggagtcaagagccccgtgaggggtgccgggggccctgccctggctggcgaggcccactaaggagcaagagctcccgggacacagctgccagccacgtgccaacctgagggtcccatcgcaagggtgactgtgggaaactggcaccgatgctcttcccgaaatccaccctgctggccttcccgagtgcagctgtgggtcctgggtccccctgtgttccgtccactcatgatggacagatgctagtacaggatgagcagctacggaaaaggctcccaggccaggtgcagtggctcacgcctgtaatcccagcactgtgggaggccgaggtgggtggatcacgaggtcaggagttcaagactagcctgcgcaagatggagaaaccctgtttctactaaaaacacacaaaaaattagctgggcgtggtggcgggcgcctgtaatcccagctacttgggaggctgaggcaggagaatggcctgaatccgggaggcggaggttgcagtgagccgagaccgcgccactgcactccagccggggcgacagagcgagactccgtctcaaaaaaaaaaaaaataggctcccagcccgcgttcccctagagggagggaactgcatttaggaggaagactccgatgggagggccccaggaaagaggagcaagaagtggtgggaaggagggagggcagcaccagcagccacccccagggacagcgcccagccagggctgactgcatctcggccgtgggtgctggctccggccagacctcggcaggggggttatcatgtccagggccactgaggacagcagggacagggcctgctgcggccagccagaggctcttgggaggaacgctcacctgccactcccaggtccggcccacctcagggcctgggcacacgtgaatcacccagtgcagtggccccgaggacgcaggtcaggtcagtccgtggttcccatcctggctccctgtctgaataaccgggggggggggggggcgtgcaggggcactgtcaccaaggagtgtgcccaggccaggccgagggacagcagggtgaggcccccgcagagcatgccgaactctgacccctgaccccagggacatgccctgggccgctgctgctcctgtagggcctgccgccggccaagcatctgtgctgctcccgtgagctgcatgtgccccccgggcctctgctgtgggccaggctgtttcaggtgctcgcgaatgggaaccagcaggagccgtgaccacagggctgactctcagggcggcgcctcaagagtggccgtgactcatgactgccacagagccaggctgcagccacgcccgcctctgggctccctggaggggcagggtgcggagggccccgggctgtgtggatccatgcctgacccccacaagtccaactgtgcagctccccgccctccctgggagccgatgccctagttttaaacggggcggtggcctagatccagcctcagagaattgcagaggtgaggccgccactgccctgtggggacaagtggttaatgagcagggccaactggccggtccctgtcctgtatgccacacacacaccccgtgagggcagcaaggagcatccagccaggggacgtgcacgagaagggccaggatgatcacactgcccggggctcagcacagggctgagtcccggaggtgaccattgccgccccgctccatctgcggccactgaggtctgctgggggtctctggtgctggccttgacagcccacccgtggcaggacagggtctcgaggtgcctctcggtaggtggtgggctcagtgggggtgacccgtggggacggaacgcatgctcctgaggctccagtggatgcaggcaaaggcacctcccggggtcagcgtccctacctggggagctgggagcccacatgggagcagggctggcacagcgacccccagccttgcgcgggcggcacccacagctgtgtccactccgcatacactcctcactgtctcgctaactaatcatgtacacggctgtacccccgagccctcccctgccccgcaggtgacacaggcgtgtcccactcacacagcacctgctcctgggccctacatctccgtcaatctttcacagagccatcttgccaccatgggaaccacagcgaccccaacaaggatgccccggtgtcacccctgcccgagctgggggtgtggggggcagcagatggaaagcgggggcccctgtgtccaggcagctggtggcctggccttgccccacggcaaccccactgcgccctaaaactgcacccaccagaccagaggctgctggtccaggcaggaaacaagagccagccactaccgggacgaagctcagtcggtgcccacaacctgaagacaggcaactctgcctttgtccccactgacgctaaggcccctgtggaggagatgaccccaaggacaggaagctcctgcatgagtcgggtgggagggctgaggacagggcttcccatcgtccctacaagaaacaaggccagggccccgccctgggggaggacgtggactccgaccgcccgccccaaatgacaactggcaggacagcattctccagaaacaggtgcaggccgctccccagggaccaggcaccctcctggctgaggatagcggtgggggccgtgcacaggctcctcaccagccccagccccagcgctgccgtggggatggggagctccatctgggggccggggccacagcacaggggaggtccccaaagggacaaacacccctgtcgggaccccgggccgccctcaccgtcgcctcccacgacaggaccacggcccaaacggctgggagaacgaggctcttcagggcaggcagggctgccggcctccaggggttctgtgaatcaagggctccgagaggccccccagccgtgggcactccaaccctgctgctccacaaacagttctgcagcgcaagcaaacccataaacgagccgcagggcttgggaacaaactcacctgaagctgcagcaagctcccaggccctctctgtgccgcgtctgggctgctgcctagaaagggaggcatttaatcaggcacctcagcttccaccaggaggactctgaccctggaacacagagccccgcctccagccctctctgcaggagccagagtcccgggaaatcagccccgggagacccttcgccttagaagctgtccgagcttctgtccttgggtgtctgtccgagcgccaaaggcagcccggggagcagcaggggctcagcaggctcctcactaccctggtttaaggcccttgacctgtccagtgcggtcaacctccggccagccaggaccgcagacagggccattcaagatcctgtccggacctcccacggcccgaccctgctacaaggagcaggccgtgggcaagagtccatgagcggggctgcagagcagcaccagccagggagggcggccgagcttcccaggcactgccagggaaaggtgcccagcttgggcaggcacaggcacacagccaggtggccacctagactcccccggaccccagcccgagtgccacccggccactacagctgtcagcagggcggccactgcttcgagccaggcggctttgcttctctaaggtcatgctctccatggcggacccactgcggtgggcaggatgctcacgcttcccgccc

SEQ ID NO: 1886643 - DNA, 4001 bp, Homo sapiens
ttctatgaaaacagagacttcaagcagcaccactatctcccctattactactccattcgaggggtcctcaaagatggcttcacctatgtcctctacatcaacggcggccaccctccctggacgattttatatccttaacttctgggggagagggactgtggcttcctgtccataaggtggcagagccagtgagcaagttggagctgtggtccccctcagatgatgttcaggtggccaagcttatggatgcttctctcccttacctgatcgtgttgtgggtaaacctgacacacatttgggtaaatcgagttgcacatattaccatgttgcccaggctggtctcgaactcctaagctcaaatgatccgcctgccgcagcctcccaaattactgggattataggcatgagccctgcacccagctggagagcctcctgctccacttgcactggggatcagcagtgcacaaaacggacaggatcccctgtcctcccagagcctgtgctagcagaggggaaacaagtgcggagagaagagatttttactttttttgaatacttgggttcaaaccttccttataggatgcatgacccaaaggtatgcccttccctgcttcttcctccttaactttcactggcccctgacaggtcagagggaagccaggaaactttataatagtcagaatgtggcccaaaaaaatgctgtgcgtgtgtgtgtgtgttttcaaattcatgagtctaggatttattcattacatagaataataagcaggaaagagaggggtgaccccacactccacaggccgtctagcttatgtgaagacaggcatccagggggtcagcactgttgaccccctccttgtcatatggacagggctctgtccctcttgctgccacaaaggttgagaatctagggagaaccagaagcacctgcccttctgccaggccccttccccaccccccgtgcatccctgggtgtggtgtccacatgcctgctgcctcactcagaaggcccttctgtccccagaccccaccctctgttgttttgcacagcagaggccacttcgtctcatgagcctttccagctctgcagaggcttagcgggctctcagcctccgaagcctggcttgccatctgcacacagtcccacaggccactgcgcgggcccctgatgactgtgccctggcgagcgtggtcagggcaagtcggaatcttccttaacagagccccacggactacatccagcacctgggctctgcactagccagcctgagcccctgctccattccgcacagagtctaccgccaggcccacagcctgctctgcagcttcctgccatggtcgggcatctcttccaagagtggcatcgagtacagccggaccatgtgatgtcggctgggcagccgccaccaggccccacccttcggccgcccgcagagcccgccttcctgtccatctgaccccttctgttttctgcaaggagctgccagccatctaactgggctcgtcggcctgccccagctgcaggcccggtgctacacgggctcgggaacagaacatcgtgggcatgcgcagagcatgcccatccgtggcaggtacgccacagcagacacaaaggtatgggagcttggtgcctccagccacaaaagtggaaggccctggatgggcacagagaacggcagagccggaaggggccgtggggactgcagagtccaccaccttatgcaccagcacagcccagaggtttggtgacttgtgccaagctaacacagcaggctccatggcaactgggctgtgcacccgactttggatccatcagtgcctttatttgtgtggggaccgagaggcgcctagtggctgcaggcagacaccatggcctggagaagggctcatgctcctggagcacccaggcccagctgtgtggcccataggcagggtgtggggtgggcagagtgtctccgccgggccttcaccctgccctgctcttctctttcccacaggctcttcagctcccctccctgcttctggaaacctctgcctgctgccctggccctgcccccctgcgcatgcaccgtccccagggctgacccagtgtggctgcattcactgggaggggcctgccctcactgggcctctcccactccgctgcctgttcttgcagctccttcctggaaagctggaggggactttctcctgcaagggaggaacgcaagtattatggacacacttgaccgtaaaggcacaggagcctcggaacaagggggcgcaataaagggaatggcccgtccccttccagaaccagcccaaagaagcctggggggtgaggagtggcccccactcctccatgaggggctgatgaggggtgggcagcctgggggaggctttcctcgcaagcacagagctctgaggctcagccccctggcacaggcggtcacgcatcaggacggttcctactcctcagcaccttccgtgcagttaccagtgccctgggaggtcacactgcccgtcggaccttggcatgctccattcagctgacctgctgaggacaggcatcgccgagactccttgggtcctccccgccctccctcatgctgccacaagctgctgctccaaggcctggccacatgcagacaggaggaagctgagctcgacattaggcctcaaggctgccatctgtcttgtagggcctggccttgtgggcagggggcagtcctgtgccttgtgggccctcagcctctgagggcagagatgctgtcagtgccgcaggtgcatcacatacttctagcatcctctccaccctgcattccaaatgctgcttgctgcctgccctgccctccgatgcaggggtggggtggggggcggagtcccgcccagcatagctgcagtgtcacaaagccatggcagagggtcctagcggcgccaccctgccccagcctgaggaggagggagagggaggaacaaccctgggcagacggggcctcagggacctgtgtccttccgcctccagagctgcccagccacgggctctcagggtgctggggcagccccaggtcccctcttgaactcagctggggccaggggccctcagaatgaaggcaggcaccaggcaggagcagcatccccctccttgacggtgctggcaggagggccgcgccatgctgactgcttgaacctctgctgacctgacagtgctggcgggagggccgcaccatgctgactgcctgaatctctgctgaggctgcctgcctgccgggcccagctcagcgccctctccactgcgaatcagtggcgatcatgtgatttctatttctgccccacagggtaagggacgagtcttctggaaggctctgccatggacatttgtcctcgggctcagaggccccaccctgccccacacctgcccctgatcactgcagtgtccagcccagtgttgaacagattgtagcgttctgtctcattacgagcaaataaatagactttcattggagttcgtcacatcctgtttcccgcacccgcctggctgcacctcgggcctcaccctgtagctgaagttggcctcgagctacttgtcactggcaaggcccaaggatggcttccagataaaggggacagtggttttgtgtgattaaccctgtcagagaatgaggacctttggccaggcacggtggctcacgcctgtaattctagcactttgggaggccgaagtgggcggatcacgaggtcagatcgagaccagcctggccaacatggtgaaacctcatctctactaaaatacaaaaattagccgggcgtggtggtgtgcacgtgtagccccagctactcgggagcctgaggcaggagagcttgaacccaggaggcggaggttacagtgagctgagatggcgccattgcactccagcctggtgacagagcgagactccagaaaaagaatgtgaaactggggaagaggttctagagttgagaagcacattaggtccttttttcactggaaggtccccagcagc

SEQ ID NO: 1886644 - DNA, 4001 bp, Homo sapiens
gaacatgaagcaatgcatctgagctcctctggattcccaggacttgggttgggacatccgtgagcattatttctccatggtagctgccctactgatgaagcaggaggaggaaggatgtggcacgcaggagacctcaccttgaaactaagggaagcgccagaacttgcctctaggagagcaggtggaggctgatggagccaaaaaggttgggacaaggccggactgtaaactgctcgttcctttggcttgtctacttttgaaggaggacatacgctgctaggcaatgtcttgagtcccagcacaggcatctctaaggggcttccaagcaaagggaaagctgaccaggctgcgttccagctgggggaagggtcacgcttctgtgcagagtccccatactgtcctgctggtggctgagccaagagaactcagcccagtgggaacataaggcatggctggaaccccgagggtcactctgaggagaatccattcagacctgggaaaggtcccccagcccaaccctgagggtcactcagaggagaatccattcagacatgggagaggtccccagccagaccccaagtcccccggaagcctgcgggcagctggttccaggcttccgacttctggtgttaaatctttggaatgctgaaagggcctggttccaggcaaacgctgcccaatttcctctcccaaacttgccaagttctttctcattgttgcattgtcttgagaggtgagaaaaacagcccagggtgcgctgtgagcgaccttttccaagctccccttccccggcccagtttcttagggaaaaggagcttcctttcttactggaagctagagagtgagacctttctggtgctttccagaccggaaaagtcctgcttgctaccttccagtaagaaaggaacccaccccgtccctgccctgctgccaatgtttggggtaaacagttgccccgcctcctgcaggactttccagaacattggtgagaagagccgagtcccggaacccatccccgaaagaagcagacactcttgggaggagggtctccctgctcttatcttgcctgaagccttgtttgtggagcagcggctctgtctaatttttgctgatgggcagccactcaatttttaggcagaatcccccagaagatgatctgcgccgcgctgctctttaatgcctgctaccccatcccaggggccagtgacagcaccttcaggacgttttcatgacactgtctatgtacttacatgcttggcctccccacaatgaaatgctagcagaaagggcatcaatggaggaaatgggataaacaggccctttctgcaacgagggattctaataacatggcagtgagggagctcacgctgaaaacacaaagcatccaaaacacaccaactggacccacgctggaaggctgggcgcctctgtctgccaactcaacctgctggtagattgctctgtctctgagctggggatgaggggcatgggcctgaatgtcctctctgccttccttgaaggatcaggtcagctccccgaggtctgcaagaggcattgattcaaattctaacaaagtaagagttttacaaagagctccttagaagacagagagagcggaggaggaggaagagaagaggggagagacacacagagaggactgggggacaggctcagaggtggtgagaggcctggaggaaggacctgcaagagaagcccagagtgagccacagcaaggactaaagagagagaaagaggagaggcaggaggggacagaaggggaaggaggggagagagatggagaaaaggcatgagagagaggaaaacagacacacatggatgcaaagaacctgaaagagacagagatggagagagatcaggcaggctggggtagggaaggggcactagccctctttgggccccgccattccccttgtctgtagagagaatggctgtgctgtaatgcagcagggtgcagactgcattacagcacagccagactgcaagatcgaagagccccctgtgatctgacgtgattcgccccaggaggggctcaggtgcctgcagtatgaggtcaaaatgaaaaggcctcgaggtcagcactgctccacagaacttcgtgtgtcaatggaaatgttctttatgtgcgctgtccaacacagcagcctttggccatgtgtggcccctggccactggaggtgtagctaacgggactgaggaactgtgttattaatttgatgagtaaattaaatccatctgtgggctgccatgcgtggctgctggtggctgtgccgggcggcaccatttaaggcactttcactcatctgctgactaggagcactaaggtaatgccgttcagatgggcacctggctgtttcttggtcccctctcccaccctggagcagggaagatctgtccccagggccaaaggggttgttctctgtgacaccacggctctgggatctaatacagtatgttgtatgtgaatcaagacaaagtacagcctctcaaagcagagggtcctgccacccgtcacaaaaggcacgtgaatacaaccaggactgaagaaagccctgagtaccacaccaggggccaagtgcaccccgccccagcctccctagaaccacacagactcgctagccctgtttatagaatgagccagctacataccacccatgcatcacggtgggcagagtgtgggggtgaggatgagagggaagcaagggagaagccgatccaggtctacctcccctgacggaaatggcagccagggagagaaccacagccgccaggggcaggggctgcacccacctgggttccccttgggggaagggttgggaggccgtgtctgctgctccctcattagctcggagtccggctctggatctgaggagttgcaagccgcctcctcctcctccttttcctctgcttcctcctctcctgctcctgcctctgactgcgctgtccacgggatcagggggcagtgagcaagtgggatgctggagcagctagaggctccccgcccgctcggctcctcagcaccacggcggcagctctgtcctgaagccctgccagacacggcggccaggcgagtcatcacagctgggcccgcggccacagccgggttaaagggacattccaggcactgcttctctgcttttcagcctcactgcccctccatccctgtggcgagtgatgctctggcctcctttggaggccagggctgcccctccagccccagaaggaatgaggcccctttgctggtggagcaggaaagtggaggctcagggcctcctctcctccaactggaatgtttcaaggggctccctcctgcctctctgtcatgcacagatctaggcccctctgccctgccaccacactgattcctctagtgtccctctaccccttcagagctttcagtggctgcctattgcctttggaagagggtctgaggcttcttcacttggctggcaaggcctgggtgatctggccatcgcccaacagatctagacatatccacagccccaaactccatctctccatctcctccagctgcagcaagtacccaggtcccccatattcaggctttgcacacacatcccctctgcccggggagtgtgcccccaccccaccattctggcacacttctactcatccctctacacccagttcaaatgccccctgtctggggagcctgctttggccccccaggccaaataagttcctccttctctgggctcccagtcctccacggttgcctctaatttagccattatttccgtaatcatttgtttatggctctgtctccccaggggctgaggggctcttcacgcatggggcctccccgagcacaggggagaggctgcctcaaagctctgtgactacagcaaagtcattggggtaggacaatctctggctaccctacctctccgttggccactgaaccctgtgattgcccgccccatctcccccgccgaggggggctggcactgaccacccccttc

SEQ ID NO: 1886645 - DNA, 4001 bp, Homo sapiens
gggcatggtggcgggcacctgtaatccccagctactcgggaggttgaggcaagtgaactgcttgaacccgcaggcggaggttgcagtgagccaagattgcgccattgcactccagcctgggcgacaagaaagaaactccgtctcaaaaaacaaaaacaaacaaacaaaaaaaagaaaacctactgaatctttttttcaataattacccccaaaacaagtttgaataatcctttattgaaggaaaaagccatatttatctaaaaatactaatgagtcaggaatatggcttctctgactggaatagcttagattttcatcctctttcgtaactccctacttcccagaaaaacaggtctggaacgtgaaaaagtatttcctatacgttgttcagaaaaatactttataaaattagaatttcttcactcacttgtaaagtatcaggtatggcttcaaaaagttcaagtagtttggtaaacccatagtacgcaagtttgcactgccggccaaagtggtgatggtaagaagggataaatttattaaagggcatccggaaatggggttggtgacgcagcaaatcaacgacatccttggagaactgttttgtcctttctatttcatcctgagtgcgttcttttaaaaaaaccaaaaaacataaaatcacagtttttttctacccatttgtgttcaacatccacactagagtaaatccttttgggaatttataaacgatatcatccttgccttccaaacacacacaacctaaaacaaacacatatactcttccctctttgcaagtggttctcaaacatgttccagggcagaacaccaggaagttatgatattattatattatgaaattcatatatattcatcttataagctagaaacaatgtcatcttataagctagaaacaattttctagcccctgccccatatctattaacatgacacacacccaggtccctgtacttaagcaagtactctagaaattattcccatgaaatcacgcttctgaatatccccactttttttgtttattcatctgatcttcagttaaaacttgctagcagaagagagaatcaggcttcaaaagttgaacaaaaataaacaggagggaaagcttaagctgagattgtttctattaatttttaagtgagaatgggccctggaattctatgatttcatggacatcaatgttctgcaggagcaccgtttaagaaccagataatagaaggaggatacgaccatacagtcaccccttggtgttctcaagggatcgggtccaggaccctgcctggataccaaaatccgcacctactcaagtcttgcggtctgccccgcggaaactgcagacacgaaaaattggcccccagtatccatgagtttcgcatccctcaaatactgtactttctacccgtaactggacctgtgcagttctgacttcaactattaaaatttgaaaggcaaaagaaaaaaaaacattcgagttgtcttcccttctcaagtgtgcacagtaaataaagtagctcagagttcaacagaagagcaaagccaacaggcacggtgacagattctcaactggatgactaaggctcatgtagccacagccaggctgcagaaggcatttgagcaaagtgctgatgatgcccctttttccccttagagtcaattctaaaaagccagcctgcttttgttcttgagaacagcttcacctactttgaagaacacagaatccaaagagcagcagttttcacactgtgctttctgtggaatcttcaggaagcacggacagggagggaaaaccacatcttccatgccacactatgttaaaataacaggagatagacaatatccttccagcaaatgttaagtcacatacctcttttggggatacaaatcaccatttcattatcttgttgggacaagcagatggttgtgtctggaatctctgatacgatgtcaatcaactcacaaacaccatattcagtgacatcccagtcctttgagaaacacctaggttttaacaacggaagtggatacggaatgagtagtatcatcggtagaagaactacaagttttccggccgggcgctggggctcacgcctgtaatcccagcactttgggaggccgaggtggacggatcacgaggtcaagagatcgcgaccatcctggctaacatggtgaaaccccgtctctactaaaaaatagaaaaaataagccgggtgtggtggcgggcgcctgtagtcccagctactctggaggctgaggcaggacaacggcataaacccgggaggcggagcttgcagtgagccaagatcgtgccactgggcgacagagcgagactccgtctcaaaaaaaaaaaaaaaaaaacaaaaaactactacaagttttccaaaagaatgcttaatagaaatactagataactatttagagtttggcagaagataaaatgtcctaaaatatttactttcatttctgttcttttcatcaactcaccagtgataagcctgtgagaattctctcacaatgacctgtttgctggcctgggatttgagaagttttagtaaatcctgagtaaagcgcttcacctgggccctgtgggtaagggtcagcagacgtttggagcccattccaagaatctgcaaagcaaatagtttatttatacacataagacctcagcagacagcgacttccttgctgctggctcaccctctcgttactagcctcagagcatgactccctttatgtagaatgtgtgcaatttgaaacacatgtcgatcaacaaaatgtagttggtcaaaaggaacaaatgtccaaggccttctgaaactcttatcgtttttggcctggcacaccttctcccaaacagtcgttgagtataaaaatgaaaagtgtaatcttttgaaaagaaaagtcgtgagtacagaaatgaaaactgtattggttgtccagacaaattggtctacaagtttttcaagccgtttttagtgagtgggaagctgttataacactgtgagttaactggtaaaagtcttcataggatccagtgctacactctagcccagtaacttgtctccaactagttaaatttagaagaaaggttaagcccttgactctcacataggcaccaacatacaagtatgtggctattcatgggagcttccttgtaatcatgaacagttctggagaaagctgtgctgggatgaagaaggtctatagagcttagagggaaaatactcctcagtcctccaaggagttcctctaaaactggaaactagcagcgttctgaaaaattgagaagccgcctgtgtgtgttattcctgccctctgaagaaagtttttagtggatgttctgcccagaactgacttcttaggaattaaactgtttctttgatggaggcagccaaagccatggaggaacattcctgcctgtaaacaagtaatcccgtgacacgccttacctgcaatacatgaggcactgcttctaataactcaatcagcttggagtatccgtagtctgacactcggcactgctttgcaaaatgatggtgataggatgggatgaaatgactgatgggtatgacacaagatggctggcttttcagcaagtcaatcacttctctactgaactggatcagctgggggttacctacaggactcttcgaacgcagaagccaagggtctagaagaaaaagaacgtgtataagacagaaagcacagatttcaccagctgaaagaagggaaaatggccctgcagtccctggcttgagttcgatcatggggaagcaaacaaaaccaaatacagtagctgctttacgtctcagtttctatattcaggtctcatagtccaataactagctaactaacttattcacgggctgtcaaatgctgtcccactaatcctcaaagttaagcggccaaggtaaagcagagtctactatagtgttatttatagcagaagtcaaagtacacaagaagctcccagtttagaaactagttat

SEQ ID NO: 1886646 - DNA, 4001 bp, Homo sapiens
gggagaggagaggggaggggagagaagggggagaggagaggggaggggagagaaggggggaggggagagaagggggaggggagaggggagaggggagagaagggggaggggagaggggagggggagaggtgaggggaaggtctaggggaggggaggaggggaagggctaggggaggggaggggctgggggaggaggcaggggctaggggaggggggagggactaggggagggaagggggaggggaggggttaggggagggaaggggaggggaggggctaggggagggaagggggaggggaggggagagtggagggcacagagcagcatcttcttagtccctccccacatctgggcccctctttacaccctgggtcccccgagaggcaccctgcgttcacacaggacagcagaatggctgaggctactgaagcaggtcagagaccgaggaacgccatggcaggaaggagcccaggctggaggctcagctcctcggccaagctgcccgtctgccctggggggctgaacccagtaccctggcaggcatgcggggcggggagagcatgtggggccatcctaccatgcactgggccagcgcagcagcgatctgctggatgtcatccacagtgtggaccctcagggacaccagagtctccgtgatgttcttgcgtatctgggctcggcgctgccgctcgtgcttgggctctgccgccacgtccagggcccgctcgtactggggcaggcagggggcacagcaagctgtcagcagggcaggaggccggcaggaggccagcagatgcccacgactcccggggtgcagttacgtgctagatgctgtgtgatgtgggcactgacccgcaacactgagctgtttcttcatgggcaaaacagggtaagcacatgggccctcctgggcgggggctgcattgtggaaagcagacgccggagagggcccggtgggtgtggctgctgggagcggaacgtcggggtgctgcttcagggtcactgggatttatctctggggcccgggatgagccctccgcaaagctccaggcaggggaacaggtcttggtccccagcacgcatgcagcagatgtgaggtcccctcccaggctgcactcacctcgttcagcacagtgaccagggccagcgagtactcgatgacgtgctggggatcggcctgccgcagcagccccgggagcacactagcggtgagcccgtgcagccagactgtgagccccattgcgctgccgttgggctctgggagggtgatggccagagacctacgagcagaggggggtggtgagcaggtggcagtctcgggggcgccctcccacggcctggctcacctgttgagggcgaccacagcggctcccagctggtcctgcaccaccacggccaggcccacctcgaagtgtggcctgaaacccgggggcagcacggctccgtagccggagaggctgcccttgtagacacagaactcctcgcagtggccctggcgacagcgctgcagcagcagggcgtacaccagcggggcgccagcatcctccgcgtcatgccagcctgagggacggtccccacggcatcacgggagggctccgtgacctcacagagtcgggggatcccgctgctccccctacgcaggcctgcactcacccatgcattcgaagtgcaccttggtggtgagagcgtgcacagcgcccagtgggaagaggcggcaagagccccccagcggcgggcggttgggggacagggggatggaggcgcagccctcctcctcgccagagcggcccagcaccgtcagcgtgaaggtgtatccctcgccgtcccgcagcacgccccgccgcagcaccagtcacatgcctgcgctgcccgtggatgtggtggtctcatccagcaccagcgtcttgttgctgaacgtacgtgcagcccaccgctgcaggcagaagggatggtgagggggcgcaaccctctgccctgtcagccccacttctgcctgcaggccccgtcccctcggccatgggacccatccccaacccgcccacaccccgctcaacactcacccctcgcttggagccgctgctgcaattgaggcagcggccctccaggtacacgtaggagctgcggctcacttcgtacacggcctgtgccttgcaggacacacactccaaggacacaatgggcacccggccactgcggatcagcacctggcgtgggagtggggttacctccaacacaggtctatttggcctgctggaaggtctgggggacccgtggaggatgctgctcccaaactccaggtttcccaggggcctggccactgccggtgagctcaccccctcccaggatactcatccggtttgccaccttccaacctgggcggcggaagggcatacacagggcagaggacactggggtgtgtgttctggtgtactggagccagctggaccctgacaggaggcaggcaatgctcactgagggcccctggggggatgcgtgtgggaacagacgtatgtgggggtgtgaggaccgcagttgccacgtaggcctgactcacagactcctgcagcccttagccagggcctgggtcaggaggctgagccgggatggaacctgctcccacaccctcccctcagacgacccctctgggcagacccccaatcaggccagctgaggaaagcagggactggggaacagacacccactctggggtaccagcaggccccagtcagggaggcgcacacactcacagagggcagggaggcgcacacgctcacaggcacctgctgcgtccggttctcgaaggcattagatgccagcaaggtcaggacgtactcacctgtggggacaggcccaagtggggcagccgcggcacccccacctgctccccacccgctcggcagaagccccccgcctgaggagcccggggtgaacggctgcgcctgcggcccagccttaagggtcccaggctcccaagccacgtgcgggacggagcacaggtgcagcagcactgagggctgcctggtgaggacggcaccgcctccaagtgcagctgcactcggggcagcagagcagcaagagccaggccgcggtggggggcagttcagggggcccagcttccctgtccactcctcccacgcctggcccctccctcaccccagtaggggcctaagccatcagcccaggtgaggtcacagtgagggctgttggggaggaagcggggcagcttgactgggggactgggggggccccgtgctcagagcctgaaaggcagtggccccctcaccccctcatccctcacctggggcagcgtaggtgtgggtgacattgtgctccaccagcacctgggccaccgaggggtctggaaccgggaaggactcgttgtatggaggctggaactggtggagggcctgctccccatccccaaaggtccacctgccggggcggtgggaggcagtgagtgaaccgggacaggggtgcgcagtggcggggcacaggtgcgcggtggcggggcagggggtgcttgggacccagccgaggctccactctgcagtcacgccccgggcctccattcagggcccacccggctgtgctgaggcctctcccggctcccgtgcagcctcagggctcctgtgcacccagtacctcccaacagacagggaaaccgaggctcagaaaagcaaccccctgatgtggggtccctcggctgaggctggagccgggacaagagcctggtgcccggacaagagcctggtgcccaccccaaaccggcccctgagtcactcacaggaaggccacctccacggccgagtccaccagcacgcccgccgtcagtgccagcgtggcattgggggacagcacggctggcactgtagagacccgcaggccctgcatcctgttcatccgctccacggtgatgttgtagttcacggtgacgttgctcacgtggttggaggccgtcagctgcagggacaggcatcagtgggcccaggtggcaggtgag

SEQ ID NO: 1886647 - DNA, 4001 bp, Homo sapiens
ggagaaaaggggggagaggagagggaaggagagagaagggggagaggagagggaggggaggaaggaggaggggaggggtgaggggatggaggggctgggggaggagtggaggggctcagcgggatgaggtgaggggaaggtctaggggaggggaggaggggaagggctaggggaggggaggggctgggggaggaggcaggggctaggggaggggggagggactaggggagggaagggggaggggaggggttaggggagggaaggggaggggaggggctaggggagggaagggggaggggaggggagagtggagggcacagagcagcatcttcttagtccctccccacatctgggcccctctttacaccctgggtcccccgagaggcaccctgcgttcacacaggacagcagaatggctgaggctactgaagcaggtcagagaccgaggaacgccatggcaggaaggagcccaggctggaggctcagctcctcggccaagctgcccgtctgccctggggggctgaacccagtaccctggcaggcatgcggggcggggagagcatgtggggccatcctaccatgcactgggccagcgcagcagcgatctgctggatgtcatccacagtgtggaccctcagggacaccagagtctccgtgatgttcttgcgtatctgggctcggcgctgccgctcgtgcttgggctctgccgccacgtccagggcccgctcgtactggggcaggcagggggcacagcaagctgtcagcagggcaggaggccggcaggaggccagcagatgcccacgactcccggggtgcagttacgtgctagatgctgtgtgatgtgggcactgacccgcaacactgagctgtttcttcatgggcaaaacagggtaagcacatgggccctcctgggcgggggctgcattgtggaaagcagacgccggagagggcctggtgggtgtggctgctgggagcggaacgtcggggtgctgcttcagggtcactgggatttatctctggggcccgggatgagccctccgcaaagctccaggcaggggaacaggtcttggtccccagcacgcatgcagcagatgtgaggtcccctcccaggctgcactcacctcgttcagcacagtgaccagggccagcgagtactcgatgacgtgctggggatcggcctgccgcagcagccccgggagcacactagcggtgagcccgtgcagccagactgtgagccccattgcgctgccgttgggctctgggagggtgatggccagagacctacgagcagaggggggtggtgagcaggtggcagtctcgggggcgccctcccacggcctggctcacctgttgagggcgaccacagcggctcccagctggtcctgcaccaccacggccaggcccacctcgaagtgtggcctgaaacccgggggcagcacggctccgtagccggagaggctgcccttgtagacacagaactcctcgcagtggccctggcgacagcgctgcagcagcagggcgtacaccagcggggcgccagcatcctccgcgtcatgccagcctgagggacggtccccacggcatcacaggagggctccgtgacctcacagagtcgggggatcccgctgctccccctacgcaggcctgcactcacccatgcattcgaagtgcaccttggtggtgagagcgtgcacagcgcccagtgggaagaggcagcaagagccccccagcggcgggcggttgggggacagggggatggaggcgcagccctcctcctcgccagagcggcccagcaccgtcagcgtgaaggtgtatccctcgccgtcccgcagcacgccccgccgcagcaccagtcacatgcctgcgctgcccgtggatgtggtggtctcatccagcaccagcgtcttgttgctgaacgtacgtgcagcccaccgctgcaggcagaagggatggtgagggggcgcaaccctctgccctgtcagccccacttctgcctgcaggccccgtcccctcggccatgggacccatccccaacccgcccacaccccgctcaacactcacccctcgcttggagccgctgctgcaattgaggcagcggccctccaggtacacgtaggagctgcggctcacttcgtacacggcctgtgccttgcaggacacacactccaaggacacaatgggcacccggccactgcggatcagcacctggcgtgggagtggggttacctccaacacaggtctatttggcctgctggaaggtctgggggacccgtggaggatgctgctcccaaactccaggtttcccaggggcctggccactgccggtgagctcaccccctcccaggatactcatccggtttgccaccttccaacctgggcggcggaagggcatacacagggcagaggacactggggtgtgcgttctggtgtactggacccagctggaccctggcaggaggcaggcaatgctcactgagggcccctggggggatgcgtgtgggaacagacgtatgtgtgggtgtgaggaccgcagttgccacgtaggcctgactcacagactcctgcagcccttagccagggcctgggtcaggaggctgagccgggatggaacctgctcccacaccctcccctcagacgacccctctgggcagacccccaatcaggccagctgaggaaagcagggactggggaacagacacccactctggggtaccagcaggccccagtcagggaggcgcacacgctcacagagggcagggaggcgcacacgctcacaggcacctgctgcgtccggttctcgaaggcattagatgccagcaaggtcaggacgtactcacctgtggggacaggcccaagtggggcagccgcggcacccccacctgctccccacccgctcggcagaagccccccgcctgaggagcccggggtgaacggctgcacctgcggcccagccttaagggtcccaggctcccaagccacgtgcgggacggagcacaggtgcagcagcactgagggctgcctggtgaggacggcaccgcctccaagtgcagctgcactcggggcagcagagcagcaagagccaggccgcggtggggggcagttcagggggcccagcttccctgtccactcctcccacgcctggcccctccctcaccccagtaggggcctaagccatcagcccaggtgaggtcacagtgagggctgttggggaggaagcggggcagcttgactgggggactgggggggccccgtgctcagagcctgaaaggcagtggccccctcaccccctcatccctcacctggggcagcgtaggtgtgggtgacattgtgctccaccagcacctgggccaccgaggggtctggaaccgggaaggactcgttgtacggaggctggaactggtggagggcctgctccccatccccaaaggtccacctgccggggcggtgggaggcagtgagtgaaccgggacaggggtgcgcagtggcggggcacaggtgcgcggtggcggggcagggggtgcttgggacccagccgaggctccactctgcagtcacgccccgggcctccattcagggcccacccggctgtgctgaggcctctcccggctcccgtgcagcctcagggctcctgtgcacccagtacctcccaacagacagggaaaccgaggctcagaaaagcaaccccctgatgtggggtccctcggctgaggctggagccgggacaagagcctggtgcccggacaagagcctggtgcccaccccaaaccggcccctgagtcactcacaggaaggccacctccacggccgagtccaccagcacgcccgccgtcagtgccagcgtggcattgggggacagcacggctggcactgtagagacccgcaggccctgcatcctgttcatccgctccacggtgatgttgtagttcacggtgacgttgctcacgtggttggaggccgtcagctgcagggacaggcatcagtgggcccaggtggcaggtgag

SEQ ID NO: 1886648 - DNA, 4001 bp, Homo sapiens
ggtggagggggagggggaaggggatggggatgaggacgaagatgagggggatgatggggagagggaggaaaaaggaaggaaaagggtagagaaaagagaaaggggagaagaggaggagcagggggaaagggaggggaagggggataagggggataagggaggggaaggaggataagggaggggaaggaggataagggggataagaaagatgaggggaatggacaaaaggacggggaggatcgggggggaaatggagaaaaggggagagagatggagaaaggggagggaagggggaggggaggggagagtggagggcacagagcagcatcttcttagtccctccccacatctgggcccctctttacaccctgggtcccccgagaggcaccctgcgttcacacaggacagcagaaaggctgaggctactgaagcaggtcagagaccgaggaacgccacggcaggaaggagcccaggctggaggctcagctcctcggccaagctgcccgtctgccctggggggctgaacccagtaccctggcaggcatgcggggcggggtgagcatgtggggccatcctaccatgcactgggccagcgcagcagcgatctgctggatgtcatccacagtgtggaccctcagggacaccagagtctccgtgatgttcttgcgtatctgggctcggcgctgccgctcgtgcttgggctctgccgccacgtccagggcccgctcgtactggggcaggcagggggcacagcaagctgtcagcagggcaggaggccggcaggaggccagcagatgcccacgactcccggggtgcagttacgtgctagatgctgtgtgatgtgggcactgacccgcaacactgagctgtttcttcatgggcaaaacagggtaagcacatgggccctcctgggcgggggctgcattgtggaaagcagacgccggagagggcccggtgggtgtggctgctgggagcggaacgtcggggtgctgcttcagggtcactgggatttatctctggggcccgggatgagccctccgcaaagctccaggcaggggaacaggtcttggtccccagcacgcatgcagcagatgtgaggtcccctcccaggctgcactcacctcgttcagcacagtgaccagggccagcgagtactcgatgacgtgctggggatcggcctgccgcagcagccccgggagcacactagcggtgagccggtgcagccagactgtgagccccattgcgctgccgttgggctctgggagggtgatggccagagacctacgagcagaggggggtggtgagcaggtggcagtctcgggggcgccctcccacggcctggctcacctgttgagggcgaccacagcggctcccagctggtcctgcaccaccacggccaggcccacctcgaagtgtggcctgaaacccgggggcagcacggctccgtagccggagaggctgctcttgtagacacagaactctttgcagtggccctggcaacagcgctgcagcagcagggcatacaccagcggggcgccagcatcctccgcgtcatgccagcctgagggatggtccccacagcatcacgggagggctccgtgacctcacagagtcgggggatcccgctgctccccctacgcaggcctgcactcacccgtgcatttgaagtgcaccttggtggtgagggcgtgcacagcgcccagtgggaagaggcagcaagagccccccagcggcgggcggttgggggacagggggatggaggcgcagccctcctcctcgccagagcggcccagcaccgtcagcgtgaaggtgtatccctcgccgtcccgcagcacgccccgccgcagcaccagtcacatgcctgcgctgcccgtggatgtggtggtctcatccagcaccagcgtcttgttgctgaacgtacgtgcagcccaccgctgcaggcagaagggatggtgagggggcgcaaccctctgccctgtcagccccacttctgcctgcaggccccgtcccctcggccatgggacccatccccaacccgcccacaccccgctcaacactcacccctcgcttggagccgctgctgcaattgaggcagcggccctccaggtacacgtaggagctgcggctcacttcgtacacggcctgtgccttgcaggacacacactccaaggacacaatgggcacccggccactgcggatcagcacctggcgtgggagtggggttacctccaacacaggtctatttggcctgctggaaggtctgggggacccgtggaggatgctgctcccaaactccaggtttcccaggggcctggccactgccggtgagctcaccccctcccaggatactcatccggtttgccaccttccaacctgggcggcggaagggcatacacagggcagaggacactggggtgtgtgttctggtgtactggagccagctggaccctggcaggaggcaggcaatgctcactgagggcccctggggggatgcgtgtgggaacagacgtatgtgggggtgtgaggaccgcagttgccacgtaggcctgactcacagactcctgcagcccttagccagggcctgggtcaggaggctgagccgggatggaacctgctcccacaccctcccctcagacgacccctctgggcagacccccaatcaggcccgttgaggaaagcagggactggggaacagacacccactctggggcaccagcaggccccgcctgacagcagcaggagcagccaccacgggctcagggtcaccaagcctcctggccggtccagagtggggagcatgagggtgagaaccggcccaccacatccagcaacagggacatgggctggggacagtggctgcctctggggtgggaaggggctcttcctcactgttggtattgctgggggactgtgtagcttttgtcactagagcatatgtggcttgaagactgtatgtggaactgtggcaggtttggaaggaagcaaagctgaagcaggctgtcgtgttacatagaatttgcatcagaaacagagaggggagagcgcgcggcctccaccagcactaaaacacggaaaacagtagatgagcagggaggctgggctgtccaaggcaagtggccgaggggcgggcggcacccaccgtctggttggtggcctcctccttgtggccggccttccacacggtgaggctgaaggtgtactccacgccagctgccagccgttcccgtggaatggtgaccgtgctgctcccgcggggcccaaagttcagcgcacacccgccagcctccctctgcaggccgagaacaaggggcgacgtggcccgagaaccccatccagttttaaagcagagcccggcccaggagacagcgcgggagaccccctccccatgctgggacggggcccaccaggcactgaggacgggccagccctggtggcaagctgggtgttctctgggctcatgggtgtggacgggtgaggggcagggaggacggccctgccacgcactgacctgtgtcgaagccacacaggcccactggaaactgagcggcgtctggtcgccgtcctccaggttggggtcgtaggactcgctcccatccagcaccaggtcctgtgtgtctgaccacacgcggtaggagccaccctcagtgatgggcaccaggcgctcgggggccaccgtcacattggcctggatgctccgtgccagtggcgtgtccccaaatgacacgacaaacacaaagcagtagtgccccacaggcagcgccagccgcggcagcaccagctgaggccggctcacgtccacgccgggcagggccacacgcgccgggcaccccggccgctggcagctggcggtgcggtacacctcccagcggtactcagtctggtaggtgacacagtcgcgcaggtcaacgtaggcatccaggcagttgcgctgtgatcgtcgcatcagcacctgcaggggcaggaccacgtccacctccggctcccggcaggccagcacctgg

SEQ ID NO: 1886649 - DNA, 4001 bp, Homo sapiens
gggggagaggagaggggaggggagagaaggggggagaggagggagggggaggaggggaggaaggaggaggggaggggtgaggggatggaggggctgggggaggagtggaggggctcagcgggatgaggtgaggggaaggtctaggggaggggaggaggggaagggctaggggaggggaggggctgggggaggaggcaggggctaggggaggggggagggactaggggagggaagggggaggggaggggttaggggagggaaggggaggggaggggctaggggagggaagggggaggggaggggagagtggagggcacagagcagcatcttcttagtccctccccacatctgggcccctctttacaccctgggtcccccgagaggcaccctgcgttcacacaggacagcagaatggctgaggctactgaagcaggtcagagaccgaggaacgccatggcaggaaggagcccaggctggaggctcagctcctcggccaagctgcccgtctgccctggggggctgaacccagtaccctggcaggcatgcggggcggggagagcatgtggggccatcctaccatgcactgggccagcgcagcagcgatctgctggatgtcatccacagtgtggaccctcagggacaccagagtctccgtgatgttcttgcgtatctgggctcggcgctgccgctcgtgcttgggctctgccgccacgtccagggcccgctcgtactggggcaggcagggggcacagcaagctgtcagcagggcaggaggccggcaggaggccagcagatgcccacgactcccggggtgcagttacgtgctagatgctgtgtgatgtgggcactgacccgcaacactgagctgtttcttcatgggcaaaacagggtaagcacatgggccctcctgggcgggggctgcattgtggaaagcagacgccggagagggcccggtgggtgtggctgctgggagcggaacgtcggggtgctgcttcagggtcactgggatttatctctggggcccgggatgagccctccgcaaagctccaggcaggggaacaggtcttggtccccagcacgcatgcagcagatgtgaggtcccctcccaggctgcactcacctcgttcagcacagtgaccagggccagcgagtactcgatgacgtgctggggatcggcctgccgcagcagccccgggagcacactagcggtgagcccgtgcagccagactgtgagccccattgcgctgccgttgggctctgggagggtgatggccagagacctacgagcagaggggggtggtgagtaggtggcagtctcgggggcgccctcccacggcctggctcacctgttgagggcgaccacagcggctcccagctggtcctgcaccaccacggccaggcccacctcgaagtgtggcctgaaacccgggggcagcacggctccgtagccggagaggctgcccttgtagacacagaactcctcgcagtggccctggcgacagcgctgcagcagcagggcgtacaccagcggggcgccagcatcctccgcgtcatgccagcctgagggacggtccccacggcatcacgggagggctccgtgacctcacagagtcgggggatcccgctgctccccctacgcaggcctgcactcacccatgcattcgaagtgcaccttggtggtgagagcgtgcacagcgcccagtgggaagaggcggcaagagccccccagcggcgggcggttgggggacagggggatggaggcgcagccctcctccttgccagagcggcccagcaccgtcagcgtgaaggtgtatccctcgccgtcccgcagcacgccccgccgcagcaccagtcacatgcctgcgctgcccgtggatgtggtggtctcatccagcaccagcgtcttgttgctgaacgtacgtgcagcccaccgctgcaggcagaagggatggtgagggggcgcaaccctctgccctgtcagccccacttctgcctgcaggccccgtcccctcggccatgggacccatccccaacccgcccacaccccgctcaacactcacccctcgcttggagccgctgctgcaattgaggcagcggccctccaggtacacgtaggagctgcggctcacttcgtacacggcctgtgccttgcaggacacacactccaaggacacaatgggcacccggccactgcggatcagcacctggcgtgggagtggggttacctccaacacaggtctatttggcctgctggaaggtctgggggacccgtggaggatgctgctcccaaactccaggtttcccaggggcctggccactgccggtgagctcaccccctcccaggatactcatccggtttgccaccttccaacctgggcggcggaagggcatacacagggcagaggacactggggtgtgcgttctggtgtactggagccagctggaccctggcaggaggcaggcaatgctcactgagggcccctggggggatgcgtgtgggaacagacgtatgtgtgggtgtgaggaccgcagttgccacgtaggcctgactcacagactcctgcagcccttagccagggcctgggtcaggaggctgagccgggatggaacctgctcccacaccctcccctcagacgacccctctgggcagacccccaatcaggccagctgaggaaagcagggactggggaacagacacccactctggggtaccagcaggccccagtcagggaggcgcacacgctcacagagggcagggaggcgcacacgctcacaggcacctgctgcgtccggttctcgaaggcattagatgccagcaaggtcaggacgtactcacctgtggggacaggcccaagtggggcagccgcggcacccccacctgctccccacccgctcggcagaagccccccgcctgaggagcccggggtgaacggctgcacctgcggcccagccttaagggtcccaggctcccaagccacgtgcgggacggagcacaggtgcagcagcactgagggctgcctggtgaggacggcaccgcctccaagtgcagctgcactcggggcagcagagcagcaagagccaggccgcggtggggggcagttcagggggcccagcttccctgtccactcctcccacgcctggcccctccctcaccccagtaggggcctaagccatcagcccaggtgaggtcacagtgagggctgttggggaggaagcggggcagcttgactgggggactgggggggccccgtgctcagagcctgaaaggcagtggccccctcaccccctcatccctcacctggggcagcgtaggtgtgggtgacattgtgctccaccagcacctgggccaccgaggggtctggaaccgggaaggactcgttgtacggaggctggaactggtggagggcctgctccccatccccaaaggtccacctgccggggcggtgggaggcagtgagtgaaccgggacaggggtgcgcagtggcggggcacaggtgcgcggtggcggggcagggggtgcttgggacccagccgaggctccactctgcagtcacgccccgggcctccattcagggcccacccggctgtgctgaggcctctcccggctcccgtgcagcctcagggctcctgtgcacccagtacctcccaacagacagggaaaccgaggctcagaaaagcaaccccctgatgtggggtccctcggctgaggctggagccgggacaagagcctggtgcccggacaagagcctggtgcccaccccaaaccggcccctgagtcactcacaggaaggccacctccacggccgagtccaccagcacgcccgccgtcagtgccagcgtggcattgggggacagcacggctggcactgtagagacccgcaggccctgcatcctgttcatccgctccacggtgatgttgtagttcacggtgacgttgctcacgtggttggaggccgtcagctgcagggacaggcatcagtgggcccaggtggcaggtgaga

SEQ ID NO: 1886650 - DNA, 4001 bp, Homo sapiens; identical to SEQ ID NO: 1886646

SEQ ID NO: 1886651 - DNA, 4001 bp, Homo sapiens; identical to SEQ ID NO: 1886647

SEQ ID NO: 1886652 - DNA, 4001 bp, Homo sapiens; identical to SEQ ID NO: 1886648

SEQ ID NO: 1886653 - DNA, 4001 bp, Homo sapiens; identical to SEQ ID NO: 1886649

SEQ ID NO: 1886654 - DNA, 4001 bp, Homo sapiens; identical to SEQ ID NO: 1886646

SEQ ID NO: 1886655 - DNA, 4001 bp, Homo sapiens; identical to SEQ ID NO: 1886647

SEQ ID NO: 1886656 - DNA, 4001 bp, Homo sapiens; identical to SEQ ID NO: 1886648

SEQ ID NO: 1886657 - DNA, 4001 bp, Homo sapiens; identical to SEQ ID NO: 1886649

SEQ ID NO: 1886658 - DNA, 4001 bp, Homo sapiens; identical to SEQ ID NO: 1886646

SEQ ID NO: 1886659 - DNA, 4001 bp, Homo sapiens; identical to SEQ ID NO: 1886647

SEQ ID NO: 1886660 - DNA, 4001 bp, Homo sapiens; identical to SEQ ID NO: 1886648

SEQ ID NO: 1886661 - DNA, 4001 bp, Homo sapiens; identical to SEQ ID NO: 1886649

SEQ ID NO: 1886662 - DNA, 4001 bp, Homo sapiens
ggagggggaggagaatgggaattgggggagggggataaggatgggaagggggaggggaggaagggggaggggaggggctaggggagggaggggctgggggaggagtggaggggctcagcgggaggaagtgaggggaaggtctaggggaggggaggaggagaagggctagcggaggggaggggagggggcaggggctaggggaggggggaggggcaaggggagggagggggaggggaggggttaggggagggaaggggcaggggaggggctaggggagggaagggggaggggaggggagagtggaaggcacagaacagcatcttcttagtccctccccacatctgggcccctctttacaccctgggtcccccgagaggcaccctgcgttcacacaggacagcagaaaggctgaggctactgaagcaggtcagagaccgaggaacgccatggcatgaaggagcccaggctggaggctcagctcctcggccaagctgcccgtctgccctggggggctgaacccagtaccctggcaggcatgcggggcggggtgagcatgtggggccatcctaccatgcactgggccagcgcagcagcgatctgctggatgtcatccacagtgtggaccctcagggacaccagagtctccgtgatgttcttgcgtatctgggctcggcgctgccgctcgtgcttgggctctgccgccacgtccagggcccgctcgtactggggcaggcaggcggcacagcaagctgtcagcagggcaggagaccggcaggaggccagcagatgcccacgactcccggggtgcagttacgtgctagatgctgtgtgatgtgggcattgacccgcaacactgagctgtttcttcatgggcaaaacagggtaagcacatgggccctcctgggcgggggctgcattgtggaaagcagacgccggagagggcccggtgggtgtggctgctgggagcggaacgtcggggtgctgcttcagggtcactgggatttatctctggggcccgggataagccctccgcaaagctccaggcaggggtacaggtcttggtccccagcacgcatgcagcagatgtgaggtcccctgccaggctgcactcacctcgttcaggacggtgaccagggccagcgagtactcgatgacgtgctggggatcggcctgccgcagcagccccgggagcacactagcggtgagcccgtgcagccagactgtgagccccattgcgctgccgttgggctctgggagggtgatggccagagacctacgagcagaggggggtggtgagcaggtggcagtctcgggggcgccctcccacggcctggctcacctgttgagggcgaccacagcggctcccagctggtcctgcaccaccacggccaggcccacctcgaagtgtggcctgaaacccgggggcagcacggctccgtagccggagaggctgcccttgtagacacagaactcctcgcagtggccctggcgacagcgctgcagcagcagggcgtacaccagcggggcgccagcatcctccgcgtcatgccagcctgagggacggtccccatggcatcacgggagggctccgtgacgtcacagtcgggggatcccgctgctccccctaagcaggcctgtactcacccgtgcattcgaagtgcaccttggtggtgagggcgtgcacagcgcccagtgggaagaggcggcaagagccccccagcggcgggcggttgggggacagggggatggaggcgcagccctcctcctcgccagagcggcccagcaccgtcagcgtgaaggtgtatccctcgccgtcccgcagcacgccccgccgcagcaccagtcacatgcctgcgctgcccgtggatgtggtggtctcatccagcaccagtgtcttgttgctgaacgtacgtgcagcccaccgctgcaggcagaaggggtggtgagggggcgcaaccctctgccctgtcagccccacttctgcctgcaggccccgtcccctcggccatgggacccatccccagcccgcccacaccccgctcaacactcacccctcgcttggagccgctgctgcaattgaggcagcggccctccaggtacacgtaggagctgcggctcacttcgtacacggcctgtgccttgcaggacacacactccaaggacacaatgggcacccggccactgcggatcagcacctggcgtgggagtggggttacctccaacacaggtctatttggcctgctggaaggtctgggggacccgtggaggatgctgctcccaaactccaggtttcccaggggcctggccactgccggtgagctcaccccctcccaggatactcatccggtttgccaccttccaacctgggcggcggaagggcatacacagggcagaggacactggggtgtgcgttctggtgtactggagccagctggaccctgacaggaggcaggcaatgctcactgagggcccctggggggatgcgtgtgggaacagacgtatgtgggggtgtgaggaccgcagttgccacgtaggcctgactcacagactcctgcagcccttagccagggcctgggtcaggaggctgagccgggatggaacctgctcccacaccctcccctcagacgacccctctgggcagacccccaatcaggcccgttgaggaaagcagggactggggaacagacacccactctggggcaccagcaggccccgcctgacagcagcaggagcagccaccacgggctcagggtcaccaagcctcctggccggtccagagtggggagcgtgagggtgagaaccggcccaccacatccagcaacagggacatgggctggggacagtggctgcctctggggtgggaaggggctcttcctcactgttggtattgctgggggactgtgtagcttttgtcactagagcatatgtggcttgaagactgtatgtggaactgtggcaggtttggaaggaagcaaagctgaagcaggctgtcgtgttacgtagaatttgcatcagaaacagagagggaagagcgcgcggcctccaccagcactaaaacacggaaaacagtagatgagcagggaggttgggctgtccaaggcaagtggccgaggggcgggcggcacccaccgtctggttggtggcctcctccttgcggccggccttccacacggtgaggctgaaggtgtactccacgccagccgccagccgttcccgtggaatggtgaccgtgctgctcccgcggggcccaaagttcagcgcacacccgccagcctccctctgcaggccgagaacaaggggcgacgtggcccgagaaccccatccagttttaaagcagagcccggcccaggagacagcgcgggagaccccctccccatgctgggacggggcccaccaggcactgaggacgggccagccctggtggcaagctgggtgttctctgggctcatgggtgtggacgggtgaggggcatggaggacggccctgccacgcactgacctgtgtcgaagccacacaggcccactggaaactgagcggcgtctggtcgccatcctccaggttggggtcgtaggactcgctcccatccagcaccaggtcctgtgtgtctgaccacacgcggtatgagccaccctcagtgatgggcaccaggcgctcaggggccaccgtcacattggcctggatgctccgtgccagtggcgtgtccccaaatgacacgacaaacacaaagcagtagtgccccacaggcagcgccagccgcggcagcaccagctgaggccggctcacgtccacgccgggcagggccacacgcgccgggcaccccggctggtgggcccgagccagatgcagtgctcggctgtggctgggtgtggctccccgggcagccagttctggcagctctccaggctgaaggcctcgccctgcggcgctgggcccacctccacccgctgcacagtcgagaagccgatccacacgtctaggctcctgggggcgggtgtgggatg

SEQ ID NO: 1886663 - DNA, 4001 bp, Homo sapiens
gcccacttgactggacccccacagcctcctcactaagcattttctgtggctctgcatgacccagggcctccacctggggaccacgtgatgcagcccaccgaccacacaaggcacctcttcacatgagagcggaggaggaggggagagaggagaggggagtggagaaaaaggggaggggaggaggggaagggctgggggggaagaagggaaagggctaggggaggggaggaggggaagggctaggggaggggaggaggggaggggctaggggagggaagggggaggggaggggaggggagagtggagggcacagagcagcatcttcttagtccctccccacatctgggcccctctttacaccctgggtcccccgagaggcaccctgcgttcacacaggacagaacggctgaggctactgaagcaggtcagagaccgaggaacgccatggcaggaaggagcccaggctggaggctcagctcctcggccaagctgcccgtctgccctggggggctgaacccagtgccctggcaggcatgcggggcagggtgagcaggtggggccatcctaccatgcactgggccagcgcagcagcgatctgctggatgtcatccacagtgtggaccctcagggacaccagagtctccgtgatgttcttgcgtatctgggctcggtgctgccgctcgtgcttgggctctgccgccacgtccagggcccgctcgtactggggcaggcagggggcacagcaagctgtcagcagcgcaggaggccggcaggaggccagcagatgcccacgactcccggggtgcagttacgtgctagacgctgtgtgatgcgggcactgacccacaacactgagctgtttcttcatgggcaaaacagggtaagcacatgggccctcctgggcgggggctgcattgtggaaagcagacgccggagagggcccggtgggtgtggctgctgggagcggaaggtcggggtgctgcttcagggtcactgggatttatctctggggcccgggatgagccctctgcaaagctccaggcaggggtacaggtcttggtcccaagcacgcatgcagcagatgtgacgtcccctcccaggctgcactcacctcgttcagcacggtgaccagggccaacgagtactcgatgacgtgctggggatcggcctgccgcagcagccctgggagcacactagcggtgagcccgtgcagccagactgtgagccccgttgcgctgccgttgggctctgggagggtgatggccaaagacctacgagcagaggggggtggtgagcaggtggcagtctcgggggcgccctcccacggcctggctcacctgttgagggcgaccacagcggctcccagctggtcctgcaccaccacggccaggcccacctcgaagtgtggcctgaaacccgggggcagcacggctccgtagctggagaggctgcccttgtagacacagaactcctcgcagtggccctggcgacagcgccgcagcagcagggcgtacaccagcggggcgccagcatcctccgcgtcatgccagcctgagggacggtccccacggcatcacgggagggctccgtgacgtcacagagtcgggggatcccgctgctccccccacgcaggcctgcactcacccgtgcattcgaagtgcaccttggtggtgagggcgtgcacagcgcccagtgggaagaggcggcaagagccccccagcggcgggcggttgggggacaggcggatggaggcgcagccctcctcctcgccagagcggcccagcaccgtgagcgtgaaggtgtatccctcgccgtcccgcagcacgccccgccgcagcaccagtcgcatgcctgcactgcccgtggatgtggtggtctcatccagcaccagcgtcttgttgctgaacgtacgtgcagcccaccgctgcaggcagaaggggtggtgagggggcgcaaccctctgccctgtcagccccacttctgcctgcaggccccgtcccctcggccatgggacccatccccagcccgcccacaccccgctcaacactcacccctcgcttggagccgctgctgcaattgaggcagcggccctccaagtacacgtaggagctgcggctcacttcgtacacggcctgtgccttgcaggacacacactccaaggacacaatgggcacccggccactccggatcagcacctggcgtgggagtggggttacctccaacacaggtctatttggcctgctggaaggactgggggacccatggaggatgctgctcccaaactccaggtttcccaggggcctggccactgccggtgagctcactccctcccaggatactcatccggtttgccaccttccaacttggacggcggaagggcatacacagggcagaggacactggagtgtgcgttctggtgtactggacccagctggaccctagcaggaggcaggcaatgctcactgagggcccctggggggatgcgtgtgagaagagacgtatgtgtgggtgtgaggaccgcagctgccacgtaggcctgactcacagactcctgcagcccttagccagggcctgggtcaggaggctgagctgggatggaacctgctcccacaccctcccctcagacgacccctctgggaagacccccaatcaggccagctgaggaaagcagggactggggaacagacgcccactctggggcaccagcaggccccgcctgacagcagcaggagcagccaccacgggctcagggtcaccaagcctcctggccggtccagagaggggagcgtgagggtgagaaccggcccaccacatccagcaacagggacatgggctggggacagtggctacctctggggtgggaaggggctcttcctcactgttggtattgctaggggactgtgtagcttttgccactagagcatatgtggcttgaagactgtacgtggaactgtggcaggtttggaaggaagcaaagctgaagcaggctgtcgtgttacatagaatttgcatcagaaacagagaggggagagcgtgcggcctccaccagcactaaaacacggaaaacagtagatgaccagggaggctgggctgtccaaggcaagtggccgaggggcgggcggcacccaccgtctggttggtggcctcctccttgcggccggccttccacacggtcaggctgaaggtgtactccacgccagccgccagccgctcccgtggaatggtgaccgtgctgctcccgcggggcccaaagttcagcgcacacccgccagcctccctctgcaggccgagaacaaggggcgacgtggcctgagagccccatccagttttaaagcagagcccggcccaggagacagcgcgggagaccccctccccatgctgggacggggcccaccaggcactgaggacgggccagccctggtggcaagctgggtgttctctgggctcatgggtgtggacgggtgaggggcatggaggacggccctgccacgcactgacctgtgtcgaagccacacaggcccagtggaaactgagcggcgtctggtcgccgtcctccaggttggggtcgtaggactcgctcccatccagcaccaggtcccgtgtgtctgaccacacgcggtatgagccaccctcaatgatgggcaccaggcgctcgggggccaccgtcacattggcctggatgctctgtgtcagtggcgtgtccccaaatgacacgacaaacacaaagcagtagtgccccacaggcagcgccagccgcggcagcaccagccgaggccggctcacgtccacgccgggcagggccacacgcgctgggcgccccggccgctggcagctggcggtgcgatacacctcccagcggtactcagtctggtaggtgacgcagtcgcgcaggtcaacgtgggcctccaagtagttgcgctgtgatcgccgcatcagcacctgcaggggcaggaccacgtccacctccggctcccggcaggccagcacctggacggtcaccg

SEQ ID NO: 1886664 - DNA, 4001 bp, Homo sapiens
aagggggagggggaggagaatgggaattgggggagggggataaggatgggaagggggaggggaggaagggggaggggaggggctaggggagggaggggctgggggaggagtggaggggctcagcgggaggaagtgaggggaaggtctaggggaggggaggaggagaagggctagcggaggggaggggagggggcaggggctaggggaggggggaggggcaaggggagggagggggaggggaggggttaggggagggaaggggcaggggaggggctaggggagggaagggggaggggaggggagagtggaaggcacagaacagcatcttcttagtccctccccacatctgggcccctctttacaccctgggtcccccgagaggcaccctgcgttcacacaggacagcagaaaggctgaggctactgaagcaggtcagagaccgaggaacgccatggcatgaaggagcccaggctggaggctcagctcctcggccaagctgcccgtctgccctggggggctgaacccagtaccctggcaggcatgcggggcggggtgagcatgtggggccatcctaccatgcactgggccagcgcagcagcgatctgctggatgtcatccacagtgtggaccctcagggacaccagagtctccgtgatgttcttgcgtatctgggctcggcgctgccgctcgtgcttgggctctgccgccacgtccagggcccgctcgtactggggcaggcaggcggcacagcaagctgtcagcagggcaggagaccggcaggaggccagcagatgcccacgactcccggggtgcagttacgtgctagatgctgtgtgatgtgggcattgacccgcaacactgagctgtttcttcatgggcaaaacagggtaagcacatgggccctcctgggcgggggctgcattgtggaaagcagacgccggagagggcccggtgggtgtggctgctgggagcggaacgtcggggtgctgcttcagggtcactgggatttatctctggggcccgggataagccctccgcaaagctccaggcaggggtacaggtcttggtccccagcacgcatgcagcagatgtgaggtcccctgccaggctgcactcacctcgttcaggacggtgaccagggccagcgagtactcgatgacgtgctggggatcggcctgccgcagcagccccgggagcacactagcggtgagcccgtgcagccagactgtgagccccattgcgctgccgttgggctctgggagggtgatggccagagacctacgagcagaggggggtggtgagcaggtggcagtctcgggggcgccctcccacggcctggctcacctgttgagggcgaccacagcggctcccagctggtcctgcaccaccacggccaggcccacctcgaagtgtggcctgaaacccgggggcagcacggctccgtagccggagaggctgcccttgtagacacagaactcctcgcagtggccctggcgacagcgctgcagcagcagggcgtacaccagcggggcgccagcatcctccgcgtcatgccagcctgagggacggtccccatggcatcacgggagggctccgtgacgtcacagtcgggggatcccgctgctccccctaagcaggcctgtactcacccgtgcattcgaagtgcaccttggtggtgagggcgtgcacagcgcccagtgggaagaggcggcaagagccccccagcggcgggcggttgggggacagggggatggaggcgcagccctcctcctcgccagagcggcccagcaccgtcagcgtgaaggtgtatccctcgccgtcccgcagcacgccccgccgcagcaccagtcacatgcctgcgctgcccgtggatgtggtggtctcatccagcaccagtgtcttgttgctgaacgtacgtgcagcccaccgctgcaggcagaaggggtggtgagggggcgcaaccctctgccctgtcagccccacttctgcctgcaggccccgtcccctcggccatgggacccatccccagcccgcccacaccccgctcaacactcacccctcgcttggagccgctgctgcaattgaggcagcggccctccaggtacacgtaggagctgcggctcacttcgtacacggcctgtgccttgcaggacacacactccaaggacacaatgggcacccggccactgcggatcagcacctggcgtgggagtggggttacctccaacacaggtctatttggcctgctggaaggtctgggggacccgtggaggatgctgctcccaaactccaggtttcccaggggcctggccactgccggtgagctcaccccctcccaggatactcatccggtttgccaccttccaacctgggcggcggaagggcatacacagggcagaggacactggggtgtgcgttctggtgtactggagccagctggaccctgacaggaggcaggcaatgctcactgagggcccctggggggatgcgtgtgggaacagacgtatgtgggggtgtgaggaccgcagttgccacgtaggcctgactcacagactcctgcagcccttagccagggcctgggtcaggaggctgagccgggatggaacctgctcccacaccctcccctcagacgacccctctgggcagacccccaatcaggcccgttgaggaaagcagggactggggaacagacacccactctggggcaccagcaggccccgcctgacagcagcaggagcagccaccacgggctcagggtcaccaagcctcctggccggtccagagtggggagcgtgagggtgagaaccggcccaccacatccagcaacagggacatgggctggggacagtggctgcctctggggtgggaaggggctcttcctcactgttggtattgctgggggactgtgtagcttttgtcactagagcatatgtggcttgaagactgtatgtggaactgtggcaggtttggaaggaagcaaagctgaagcaggctgtcgtgttacgtagaatttgcatcagaaacagagagggaagagcgcgcggcctccaccagcactaaaacacggaaaacagtagatgagcagggaggttgggctgtccaaggcaagtggccgaggggcgggcggcacccaccgtctggttggtggcctcctccttgcggccggccttccacacggtgaggctgaaggtgtactccacgccagccgccagccgttcccgtggaatggtgaccgtgctgctcccgcggggcccaaagttcagcgcacacccgccagcctccctctgcaggccgagaacaaggggcgacgtggcccgagaaccccatccagttttaaagcagagcccggcccaggagacagcgcgggagaccccctccccatgctgggacggggcccaccaggcactgaggacgggccagccctggtggcaagctgggtgttctctgggctcatgggtgtggacgggtgaggggcatggaggacggccctgccacgcactgacctgtgtcgaagccacacaggcccactggaaactgagcggcgtctggtcgccatcctccaggttggggtcgtaggactcgctcccatccagcaccaggtcctgtgtgtctgaccacacgcggtatgagccaccctcagtgatgggcaccaggcgctcaggggccaccgtcacattggcctggatgctccgtgccagtggcgtgtccccaaatgacacgacaaacacaaagcagtagtgccccacaggcagcgccagccgcggcagcaccagctgaggccggctcacgtccacgccgggcagggccacacgcgccgggcaccccggctggtgggcccgagccagatgcagtgctcggctgtggctgggtgtggctccccgggcagccagttctggcagctctccaggctgaaggcctcgccctgcggcgctgggcccacctccacccgctgcacagtcgagaagccgatccacacgtctaggctcctgggggcgggtgtg

SEQ ID NO: 1886665 - DNA, 4001 bp, Homo sapiens
ggagagcccacttgactggacccccacagcctcctcactaagcattttctgtggctctgcatgacccagggcctccacctggggaccacgtgatgcagcccaccgaccacacaaggcacctcttcacatgagagcggaggaggaggggagagaggagaggggagtggagaaaaaggggaggggaggaggggaagggctgggggggaagaagggaaagggctaggggaggggaggaggggaagggctaggggaggggaggaggggaggggctaggggagggaagggggaggggaggggaggggagagtggagggcacagagcagcatcttcttagtccctccccacatctgggcccctctttacaccctgggtcccccgagaggcaccctgcgttcacacaggacagaacggctgaggctactgaagcaggtcagagaccgaggaacgccatggcaggaaggagcccaggctggaggctcagctcctcggccaagctgcccgtctgccctggggggctgaacccagtgccctggcaggcatgcggggcagggtgagcaggtggggccatcctaccatgcactgggccagcgcagcagcgatctgctggatgtcatccacagtgtggaccctcagggacaccagagtctccgtgatgttcttgcgtatctgggctcggtgctgccgctcgtgcttgggctctgccgccacgtccagggcccgctcgtactggggcaggcagggggcacagcaagctgtcagcagcgcaggaggccggcaggaggccagcagatgcccacgactcccggggtgcagttacgtgctagacgctgtgtgatgcgggcactgacccacaacactgagctgtttcttcatgggcaaaacagggtaagcacatgggccctcctgggcgggggctgcattgtggaaagcagacgccggagagggcccggtgggtgtggctgctgggagcggaaggtcggggtgctgcttcagggtcactgggatttatctctggggcccgggatgagccctctgcaaagctccaggcaggggtacaggtcttggtcccaagcacgcatgcagcagatgtgacgtcccctcccaggctgcactcacctcgttcagcacggtgaccagggccaacgagtactcgatgacgtgctggggatcggcctgccgcagcagccctgggagcacactagcggtgagcccgtgcagccagactgtgagccccgttgcgctgccgttgggctctgggagggtgatggccaaagacctacgagcagaggggggtggtgagcaggtggcagtctcgggggcgccctcccacggcctggctcacctgttgagggcgaccacagcggctcccagctggtcctgcaccaccacggccaggcccacctcgaagtgtggcctgaaacccgggggcagcacggctccgtagctggagaggctgcccttgtagacacagaactcctcgcagtggccctggcgacagcgccgcagcagcagggcgtacaccagcggggcgccagcatcctccgcgtcatgccagcctgagggacggtccccacggcatcacgggagggctccgtgacgtcacagagtcgggggatcccgctgctccccccacgcaggcctgcactcacccgtgcattcgaagtgcaccttggtggtgagggcgtgcacagcgcccagtgggaagaggcggcaagagccccccagcggcgggcggttgggggacaggcggatggaggcgcagccctcctcctcgccagagcggcccagcaccgtgagcgtgaaggtgtatccctcgccgtcccgcagcacgccccgccgcagcaccagtcgcatgcctgcactgcccgtggatgtggtggtctcatccagcaccagcgtcttgttgctgaacgtacgtgcagcccaccgctgcaggcagaaggggtggtgagggggcgcaaccctctgccctgtcagccccacttctgcctgcaggccccgtcccctcggccatgggacccatccccagcccgcccacaccccgctcaacactcacccctcgcttggagccgctgctgcaattgaggcagcggccctccaagtacacgtaggagctgcggctcacttcgtacacggcctgtgccttgcaggacacacactccaaggacacaatgggcacccggccactccggatcagcacctggcgtgggagtggggttacctccaacacaggtctatttggcctgctggaaggactgggggacccatggaggatgctgctcccaaactccaggtttcccaggggcctggccactgccggtgagctcactccctcccaggatactcatccggtttgccaccttccaacttggacggcggaagggcatacacagggcagaggacactggagtgtgcgttctggtgtactggacccagctggaccctagcaggaggcaggcaatgctcactgagggcccctggggggatgcgtgtgagaagagacgtatgtgtgggtgtgaggaccgcagctgccacgtaggcctgactcacagactcctgcagcccttagccagggcctgggtcaggaggctgagctgggatggaacctgctcccacaccctcccctcagacgacccctctgggaagacccccaatcaggccagctgaggaaagcagggactggggaacagacgcccactctggggcaccagcaggccccgcctgacagcagcaggagcagccaccacgggctcagggtcaccaagcctcctggccggtccagagaggggagcgtgagggtgagaaccggcccaccacatccagcaacagggacatgggctggggacagtggctacctctggggtgggaaggggctcttcctcactgttggtattgctaggggactgtgtagcttttgccactagagcatatgtggcttgaagactgtacgtggaactgtggcaggtttggaaggaagcaaagctgaagcaggctgtcgtgttacatagaatttgcatcagaaacagagaggggagagcgtgcggcctccaccagcactaaaacacggaaaacagtagatgaccagggaggctgggctgtccaaggcaagtggccgaggggcgggcggcacccaccgtctggttggtggcctcctccttgcggccggccttccacacggtcaggctgaaggtgtactccacgccagccgccagccgctcccgtggaatggtgaccgtgctgctcccgcggggcccaaagttcagcgcacacccgccagcctccctctgcaggccgagaacaaggggcgacgtggcctgagagccccatccagttttaaagcagagcccggcccaggagacagcgcgggagaccccctccccatgctgggacggggcccaccaggcactgaggacgggccagccctggtggcaagctgggtgttctctgggctcatgggtgtggacgggtgaggggcatggaggacggccctgccacgcactgacctgtgtcgaagccacacaggcccagtggaaactgagcggcgtctggtcgccgtcctccaggttggggtcgtaggactcgctcccatccagcaccaggtcccgtgtgtctgaccacacgcggtatgagccaccctcaatgatgggcaccaggcgctcgggggccaccgtcacattggcctggatgctctgtgtcagtggcgtgtccccaaatgacacgacaaacacaaagcagtagtgccccacaggcagcgccagccgcggcagcaccagccgaggccggctcacgtccacgccgggcagggccacacgcgctgggcgccccggccgctggcagctggcggtgcgatacacctcccagcggtactcagtctggtaggtgacgcagtcgcgcaggtcaacgtgggcctccaagtagttgcgctgtgatcgccgcatcagcacctgcaggggcaggaccacgtccacctccggctcccggcaggccagcacctggacggt

SEQ ID NO: 1886666 - DNA, 4001 bp, Homo sapiens
tctcactatgtcacccaggctggagtgcagtggcgcgatctcagctcactgccacctctgccccctgggcttaagcaatcctcccacctcagcctcccgagtaactgggattataggcacccaccaccatgtctggctaatttttgtatttttagtaaagatgagttttcaccatgttggccaggctggtctggaactcctgacctcaagcgattcaccctcctcggtctcccaaagcactgggataacaggtgtgagccactgcacctggccaaattgggtaattttaaagataaatatattctctcagttctggaggccagaggtctgaaatcagggtgctggcagtccccgccccctctgaaccctgcagggaggacccttcctgcctcctccagcttctggcattgctgacaaggtttggcgcccctgggcttatggatacatcaaccccagctctgcctccatcctcacgctgcgctctcccccgtctgtgtccacatttcgtattctttttttttaagagacagggtctcactatgttgcccaggctggtctcaaactcctggattcagagcaatcctcttgcctcagcctcccaaagtgctgggatttacaggcgtgagcctccacgcccagcctcagatttcccttttttgtttgtttgcttatttttgagatggagtctcactctgccacctaggctggagttaagtggcgtgatctcggctcactgcaacctctctcttgtctcctggattcaagcaattctcctgcctcagcgtcccaagtagctgggactacaggcgcccaccacgcccagctaatttctgtatttttagtagagacggggcttcaccatgttggccaggctggtctcgatctcctgacctcgtgatccacctgcccaggcctcccagagtgctgggatgacaggtgagagcaccgcacccagccctcagctttccctgttcttagaaggcctccagtcattggtttagggcccacctgatccagtctgacctcatcttacccatctgcaatgaccctgtttcccaacaaggtcacattctgaggttctgggtggatgtgaatttgggggaccctgttcccccaggacagagggtgagaggaaagctgtggcttgggaagggagggccatgcccagcgttggaagggtggggggctggcgaccaactcctcagcctcccgcctcccacaggctggccggggccctggacctctcctcctgcccccagagccggaaggacgtgctctacaccaaggcccatgagaccttcggcagcagcgggaccctagctgcctactaccgcctcatgcgcccctacctcggtgagccctgtccatgggtgggcacccctcccccagaagccccacccccctcaccccgtccccccaggcagcttccctggtggagcccagcccccctcaccccatccccccaggcggctcccatggtggagcccagcccccctcaccccgtccccccaggcggctcccctggtggagcccagcccccctcacccgtccccccaggcggcgccccggtggaggagctgcggcacctggcccacgccaacatctccatggacatcgacaccttcaccagcctgaaccccctcgagctgcaggtggggctgggctaccccgtgggggtgggggtgggggtgggggtgggggtgcagggctgtcccaggcaggggagcccctaggtcacaggtcacagccagcatacccccacttccctcctccaggccgtttctgggcctcactcccgccatctgccccatcctgggtctggccctaccctgtgggtcttcccctggcccagaagttggccccacggcccctctgccccacccctctccgcagagcctggatgttggcaacgtgactgcgctgctgggccacaacgtgggagaccttcagaaggcccgcagccaccccaccgtcagggcctggctgcgcagcctcaacagctccaccctgggccagctcggcctggacgccagccccaccagccccactggcccagcccacggcaccagggggccccccagcaccacccaccaagtgctccatctggtccacacctcgggcctgcccacgaacgatgcccaggcctccacctcaggtatggcccccgcacccctccggcttggccccctctgcccagggccctctcagacccgtccccgcctcgtggccactcccacaggcctgtccaccagctttgtccattgcctcctgggatgaggctggccaaccctgcttcacccttcattgaccactgagttagagatacagctgcctctcctaaaacccactgaccagcagaaagtgggagcaggggaaactttgagacctttgttgggtcccaggagagcagccgcaggtgggtgtcctcgctggctgtccccaccctccccagccagagggagggactgcccaggcctgtctggctctagggggtggatatgggggtagcgtctggtgggactgatggtggcctccctgttccatctacaggcagcctgtgggcccccctggggtacctgcccctggcgatggccctgccttgcagcctcctgtgcctgctgcactgggggacttgcatcctggtttctgtggacagcgttgcctcagggtggctgggttcacaggggtcaggtgcaggaaaaacagaggtgttagattcagctggacgcccacttgggctgacgggccagctctaggccaggccaacctacccaagccccacctcctagaccgtcccacccatccccgcctccaggccctgggagctggactgaggaccaggccctaagaaggtgcctcccgcacaaccacaggcccaggcgggccacggaagacgctgcccgggccctgcggagggctggggctggggctggggctggggctggggccggggccggggccggggccggggttggggttggggttggggctggggccggggccggggccggggccggggccacagacttcactgctggacatgaataaagtccacggtcgtggtcctgcctgtgtctgtgctcagggcctgagcaggggggcccgggaatgtcctagccggggccaagcctgtggggacaggggcacaggactcccaccaccggctcctggggccaccctgagtgctggcctggccctcagcacagtggcagcagggtcaggaagacctccaagggcccccacctggcctgggggcgcaagaccagagggagaggggccacgctggtggggtcacagaaagtcctcggaggccacaagacgtgtctgcagggggcatgttcccgtttactgagcgcgagttctcttggggtggaacggggaccacccgtgcctgctcctggccaggcggggatccccagcagggctggggccagcaagggagtggggccctcaggccagggtggaggctaggagcagtgccaggacggtgagaacaggtccaggtcctaggaggcagggcgtccccgagagggcctctacagagagaggggtgactcagagcgcccacctccacgcccccagctctgcccccagccctggcctggccgccccgcccaccttgcatgctgaggtctaggaccaggtagccgttggggatgccgccctgtagccccagccccagcgtgtccaggtcgtcctgccgctgccgtaggatccagtcccgcaccgggcggtgccgctcctccgccttcaggccctccacgtggggtcccagaagtttctgcacctcagccacagtcaacggctgccagagaccccgggcagccatcaaggagggtctccttccctcagcgccgccagagggctgccaggctctcctgtgtccaaactgccccacccacagatgcccaccgcagcctctccagacttcggaggtctccggccagctgacctcagctcaatggctgcccttccctaggccccaccacacgggaagatgc

SEQ ID NO: 1886667 - DNA, 4001 bp, Homo sapiens
caggctggtcttgaactcctgacctcacgatccgcccacatcagcctcccaaagtgctgggattacaggcgtgagccaccgtgcctggtccccggatttaaaaaaaaaaaaaaaaaagataataaggcagagttgatttgagggagctgtggtgatagttatatggaccactgcaatcaggtcttgtggttggggaagaaattggactcagctccctgaaacgtttttagcagttattctctcactgccagccggttgtggcccaggagctttgtcgtaggttgcagtgatggatgtgcagtcagatccagggaggcggccgcccgacctcctcagtcgtctctggtcggaagacctgggacgctggattcaggcccaagagcgcatctgaagacagctctggatgcttgtggcagggtttgctccctccttccatgggaatgacactgcatcgagctggcacacacaggcccgaagagactacacctcccagttcccgtctggtgagatgtggtcacaagactaagctcagtgcaaaggtgaatgtggcaggtacaggtgtcacagggacaagggcagcaccctagttggtggcagagattaagatgggagatggggctcctctgcttcctcatgaaacaaaaaacatgccaatgacctgagcctggaacctctgcctctgggttacctgtgcaagaaagaaacaagtctctgtagcttacacatatgctgtgtgcagccaagcctatcctcacccaccaggctctacagaggagtcggtctggaaagcacttcctcgggaaatgtagaccatgctggggacagctggtttaggaaatgcaaatcgtattgtgagaatcatttccacgttatttccaaaggcggaactaggggatccagcattagttaaaggaaagcagtggtctgatttgaaaaggacaggctgccgtgtaaggacgcacgctgctgctgagagacacccacgtggctggagtgggctctgcagggcaccagtgggggacgaaaaactctctaactccaagagtgtaggaaactctggcaacagactttagaacccaacttcagagaagggcagccaactgccaccctccctgatcagtcatcctgctgccctcaggagccaggggacagggcagtccagcctgtgcctgccagagcgaggccacactttgggtcctgagactgcatgccaggatgaattgcctggatgcaggcaccccacacagcggcccccacacgctgaaggctgttctgccacccctgcctgcaaaaggccctcagcgtggcactccatgtctgaccaggtgggacactcgtggctcatgagtcaagaaccagtgagggccaggcgcagtggcttgtgcctgtaatcccagcattttgggaggttgaggcgggcggatcatttgaaatcaagagtttgagaccagcctgaccaacatgatgaaaccccgtctctactaaaaatacaaaaaaattagtcgggcatggtggcgcacgcctgcagtcccagctactctggaggctgaggcagaagaatcacttgaacctgggaggcagaggttgcggtgagccaagatcgcaccactgcactccagcctgggtgacagagcgagacttggtctcgggaaaaaaaaaaaaacaacacaaaacaaaaccaaaccagtgaggagcacatgaagggcaggtgaccctgaacccgggaaaggccagcacgtccctgccagctgggccaagggggcttctcaccgggtgcagatgaccatgcaggcgatgcccagcagctggagcctgtaccgcggcaccagcctcctccgcaggtaccggtccacacactccacggtcaggtgcaggcacaggcttgtgaagtccttcatggtggcaacttccaccagccagtcgatcagaatgtacctgcggaaagagaagcacgtgggaactggtgggggcgttctccatgtgtccctgtctgcgatttcaaccccacctgttgggcccgaccaaataagctggctagctctggaatcatgggtttaccctggaaccaaggctggagaggccatgtcacaggaagcccgggaggctccgtgggtcccagccccaaagcaggccccacatccttcgactgtgttcctggtgctcccaaacacaagcgctttgagacctcgacctgacgcaaagtgaaaagtcagcccacagccgttggtctgcccacagtggatgaaccctgaccctcggggcgtgcagggagcgggagaaggtggacagtcgcaagggaatgccccaatacggtaaatgatgccccaatatggtaaatgcctttctgaatagagtggagacacttgtagtcctacttgggggactgaggcaggagaaaggcttgagcccgaggcagaggttacagcaagccgagaacacaccactgcactccaccctgggtgacagacagcctgcctcaaaaaaaaaaaaaagatgttcaatgtgttctgtggcttaaaaaagatcactgcactgtgggaggctggggcaggaggttcgcttgagcccaggagttcaagactagcctgggcaacatagtgataccctgtctctactaaaaatacaacaattagctgtgcatggtggtgtgcatctgtagtcccagctactcaggagggtaaggtgggaggatctcttgagcttgggaggcggaggctgcagtgagctgaaatcatgccactgcactctggcctgggtgacagagccagaccctgtctcaaaaaaaaaaaaggtggctgggcgtggtggctcacgcctgtaatcccagcactttgggaggcggaggcaggcggatcacgaggtcaggagattgagaccatcctggctaatacgatgaaaccccatctctactaaaaatacaaaaaaattagctgggcgtggtggcaggcacctgtagtcccagctcctgaggaggctgaggcaggagaatggtgtgaacccgggaggtggagcttgcagtgagccgagatcacgccactgcactccagcctgggtgacagagcaagactccgtctcaaaaaaaaaaaaaaaagtaactgaagaaagcagagtaggatattttcttccaaaaagtccacgataactttggcattactggttttaaaaaacacccaaggctgggcgcggtggctcacgcctgtaatcccagcactttgggaggccaaagcgggcggatcacgaggtcaggagattgagaccatcctggctaacatggtgaaaccccatctctactaaaaatacaaaaaattagccgggcatggtggtgggtgcctgtagtcccagctactcgggaggctgaggcaggagaattgctcgaacccaggaggcggagcttgcagtgagctgagatcgcgccactgcactccagcctgggcgacagagcgagactccacttcaaaaaaaaaaaaagggtgataagggaactctatgccgccctgtcacaggtaactggggttaagtggaaagggctcccttcccctggaggctggcttccgcgccgctctgattagaagccccggcctgaatgcctcacctcattgtgtcattgagtcccttctgcacggagaagacttgttgtttactgacagcctgggaagcctgaaatagctggcagacgatctcactggaagctctcacctccagtccaagctggtttgcatttgcacaggctttggctaaagacagctgaggaagaaaagacaaacatgagcgtgagacagcagccatgttgcagttttccatttctgaagcaaaggcccattcaggcaccaaatgcatgtggacacactgccctacttaacttaaaccttcacaagcttcgggaacaaggatggctcaggttttaattattattcctttttgtataagtaatagatgacatgagaaaagatatataatgaaatgtcagtggcctttccaccgtggctcaggtctcagtttct

SEQ ID NO: 1886668 - DNA, 4001 bp, Homo sapiens
ggctcagtgtgaaccggtgaccccacacctgccccagcaccagcgccaggagggggagctgggcatgggcaccaggagacagtgggaagcagagccgtgtggctgtggcagagacagtggccggcctgttctccaatatggccttgtggttttcgtgtcctccgatgaatgcatacagcctacagcctacagggggcagggctttcagcaatgctgggcctgccttgagtggccttgtcccgtcctttatacagaagggatatcgagacagagtctcgctctgtcacccaggttggagcacagtggtgcaatcatggctcactgcaggctcaaagtgcgaggctcaagcgatcctcccgccttagcctcccaagtagctgggattacaggcagacacgccatgcccggctcattttcaaattttgtgtagagatggggtctcactgttgttcaaactggtctcaaactcctggcctcaagcaattctcccacttcagcctccccaagtgctgggattacaggcgtgagccaccacacccggcccacttataatcttgataaatacacttgatatattctttttcagcatgacatgtatcaaccagtgatataacttgataaaatcataaagaaacaacaagggctcaccaagtcctaccttggcatgatttaaatacatatgctttcagccaggcacggtggctcacacctataatcccagcacgttgggagggtgaggtgggaggatcacctgaggtcgaaagtttgagaccagcctggcccacatggtgaaaccccatctttactaaaaaaaaaaaaaaaaaaaaaaaaaaaaaaatagccaggcgtggtggccgaagcctgtagtcccagctactcgggaggctgaggcaggagaatcgcctgaacccagaagcggaggttgcagtgagctgagatcacgccactgcactctagcctaggcgacagagtgagactgtctcaaaaacataaataaacacaaatgctttctaaagtggctttaatatcacacaagcggctctttggtctacagtgagagaaaacagagggagccaggaaaggctccccgctggcctctggagtccaggagccttaggaaggctgaaagccagccctgaccagcaggcttagttgtcctgagaagagccagtgaggccacctggtccagttcaccaggtttcccagggaagcacaggcatctctgggtccccgagcacagtgccagggaagacacccccaatccccatctgaacaggccgagggcagcatgggaaaggctcagactgcaggttcatcccgcaggatggtaaggacacgtgctcctccctcgcagagcaggctgtgcacagcccggcacagggccagccagggcggcccctgcggctgtgcagcgcttaccagggggaggagttcagccatcaggacctgggggcagggcagggcagggccaaggtctcaggggcacctaggcggggggcaatcctgggacaggcttcgaggcccccatgcttcagccctcctccctccttctgaggctccaggctccctcctgccgtcccagccccgtctgacccatgcacttcccaacccacacacacagaccccaggcttgcccccatcctcctgggtcctggggggtggagcagtcaagcccctaccctcgggtcctcaaggctgcggacctctgttgcacccccacctcctcttccagaagcaccttttccaagtggatctgctggtccagcacagccactcgcagcttgagggccgccagggtctgcagctcctgggtgctggagtagacaagcagctgggggctccatgcaggctccgctctacccccacaggacggcgaggctccggggggcctccccacaggacatggtcttggtggctgttccgccaccgctgtgtgcacaggagaatgtggcctttggggtagcagccgaacccagggccccgcttttcctgtgtgcctggccctcccgcatctgcaccacctgccctgcctttaggagaaaggtgggctttcaggacagccccatgcaagatggtgtgtcttgggcctggacttgctggcagggagtcctctgtggggtggccctctgcctgcctaatttctttactgtgtttatgcatgacttttatgagattgtctttccttttgacaaatgatgtatcttcactcttaaaacttcaagcaattagaaaatacaaaggaggaaacaagttctataaataaccacctcacgcaatcccaggcgagtcacctcccaggagctgattctcacgagctactttctctttttttttttttttggagacggagtctcactctgtcacccaggctggagtgcagtggtgcaatctcagctcactgcaatctctgccttctggattcaagcaattcttgtgcctcagcctcccaagtagctgggattacaggtgtgcgccatcatacccagttaatttttgtatttttagtagagatgggctttcgtcatgtcggccaggctggtcttgaactcctgacctcaaatgatccgcctgccttggcctcccaaagtgctgggattacaggcgtgagccactgtgcccggcctcacacgctactttttctttttctgagacggcatctcactctgtcgcccaggctggaatgcagtggcgcaatctcagctcactgcaagctcctcctcctgggttcacgccattctcctgcctcagcctcccaagtagctgggactacaggcgcccaccaccacgcctggctacttttttatatttttagtagagacagggtttcaccgtgttagccaggatggtcttgatctcctgacctcatgatccacccgccttggcctcccaaagcgctgggattacaggcgtgagccaccgcgcccggccctcacatgctagtttttcaacaactgggtgaataagcaactgctcagagcaatgaggttctgtgtgcggggagcagcgaggtgggagagctgccctgaggaggagaggaaggctgactgctcccataggacgactggtgaggacccagcacactggggagtggcgtgggaggggtggaggggcccaccaacttgcatctggtccctgggctgctcacccttccctgaggcgcagacaagcctggctaaagcaccctgtccccggcccagacctcagtgcaggtggcagggtgggggcggggtctcacctgcacgcagctcctgcagcctgtgcagacactggcccaccatggcctgcagcccctccagcgtgagcaggcagcggtactcctgcatccagtccatgggggctgcagaagagtcagggagagcaggtggggcccgtggcagtctggaaaccctccctgcactggccctccacactcctcctgatacagacccaggacccactgacctgccgagagctcctccctcatgcgcagtctcagcagcgagcaggccttccgcaggcgccccgcctccgcctccacctccacagcactgagcctgggctggggcccgcctgactggatatgggtcaggaaaacttccctgcagccaaagcccctctgctcccaccaagaacggggcctggggagtggccctggccatcccacgccagcccctcctggggctgctctgcaaacctgccaggttcagagctagaggcccccagggctcccacaagcccagcaaggatacagctgtctgcatgttctggaggaactgggttttggcagcggcggcatccgtggaatcactggtctgtgtggaactgagctgggcccacaggctggggtgcacacgtggggtgcacagaggaaccacagagggacacggttattccagccagtaagctgggccttgggaggtaggcaagggccagggtggggaccccaggctgggcgtctggctctgctgaatgccaggaggggcctccagaggccgcagggaaccaagaggacactgactagg

SEQ ID NO: 1886669 - DNA, 4001 bp, Homo sapiens
caaactcagcacctggcagagggggagggtctgtgcccctcacccacccaaatcatgagaacatggtctctttctgttcttcagacctaaagaaaaaatgaggaacagatgcacctaagaaacacatcttcctgagggtcagggtacccgttatctttggtttaaaaaaaaccaagttaatggtcaggcgcggtggctcacgcctgtaatcccagcactttgggaggctgaggcgggcagatcacgaggtcaggagatcgagaccatcctggctaacatagtgaaaccccgtctctactaaaaatacaaaaaattagccgggcatggtggcacgtgcttgtagttccagctactcaggaggctgaggcaggagaatggcgtgaacccaggaggcggagcttgcagtgggccaagatggctgccactgcactccagcctgggcaacagagcaagactccatctcaaaacaaacaaacaaaaaaaacaaaaaacaagttaatatgttagaagtattttcattaatggcagctaccagaaaccacattagcaactggacaaaaagaaagccaaaaatctaaaacaggtgtccacaaactaggcctgtggcctgtttctataaataaaatcttactggaacaccgccacacccactcatttttatacagtccccgctgctcctgttgtaatggcagcgtggagtcagtgcaacagagaccatatgcccgggcggctgaaaacattccctctctgaaccttttctcaaagtgggccgccccctggtatgaaacatgaatgcactgacttccctgggttgaggcgaggcccggccaggtgctccgctcccgccacgtggagctgctccagttgtcctgggcccagatgccataatgaagcgggcctgtgagactttccaagagatcttaagaggcaggagtttcactcatgtcagtgtgccttttaacaagttcatcgaccaggcgtggtggtctcaggcctgaaatcccagcactttgggaggctgaggcaggcagatcacttgagatcagaagtttgagaccagcctggccaacatagtgaaaccccatctctactaaaaatacaaaaattaaaaattaggctgggcgcggtggttcacgcctgtaatcccagcactttgggaggccgaggagggtggatcacaaggtcaggagatcaagaccatcctggccaacatggtgaaaccccgtcgctactaaaatacaaaaaattagccgggtgtggtggcgcgtgcctgtggtcccagctactcaggaggctgaggcaggagaatcgcttgaacccgggaggcggaggccacagtgagccaagatctccctgctgcattacagcctgagcagcagagtgagactgactcaaaaaacaaaaacaaaaaaaactaatttcatcccctgctacattccctgactggggtacaccacggcttatttgtcaggcaccaggactggttctatggacatacagaataagcatccctcccccaggagctgcagggacgtgctgtctctggggaggcgggcaggagccgggcagcagggtgccacacacctgagcctagagggtgagacactggcccccattcctgggctgccctggggaacctggatggcaatttacatcagaagctagtgaatttgctggagaaaggataaaatgttccctaaactgttagctttaaaaaaaattaaggaaaaatgatgttgtctagcgggtctaggactccaggggaaggcatggaagggaaccggcaagcattgctgtccgcggctgctcctggtgtgggcttctgtaatggcagagggaaacctcacccagatacacaccttggtctcctggttgttcttgttctcaatgccatagatctcctgcaggaggtagctgacccggtccacctggagagcagagaggggctcactgggccctcgccaactgccatatgagggctcctccatacccacctggcctagccctgcctccaacttaccaggcttccataccaggggtcagtccagctcaacccctgggggccaggagaagggcagggaaaacctgctgcttgcccccacccaaccagcagcacctggaacagggctggagccggtggctctccccactactgggggcctgaagccaacccacaggcccaaccaccaccccctgaccgcctcaccacccccaacaccacttggctccaccaccaccagccccacgaggaaagcaggagctgacgcctgaaggcaccagacagcagcctaagttcccactgctttccagatcctccttccaaaaggcatgaagcctctctggtttcaaagacgccaaagcaatgtctccaagctgattctgtcctgccacccacttgcaaccaaaaagcctcacgctgaccacattgcaaagcggtttgtgctgctgggtttcccagagaccatgggccaggagcaccactccagggagcccagggcctgctggtcagctctctcaacacaaggccctgaccatcactggggtctcctgttcccctggtacctgcagggacctggacctgctagagtttgctgcacctctcttttgtttattgtgatttacattttaaatagacaggatctcgctacattgcccaggctggtctggaatccccaggctcaagcaatcctcctgcctccacctcccatagtgctgggatcataggcataagccactgcacctggacaaactctcttctaaaaagctaacagatggccgggtgcagtggcttacacctatcatcccagcactttagtaggaggccgaggctggtggatcacttgagcccaaaagtttgagaccagcttggccaacatggcaaaacctcatctctacaaaaaatacaaaaattagccaggcatggtggcgcgtgcctgtagtcccagctactcgggatgctgaggcagaagaatcacttgaacccaggaggtggaggctacagtaagctgggatcatgccactgcactccagcctcggcgacagagtgagactccatctcaaaaatacaaaacaaaataaaacaaaacaaattaaccaactgtggtggcgcacacctgcagtcccagctacttgggagcctgaacgagaaatcacttgaacctgggagacagaggttgaagtgagctgagatcgcgccactgcattccagcctgggcaacagagcgagactctgtcttgtctcaataaaataaaattaaaattaaaattaaattaaatatttaaaaaattaaaaactaacaaaaatcattcccaagtggtggcttgaaacaggtcttatgcgccccaacagtacacacggagtaactgttagctgtggcctaggacatctcattagcaagatctaacactgctgtttagggcaccccatcctctaaattctcggtgcctacttgtgaggccaccaggaataacacttcccaatgcagcatcccaggatcgctgaccccagagaacagatgtactgctctatagctccatttattctcaactatttaatccttcttttcaagtattgatgaagtcaagctaagtctctgtccaatactgacatattggacaatttgtaaggaagaggagaaggagttgcagactttgtttctggtctctttccttccttttccatccatccattcggcaaatatttacttaacactatgttccagacacaatggctcaaactggacagaactcagggcctgcaggcgtccctgtacatggcgggcacgcaaaacatatatgctcacccaagacagggacccgtcgtcccagagcttagagctctacagggaagtcaacaggctgttgcacagctttttttttttttttttgacacagtcttcctctgtcacccaggctggagtgcagtggcatgatctcggctcactgcaacctccacctcctgggttcaagccattctcctacctcatcctcctgagttgctg

SEQ ID NO: 1886670 - DNA, 4001 bp, Homo sapiens
ggcgcgggagggaggtcaggttcgcagggcgccccaatgcaggggcagaggggcagagcttggcagggtccatacagacctttgttgtcgtgccacactcggatcttccacacgctacccaggctgtgcggggtggcgatctggaagatgtccagactgttgcggtggaaggctctgtcgccgtccaggtgccggtggccgctccggctgtccaccccatacagcatgatgcccacgtgggccgtggtacctggagggcaagagggaggggtgggaggctcggtctgctgcccaacacgtgtggcatcccaggcaagtcatctcagctttggcctccgcgcactcaaggagccacacaggcagtcccggctttgcacagctctgctatacacgaggagctgcggttactgcaatttgtccaataaacagcaggacctcaaggacatgattaagttacatggaaagaactgtaacttgtgacatgcaaacatggctgcacacgcctcagtccacaccacaaccagtgacccgcactgcacacctgtccacgcctcagtcacgccacaaccggtgacctgcaccacacacccgtccctcagttcatgcacagactgcgaagcgtgaagctgtgtcacctcctctcccagtgacagacccaggtgacagtattttttttttttttttttttgagatggagtcttgctgtgtcacccaggctggagtgcagtggcgcaatctcagctcactgcaagctccgcctcccgggttcacgccattctcctgcctcagtctcccgaggagctgggactacaggcgcctgccaccacgccggcctaatttttttgtattttttagtagagacagggtttcaccgttagccaggatggtctcgatctcctgaccccgtgattagcctgcctcagcctcccaaagtgctcggattacaggtgtgagccaccgcgcccggccgacagtttttaaaagtaggtaatcaaaagaaagaactgggaaatgaagatgaaagcagcatggaaataaaaaatgggaacacggccaggtgtggtggctcacacctgtcatcccagcactctggcaggccgaggcaggcggatcacctgaggtcaggagttcgcctggctgacatggtgaaaaattaactgggtgtggtggtgtgcacctgtactcccagctactcaggagaatcgcttaaggggaatcgcttaaacccaggagctggaagttgctgtgagccaagatcacgccattgcactccagcctgggcaacagagcgagactccgtctccaaaaaaagaaaaacgaaaacaaaaagggaatgccagaagggcaattccaataaaggaaaatggaggtattgaagaaacagccacggggagggtgctggcacctccgcctgagagacgagctatgcagtcaggatcgcgggtggatgcatggtctcccacagtggtagcgatgctcatgtcacttgtggggccacgctactgtgcagaacgtgggctgcccaccctgactgactggcacctacttccagctaggagctgtcctagtcctcagggacagtgagtgctcacgaggtcattcccaggatgaacacacgagcccttcacacagtactgcaaaaactgccttgttctgacgcctgcgacgagactcattcccagagggtgcaaccagcacagccagtgagagcaggggaggccctgccaccccgccgcgcccctcacctgagccccggccccagcctgtcttgacgaggatctcgtacttgaagcggccccgctgcccacagaaggggatggcgcggccccggctggcatccaactggtccagcttgtgcaggatggcggccatgaccatgtaggtcaccaggcacacagcacatgtcagcatgacgatgtagtttacatccgctgttggctcctgtgaagacacagccgccaggcccaggaggtcacgtgcaagctgtgccttctcaggatagagccgagcccacccaggccctcctcgactctgcagaggctcccaggagcacagggtcactcacaggaaacacaaagcggatatggcttgggggcacgaagaggctggtgccgaaggcggtgaggtggcgggtgaggcagacggcctggcggggcgaggtctcctccaggggcagcagcccctctgtccgccacaccacgtcctcctcgctgaagtactggcacagggacgtgtacaagcccacggacacctccagcgccgaccagcggaagtgactggagaggttcagacggtaactccccactgggtctctggtcctgggaagggaaggggcagtggacgtgagcccaggctccgccaggttggatgtcgaagtcccagagcccatacccggtccagtcccctcgctgcctgccgtccccacggggcccgtaacccgggcaatgctgacccatgatgccctgccctgccctgccaggccggcccgcagagctcaccccggggaaatgaagaaggtgtagggccggtggtcggcaccctggagggactctgggcggatcctcctgctagccgagcagttgcgctcattgggccggggctccgagtgcaggtagactgccaggtagggctcgggttcctcagacaggtagcggcctggggcagaacgcgcaggtcacacgcctgccgggaagctcaaccacccgggggacacccacgatggccctcctgagcccaccctctgccatgggcctgaaaggccataggagcctctgcaccagagctggcacctgcttctccgtggcccccagctcctctccggccaggcccccagcagcccatgaaacagaaagcaaatttcaccagagacacccatggaagccctacgagaaacgccttccccccaagaacaaggccagggggccgcgtgtgccccaaccgctgcatgcaccgtccagcagcgtatagttgagctgcagatgcagcacggccgcagggttgctgctgtccagggtgaccacagcaccgacggaggcctggggctggaccacaacggagttggcggagctgcggtggccccgggcagcccagtccgagttgttgggcaccttcacggtgaggcgcgctctgaggccagccgctcgatggggatctgggcgccggcctgtgtctggaacgccatcgaggccaccttggtggagacggtgtagttgctgatatagccaaagggaaagggattggagtccaccagaaagatgagctgcaccacgtcactgaggttggccggggccctgctgaaagcctaggggatggagaagtggcagccaggccctggggcgccgccatagcacagcaggctccgcgggtccgagcgcttgccctgggccacgatctcctcacccgccagcgtcaggggctcctcgttgagcacgcgggagcgcgtgaggatgggcgtgagggcagaggtcaggttgtaggcctgggacgccaccatccgcgatggtgactcggctcccagctctgagcgctgtggtgcccgcacgtctgagctggccaggtggatgaggtctcctgcagacaggcgtgaggtcagtgcagagacagggaggcagagggagggtgggggcaggcaaaaagggggagccggagggtggggactgggagaaagggggaacctgagggggcagagagcgaggtgcaggcagaaggaagggggaagctggagagagagtggtggagggggagggggaaggggatggggatgaggacgaagatgagggggatgatggggagagggaggaaaaaggaaggaaaagggtagagaaaagagaaaggggagaagaagaggagcagggggaagggaggggaaggggataaggcggataagggaggggaagggggataagggaggggaaggaggataagggggataagaaagatgaggggaatggacaaaaggacggggaggatcgggggggaaatggagaaaaggggagagagat

SEQ ID NO: 1886671 - DNA, 4001 bp, Homo sapiens
cgcgggagggaggtcaggttcgcagggcgccccaatgcaggggcagaggggcagagcttggcagggtccatacagacctttgttgtcgtgccacactcggatcttccacatgctacccaggctgtgcggggtggcgatctggaagatgtccagactgttgcggtggaaggctctgtcgccgtccaggtgccggtggccgctccggctgtccaccccatacagcatgatgcccacgtgggccgtggtacctggagggcaagagggaggggtgggaggctcggtctgctgcccaacacgtgtggcatcccaggcaagtcatctcagctttggcctccgcgcactcaaggagccacacaggcagtcccggctttgcacagctctgctatacacgaggagctgcggttactgcaatttgtccaataaacagcaggacctcaaggacatgattaagttacatggaaagaactgtaacttgtaacatgcaaacatggctgcacacgcctcagtccacaccacaaccagtgacccgcactgcacacctgtccacacctcagtcacgccacaaccggtgacctgcaccacacacccgtccctcagttcatgcacagactgcgaagcgtgaagctgtgtcacctcctctcccagtgacagacccaggtgacagtatttttttttttttttttttttgagatggagtcttgctgtgtcacccaggctggagtgcagtggcgcaatctcagctcactgcaagctccgcctcccgggttcacgccattctcctgcctcagtctcccgaggagctgggactacaggcgcctgccaccacgccggcctaatttttttgtattttttagtagagacagggtttcaccgttagccaggatggtctcgatctcctgaccccgtgattagcctgcctcagcctcccaaagtgctcggattacaggtgtgagccaccgcacccggccgacagtttttaaaagtaggtaatcaaaagaaagaactgggaaatgaagatgaaagcagcatggaaataaaaaatgggaacacggccaggtgtggtggctcacacctgtcatcccagcactctggcaggccgaggcaggcggatcacctgaggtcaggagttcgcctggctgacatggtgaaaaattaactgggtgtggtggtgtgcacctgtactcccagctactcaggagaatcgcttaaggggaatcgcttaaacccaggagctggaagttgctgtgagccaagatcacgccattgcactccagcctgggcaacagagcgagactccgtctccaaaaaaagaaaaacgaaaacaaaaagggaatgccagaagggcaattccaaagaaaggaaaatggaggtattgaagaaacagccacggggagggtgctggcgcctccgtctgagagacgagctatgcagtcaggatcgcgggtggatgcatggtctcccacagtggtagcgatgctcacgtaacttgtggggctacgctactgtgtagaacgtgggctgcccaccctgactgactggcacctacttccagctaggagctgtcctagtcctcagggacagtgagtgctcacgaggtcattcccaggatgaacacacgagcccttcacacagcactgcaaaaactgccttgttctgacgcctgcgacgagactcactcccagagggtgcaaccagcacagccagtgagagcaggggaggccctgccaccccgccgcgcccctcacctgagccccggccccagcctgtcttgacgaggatctcgtacttgaagcggccccgctgcccacagaaggggatggcgcagccccggctggcatccaactggtccagcttgtgcaggatggcggccatgaccatgtaggtcaccaggcacacagcacatgtcagcatgacgatgtagtttacatccgctgttggctcctgtgaagacacagccgccaggcccaggaggtcacgtgcaagctgtgccttctcaggatagagccgagcccacccaggccctcctcgactctgcagaggctcccaggagcacagggtcactcacaggaaacacaaagcgtacatggcttgggggcatgaagaggctggtgccgaaggcggtgaggtggcgggtgaggcagacggcctggcggggcgaggtctcctccaggggcagcagcccctctgtccgccacaccacgtcctcctcgctgaagtactggcacagggacgtgtacaagcccacggacacctccagcgccgaccagcggaagtggctggagaggttcagacggtaactccccactgggtctctggtcctgggaagggaaggggcagtggacgtgagcccaggctccgccaggttggatgtcggagtcccagagcccatacccggtccagtcccctcgctgcctgccgtccccacggggcccgtaacccgggcaatgctgacccatgatgccctgccctgccctgccaggccggcccgcagagctcaccccggggaaatgaagaaggtgtagggccggtggtcggcaccctggagggactctgggcggatcctcctgctagccgagcagttgcgctcattgggccggggctccgagtgcaggtagactgccaggtagggctcgggttcctcagacaggtagcggcctggggcagaacgcgcaggtcacacgcctgccgggaagctcaaccacccgggggacacccacgatggccctcctgagcccaccctctgccatgggcctgaaaggccataggagcctctgcaccagagctggcacctgcttctccgtggcccccagctcctctccggccaggcccccagcagcccatgaaacagaaagcaaatttcaccagagacacccatggaagccctacgagaaacgccttccccccaagaacaaggccagggggccgcgtgtgccccaaccgctgcatgcaccgtccagcagcgtatagttgagctgcagatgcagcacggccgcagggttgctgctgtccagggtgaccacagcaccgacggaggcctggggctggaccacaacggagttggcggagctgcggtggccccgggcagcccagtccgagttgttgggcaccttcacggtgaggcgcgctctgaggccagccgctcgatggggatctgggcgccggcctgtgtctggaacgccatcgaggccaccttggtggagacggtgtagttgctgatatagccaaagggaaagggattggagtccaccagaaagatgagctgcaccacgtcactgaggttggccggggccctgctgaaagcctaggggatggagaagtggcagccaggccctggggcgccgccatagcacagcaggctccgcgggtccgagcgcttgccctgggccacgatctcctcacccgccagcgtcaggggctcctcgttgagcacgcgggagcgcgtgacgatgggcgtgagggcagaggtcaggttgtaggcctgggacgccaccatccgcgatggtgactcggctcccagctctgagcgctgtggtgcccgcacgtctgagctggccaggtggatgaggtctcctgcagacaggcgtgaggtcagtgcagagacagggaggcagagggagggtgggggcaggcaaaaagggggagccggagggtggggactgggagaaagggggaacctgagggggcagagagcgaggtgcaggcagaaggaagagggaagctggagagagagtggtggagggggagggggaaggggatggggatgaggacgaagatgagggggatgatggggagagggaggaaaaaggaaggaaaagggtagagaaaagagaaaggggagaagaagaggagcagggtgaaagggaggggaaggggataagggggataagggaggggaagggggataagggaggggaaggaggataagggggataagaaagatgaggggaatggacaaaaggacggggaggatcgggggggaaatggagaaaaggggagagaga

SEQ ID NO: 1886672 - DNA, 4001 bp, Homo sapiens
cgcgggagggaggtcaggttcgcagggcgccccaatgcaggggcagaggggcagagcttggcagggtccatacagacctttgttgtcgtgccacactcggatcttccacatgctacccaggctgtgcggggtggcgatctggaagatgtccagactgttgcggtggaaggctctgtcgccgtccaggtgccggtggccgctccggctgtccaccccatacagcatgatgcccacgtgggccgtggtacctggagggcaagagggaggggtgggaggctcggtctgctgcccaacacgtgtggcatcccaggcaagtcatctcagctttggcctccgcgcactcaaggagccacacaggcagtcccggctttgcacagctctgctatacacgaggagctgcggttactgcaatttgtccaataaacagcaggacctcaaggacatgattaagttacatggaaagaactgtaacttgtaacatgcaaacatggctgcacacgcctcagtccacaccacaaccagtgacccgcactgcacacctgtccacacctcagtcacgccacaaccggtgacctgcaccacacacccgtccctcagttcatgcacagactgcgaagcgtgaagctgtgtcacctcctctcccagtgacagacccaggtgacagtattttttttttttttttttttgagatggagtcttgctgtgtcacccaggctggagtgcagtggcgcaatctcagctcactgcaagctccgcctcccgggttcacgccattctcctgcctcagtctcccgaggagctgggactacaggcgcctgccaccacgccggcctaatttttttgtattttttagtagagacagggtttcaccgttagccaggatggtctcgatctcctgaccccgtgattagcctgcctcagcctcccaaagtgctcggattacaggtgtgagccaccgcacccggccgacagtttttaaaagtaggtaatcaaaagaaagaactgggaaatgaagatgaaagcagcatggaaataaaaaatgggaacacggccaggtgtggtggctcacacctgtcatcccagcactctggcaggccgaggcaggcggatcacctgaggtcaggagttcgcctggctgacatggtgaaaaattaactgggtgtggtggtgtgcacctgtactcccagctactcaggagaatcgcttaaggggaatcgcttaaacccaggagctggaagttgctgtgagccaagatcacgccattgcactccagcctgggcaacagagcgagactccgtctccaaaaaaagaaaaacgaaaacaaaaagggaatgccagaagggcaattccaaagaaaggaaaatggaggtattgaagaaacagccacggggagggtgctggcgcctccgtctgagagacgagctatgcagtcaggatcgcgggtggatgcatggtctcccacagtggtagcgatgctcacgtaacttgtggggctacgctactgtgtagaacgtgggctgcccaccctgactgactggcacctacttccagctaggagctgtcctagtcctcagggacagtgagtgctcacgaggtcattcccaggatgaacacacgagcccttcacacagcactgcaaaaactgccttgttctgacgcctgcgacgagactcactcccagagggtgcaaccagcacagccagtgagagcaggggaggccctgccaccccgccgcgcccctcacctgagccccggccccagcctgtcttgacgaggatctcgtacttgaagcggccccgctgcccacagaaggggatggcgcagccccggctggcatccaactggtccagcttgtgcaggatggcggccatgaccatgtaggtcaccaggcacacagcacatgtcagcatgacgatgtagtttacatccgctgttggctcctgtgaagacacagccgccaggcccaggaggtcacgtgcaagctgtgccttctcaggatagagccgagcccacccaggccctcctcgactctgcagaggctcccaggagcacagggtcactcacaggaaacacaaagcggatatggcttgggggcacgaagaggctggtgccgaaggcggtgaggtggcgggtgaggcagacggcctggcggggcgaggtctcctccaggggcagcagcccctctgtccgccacaccacgtcctcctcgctgaagtactggcacagggacgtgtacaagcccacggacacctccagcgccgaccagcggaagtggctggagaggttcagacggtaactccccactgggtctctggtcctgggaagggaaggggcagtggacgtgagcccaggctccgccaggttggatgtcggagtcccagagcccatacccggtccagtcccctcgctgcctgccgtccccacggggcccgtaacccgggcaatgctgacccatgatgccctgccctgccctgccaggccggcccgcagagctcaccccggggaaatgaagaaggtgtagggccggtggtcggcaccctggagggactctgggcggatcctcctgctagccgagcagttgcgctcattgggccggggctccgagtgcaggtagactgccaggtagggctcgggttcctcagacaggtagcggcctggggcagaacgcgcaggtcacacgcctgccgggaagctcaaccacccgggggacacccacgatggccctcctgagcccaccctctgccatgggcctgaaaggccataggagcctctgcaccagagctggcacctgcttctccgtggcccccagctcctctccggccaggcccccagcagcccatgaaacagaaagcaaatttcaccagagacacccatggaagccctacgagaaacgccttccccccaagaacaaggccagggggccgcgtgtgccccaaccgctgcatgcaccgtccagcagcgtatagttgagctgcagatgcagcacggccgcagggttgctgctgtccagggtgaccacagcaccgacggaggcctggggctggaccacaacggagttggcggagctgcggtggccccgggcagcccagtccgagttgttgggcaccttcacggtgaggcgcgctctgaggccagccgctcgatggggatctgggcgccggcctgtgtctggaacgccatcgaggccaccttggtggagacggtgtagttgctgatatagccaaagggaaagggattggagtccaccagaaagatgagctgcaccacgtcactgaggttggccggggccctgctgaaagcctaggggatggagaagtggcagccaggccctggggcgccgccatagcacagcaggctccgcgggtccgagcgcttgccctgggccacgatctcctcacccgccagcgtcaggggctcctcgttgagcacgcgggagcgcgtgacgatgggcgtgagggcagaggtcaggttgtaggcctgggacgccaccatccgcgatggtgactcggctcccagctctgagcgctgtggtgcccgcacgtctgagctggccaggtggatgaggtctcctgcagacaggcgtgaggtcagtgcagagacagggaggcagagggagggtgggggcaggcaaaaagggggagccggagggtggggactgggagaaagggggaacctgagggggcagagagcgaggtgcaggcagaaggaagagggaagctggagagagagtggtggagggggagggggaaggggatggggatgaggacgaagatgagggggatgatggggagagggaggaaaaaggaaggaaaagggtagagaaaagagaaaggggagaagaagaggagcagggggaaagggaggggaaggggataagggggataagggaggggaagggggataagggaggggaaggaggataagggggataagaaagatgaggggaatggacaaaaggacggggaggatcgggggggaaatggagaaaaggggagagagat

SEQ ID NO: 1886673 - DNA, 4001 bp, Homo sapiens; identical to SEQ ID NO: 1886670

SEQ ID NO: 1886674 - DNA, 4001 bp, Homo sapiens; identical to SEQ ID NO: 1886671

SEQ ID NO: 1886675 - DNA, 4001 bp, Homo sapiens; identical to SEQ ID NO: 1886672

SEQ ID NO: 1886676 - DNA, 4001 bp, Homo sapiens; identical to SEQ ID NO: 1886670

SEQ ID NO: 1886677 - DNA, 4001 bp, Homo sapiens; identical to SEQ ID NO: 1886671

SEQ ID NO: 1886678 - DNA, 4001 bp, Homo sapiens; identical to SEQ ID NO: 1886672

SEQ ID NO: 1886679 - DNA, 4001 bp, Homo sapiens
ggagtgtcagagccaggctcctagacagcagcagcaggagcacgcaggactgtctggagccccaggagcctgccaggcctgagcccattcacccccgtccttcctcagcctccatagggatgggagagtcgcgcccagccatagagacagattaaagttccaggggcttcacgttaaagcagaagggagcaaaattcagagcctacaggagccctcggccccaccccaggccctatcactgcagacagccgaagggcactcctgcaggcagcccggagccttcccctttcccatccaatgttcaccacagcacagacttcagaactccctggtgagaggcagctccatgctccctcaagccaacctccacacccagcactttacaggcatcgagtcctcacacagcccttgccgaactcccgttctacagatgcacaaactgaggctccaggacattgagacttgctgggaagccaagagctggcatctgcaccagttctccctgctccaaagtccttaagctcatggaccatccacagcccagagaaaaggcagcgggccagccttggatgtaatgctggcgctgcaggcagaggacccagggggtctcctgggacccacatctacactcaacggcacccagcacccacatcgacacttgacaaactcaggtcagtgcattcaagtaaaattttgtggttccctgcaaatcagccaaagacaggtgtcagaaccggggcactcttgggcaccaaggccggggggctttacctcattctgggggtcctgtgctcccttgagaaccatctgaaaggaccccttccttcacaaaagctatgtttgctcacacagttttacagttttgggggtgtgctagatctttcaataccaatctaaattctctaatttaagagccctgatctgatcctgcccacaagtgggggttctgagacccagggagggccccagattgacctggaaccatggggccctctcccaatccctatatgggcaggggtctgagcctccagatagggcggggaggccgcctgggggccggtggaacggtgggcccagtccccgggatatgctaatcacacgtctcaccgcccacctgacattctggtgcctcttgacgtagaggctgtggaagttgttgtcaggcatgcagcgacggtcaccatgctccttgagccgttcgatgatggccagcttcatgcccatggagatgtgggccggaagcactgacagcagcaggttctcctgggtgtgggtgggcagaccagcagagggaccagcaaagcgaccggcggagggaccagcgggggacaggcagggtagcatcaggtcccagacctggcctccttggcccccatcctccctgcctgcctgccctgcccacaatgtccccatctctgctcttgtcctccaccaacccaactgagcatctacctcccatgtacccagcagcccccgggactcagggtgactgagaaagggctctttcagctggggaggctaagctgatgggtgagcagcctggagccactacggccttctctgccgccacctggggactgcgtgcccaggactgaaaccacacagaggaaggcagagtcaagggtcagcaggctatggttaccctgctggagcccaggactcaccgaggtgagacctgcatgggtgtctggccatgcacctcatgcacatggcagcatgagtgtctcatgtccaacagaaagaggaagaggacaggggtgtacagggtgaggagtgggggccgggtcccacctgctggcgcttctcgatgcgcagcttccggcggatctggatgcacttcacagtgtaggtgaagaggtcccgggatgcatcctgcatttggtgcttgtggaaggcgcctgtcaggttcccacacaggaagatgactgcgttggccagcagctgcgggtagacaggggtttggctcattatgtggcctggcccatgccctcccgaggcaccagacccctaggcggactagtgatggcacctcttcccattccctgaccttcaacccactgagaatggcactcttcctggggcagacagggaaactgaggcccagacaggagctagtctcctagtgagtcactaggactgcaagaccaggacacccagggaggcagaagagaccacctcacagagcccagggcccgaggggcatgcgtgctaagggcagtcccagagggcacagcgcccagctggctgtgtggagggccagcctctgcctggagaggacaccaggcctggtcagagggaaaacacttctctaaacacccaataattatgaacagaagattcactcattcaacacaaagacacaaggcagtgccctggggtactcccccaagccccgccaggacagggccttcgaggggaaacttcggcaatgggactcaccccacgacagtgtccctgaaccgggaggcaaggcctgaggtcacgaccctgagggctgagccacaggggagccctaggccagcaaagcaaaggccagagggcagggccacgcctggagcccagcttccgagcagacgtggagagggcccggccttggagcgggctgtctgcaaacacggctccggggccttcgggtctgattcacccagagggggcccccccatctgcccttagacccagaccacaaaacctcccccagaggccttagcccatccctcacctgcagccccacccggacactgggtgtcgtgaagcctcccatcaaagaaccgagcaccaggaggtgggaggcagtggagacggccccaacggcgacagcgccccgcatgctgaagggcagtagtgtgtacaccacgaagacaatgaacaggaagaagggcacctgtggatgcagcctggtgagcccggtgccccaagatgctgccccaggccgtacagcccccggaaccctgcaccacagcagcccacccagtgcgtatccttaggttggctccctcgccaccccctgcgtgggcagacatacaagggaacaagaaaagccataatgtgtttctagggtgggcccggccacaaggttcatggtttcctgtgctgatccactgcctgtggccaccctaggtgggaggctccatgccccgcgtgatccagggagcccccacctggtgcccctgccacgtggttctcgctcagcagaaatgattaccgggaggctgaggcaccctctcaccagctgcctccagcaatgcggccccacccgccctccctccacccccagagctgccccaccatccccaccggctggtcctgcgtccacccctctgggagtgctgccctctccctccccttcagtccacatggtttccttgggcctcaccccaccctgccccagccacaggagctgtcataggacccaggcccactggtcagagtgtgctaccgcttggtgacagcctctctgggactgggcccatgaccacagccaggccagtgtggctcaagcctgcaggtcgagctggttgagaaagggccctctctctcaactggggtgggcagcctggagccgctgtgaacttctctgcccccacctggggacagcgtgcccggggccgaagctgtccagaggccccagttccagttacccactggagcccagcactgaccccttggcctttcctgacacaggaaccagtttgtgcctttttgcctctttgagctgaagttctgtcatctccaaccaaactggagccacccaaaagtgctgcagcccagcgtccgagtggatgctctccccacctcagccctgtcaatgcagagaactcacagggacaaaaccagcctggggccatcctagacacacagccaagcgtggggcacgaagggcctgtggcatgcccaccaaccacggggatgggagctgctgaaggcgcagctggcagggagtccagagttcctgttacctgctcccacgcacaggccgcctttgtccatgcgtcgaacaccag

SEQ ID NO: 1886680 - DNA, 4001 bp, Homo sapiens
aatagatgaggaaaaggaaaccagacaaaacttgccctgggtcccgtggccatcggggagaggagggactggaccccgtgtctgtggggtacccaaatgtttaaccgatgcattggcccaagggcctgcctctggcttcctggctgggcatgtgcccccacacagcctgggtacctgcgcccggagccgcgcggtcagctggtgtgagctctgcagctgctgttccatctccttcagcacctgcctctgcatagccacctgctcctgcaggtgctggttccgggcctgggactcgctgagggcctgcttggtcttggacgactccacctccactgtcttgatgacatactgcagggtgagggaggaatggcacgtggagccagcgggcaccgtacctcacccaagagcctgagacgcagcaggccaggggaaggaactctcgggaacatcccactcagaaaccagaaaaaaactagaggagccttgaggtcctggctttccagaaagctgggggggtctcctggaaccttctcagcttaacaagaggctactatgagcctggctggggccccatcctgggtacagacaagaaaggcaaaaagacgagggcagaatccaggggctgcgctgcatctgtgcctggcacctcagctgttggatacctactcggtgcctggccctggatacaggaaggggaaggggcaggaccaagcacagaactggaatgattcttccacccacacacacctacctattcaccaggacaagccccccttatgggctagccctgccccaggtgccaggggccttgggctgaggcacagatcaggtgggccagggctcaccttgacaggtggggactgggcccgcaggctggcaatggtctcgtggctgtcacgcaggcgccgactaagccgctcctcctcctgtgccttctcagccaggcagtccttgagtcgcagctccacctcagccagccggtcggtcttctgctgcacctctaggttcagctctgacagcatgcctttgctttccgccatctccagctgcagctgggacagcttgtcacggagctgggcgctctcctgcagccattgggaggcactggatgagtgcaagggacaggctcactgtgaggagctggggtggccctccaggaccagcatggggaccacggccattctgctcacctggctgtgctcacaacctgggcagggacctgctggctttgtgcgcagctcttgcagctcggcctcacagcgccgcatctcctgcctcagtcgctcattctccaccatcagcaggtcccggtgcttctccaagtcggtgcccccctgcagagagccagggccgagggggcgcatgtggcgagggcagatgacgggggaaagaagagaggcccgcggagatggcacaagggcagggaagagaggagaggtgtggagaaaggcagagggaaggagaaaaagaaaaagaaaaaggcaagggcaagagaggagggaacaagctcaagagagaaaccaagagaaagacagtggagggcagagttgagaagggtggtgacccagagcctgctctccctgctgcccccaccctattctgagtgtgaaagtcacaaggagagacatatttataccagggttcacactcccgtttaatgtcagcaacagagaaggaacctcccaccccctggagccacaaggcctctgagggtactaggaggtggggataaggctctcggtgtgtttctgagacagggtgggatatgcgggctcaggagagagagggtcgcacccctgcccctggcagggcccatctgcacaaggcaggccaggccctgcgctaccccaggacagccttgtggcctcaccagctcagatcgcagtcggctcacttcctgggcctggctaatgagcttctccttcaggtgttctacctgtgggcacagagtcaggagcaaggtgagcctcagtcctcagctccagcctacacccaggcctcctgcccagcaccagggatgactgatgtggctgtggcttcttctaaggctgtggccttaggttcccctatgttcaagcatcccatcacacctgggacttcaggtgagagaaacctgggctggtgctgacagcctcccgcaccctctccctccacaggacagagccaaccccagctcttcaggaaagcccagagggcaagtgcaaccaaggccaccccgatgccccctgggcccacccaacggcagcccaccctcaggacccctcactacacgagcccctcccaaagtcctgtacctgcctgtgtctatgtaattttatgttctctctctttaaaagggcccccagatggtacatactccaggtcctccgagccctagatccaccctggcccagcccccagaattttccacttggggtggtctctggcaagtcagcctgtggagatgggtctgccagtggtcagggcacactcagaacctgtgtccacccctgctcccaatctgccttgcaggaaagctgtggcagccaaggctcttatagggggaagggggtgtgcaccccatgaggaagccacggttacctagcttatccggaccccagaagaggggacaccatcatggtgccagtcccatgagggcagatcccaggggagcaacccttccccggcgctgtcctccagccacccatcccctcccaaggccctagaccctggtctcacatcagcccacccccagaaacctctctcaggaaacaattcacagacacagactttggctccagcttccgtcagggcatgtttagtacttttcttgcagaacgtcctgtggtgagcaacccccacctcgggaaaggtgcgctaagagccagattcctgtgtggtggtttaggaggtttacacagctgggttctcattactaaatgataggcaacaacgtccactgattacaggggacagccaggtaaggcaggtgaggggctgtgcagggcttggctcccaagaaccctttaagaaggcggccaccacgtactctcctcggacgacaggaggtgagaacgcacacccagcatcgccaaaattctcatctttcaagagaggcctaggccagcctgagcaacacagcaagaccccatctctacaaaaagtttcaaaactcagccgagtgcaccagtgcacgcttataatcccagctgtaatccggggggttaggtgggagatcacctgagcccaggagtttgaagctgcagtaagctatgatagcatcactgtaccccagggtgacagagcgaggctgtctaaaaaaaataaaataaaaatagaggcttagagtccgcccccttagcactcagcagcatgcatcagccatagttaagacaggccggacatttggattttgggggtgtgtgtaaaatctccctactttacatggttgagatgtcatcaaacaagtctgtgtcatcaaacaaggtagtgttcggcctcggaggtccctgtctcccagggtgggagagaacggctgactcacagcagctaggccagctctgagtggtcagggaggaagtggaccaagggatccacccccacctctgaggaaaaggccagggagctggcactgcctgctcttggtggggcagggggattccaagatgcaagacccaggtgaaaggctgggggcccagccaggcctcctgggggacaagcaggtgacccaagggccagacccctggaggtcagctctgccgccacctgcacaaacacattccttcctagcaacacgctgggccacgggccaggcagggaggcagagcttgtgccacttctctgcccgctcagtgcctgatgagaggacggctcaagtcctttggcccctgggtgggagtagggacagtttgcatgaggcagcctttctgctttcgtcctaaaattgagaataccctgaataagcacccttagaggagtgggcaggtgaattacaatgtgtatatatagtacatagactattc

SEQ ID NO: 1886681 - DNA, 4001 bp, Homo sapiens
gtgtacaccgtggggccgaatgtcagctgctgcctcccccagaaagctcaggatgtcttcaatggtggccgtgtagggcaggcctcggaggcgtacacagtccctcccagtcccaggtgccagtgggaaggggatgggcagcagtggggcagtcagtgtaggaaggagtgggccggatgcatagcggttcaagacctagtaaggaaggcagcaacaggctggtcatgccaagtagggcagggacacagagggccgccctggagtaacagtacatctgggggtggggagccctgggcgctcacctgctgcacttcggctgcagtgctccggaagagttcaatgtatcgcttacccagcatgcccttgtgcctgcgcagtgcagcctgtgccagctcctcacaagcaaagagggcgaaggcatcaccagtcggccggccatcaggatggcgcacaaagagcagcccctcggtacccccagtcactgggcactctggccccaggaagccaagcacgtccgttggcccagccgagaagggcagtccccgcagccgcaggatcacttggtcttcccgtgacaagaaacgagccacctctagtgatgtgcctgtgtatgagagtcgcctgctgacttcactcatgctcctccagacactcacccatgcaggggagcaggcaggcaaggggtggtggggaagtgaaatggatcaagaaccaggggagccaggccctgtttgcagtatactcaccccctgcaatctttacaaactcctcccctgtcgctttatacacctgtgggtacagagagcagcagcccatgggtctcaggcctgactcagattggccctgctccgctcccagcccaaagccccacctcaatatagcggacgcccatgtggtgcttgtgtctctgcagcgctaggtcccgctgctcgctgtccacaaagcggatgagggcctcgccatttctgcggccctgggcgttgaggcagagtgctacaccacccctgtggagccagtgctgttagtgcctcctgggtaggcctgtccaattgggcccacccaccctgccacacccacctggccacgttgagccctttgaagaagcgagccacgtcctggtctgatgactgccacggcaacccacgagcccgtaccacagtctcactgtccaccacatcagccttgctgctgtaggggcagggcacagtgctgtcagagctattcagctgttgtcacccccagcccctgctcccacactcaccaaggccccgtctcgtatttctgctttatcacctcgggcttcgaaaacaattgacctgagaaaagatggcctgggggtcagcagggtctggtggagaggggtgtccccaccaagttctgcaaaaagtggacaattgagagagatgaagaaatgacaggccgagcacagtggctcacgcctataatcccagcactttgggaggccaaggtgggtggatcatttgaggtcaggagttccagaccagcctggccaacatggtgaaaccccatctctactaaaaatacaaaaattaggtgggcatggtggcaggcgcctataatcccagctactctggaggcttagacaggagaatcgcttgaacccggaaagtggaggttgcagtgagctgagattgtgccactgcactctagcctaggctacagagggagactgtctcaaaaaaaaaaaaaaaaaagaaatgacaaagaggattcccccgtggtctcttagagaaggtcacagtggggaggagcaataggcatttgtcatccctgagaacaggtgacaggcagtgagggaaaccttactgctgggctctttgagtagatggaggataacagctaccattgtcttgacttcccagaccccaaagtcatcctctgtggcatctgtctccagtcctaaacctatgggcagagaagtgacagtgaagacatcttagcataagcactaatcctgtttactcctgggcccaactcccctccatagacacatgctggagaccagcatacacatttgttttggcccagttcatgtgtgcacatacagattcccagtccagacatagacagacacatacccacattccaaactcatcctagcacagacacgaagacacagtacactcagggacttagcagataacgcagtcttgtatgtgtccatattacccacccacagcatgcacatactcagacacatgtacccacagtggcttctccaccctaaccctgctgggtcacagataccctgtgccatggtggccacagtgaggtccctggcagggcaggtgcttggatgctgcatatggaattctcttcggaggtcatagaaggagaagaacatgtcggggagcaccaggttctgggggcacataggattgaggatgagcgccctgcccaccctcaggacaagaggggttctgggaaccttactgaccaccccaccccacccggttttccttcaggagcataccttcctggaggcctcggggtgcaggacctgtcgcaatagctgctgcccatcagtgcagagcatgtaggggcccccgcccagcaaagccacatccccgttcaccagctgtgagaactggggatagggaatggggagagagaaacacacagattcacagctgggcaggcaggaagtgagggtaggaggaaggaggcaggctgcaaagctggttcagccagatgttcagccctatcctgcctgggaataagaggccacgcctgttgagcctagccctatgtcccttcccctcaccccccaaccctgttccagtccactgtcacctcctccaggccaaatgagggcaatcacatataaccgaagccctcaacacacacactccaggagtttggagtggggccagagcaaacacctggagtgggacaagcaggtgggaaggggcggggcaaagcaggttaaacctgtctttgaccgggtaccaccctcagacaggtgggggaggcccaggcctgcctgaggcccagaaggctcatggtcaatggcagccccgcctccaggtctgaccaaccgaggggcagagaaactccaaggacagagctccacacttggacatcaggggcagcatgagctttgacccacatcctattgaccggctggcactgagctgtttgctcatagagggggtggcactcctgaggctgcccagccctcccccagcctccatccttgctggagaagtataaacactaatcagtgacccacgaaccctccctgccaattctgtgacactttacaacttggggctgacagagcaaggcaacccagctctcctccagcaaactccccaagtgaagggccgggagcccttctggaacagacaaggaatcatcatcgtggtgcctcctcatcaggaaccacaagagttgttggaagatgaaagaacgtgagtgtataaaaaggacttacactaattacactcaagagtcagacatagaatgagcgccgtagtgaagataaggaaaagaaaacagcaatggaaaccacctcccacttcagctagggcaggaggcaccccaggcctttgcactcagcaggcagatagtcccccaggccaggccgggacagcgcccacgcctggccagccggccgggacaggcctagacgagcagtttacacctggcggcgtctacctctagggccgacaccgccctacgcctccgctccagcagctcccaagcaggccgaagacgcgggccgcaaggacaggtgacctatatgggcccctcgacccctttcgcttccggctgcggctcagggagacctgacccagcaggtctcccaaaggcgtctcggcctcgctccccgggcgggaactggggatggatcccaaagcctgcgtcccgatcccttcggtaggagtaggttcctgcaatggttgaaaagtaaggagcccaggggaatggctggcacgcgcggatgaaaggggcacgcacacgcgagagtcgctcaa

SEQ ID NO: 1886682 - DNA, 4001 bp, Homo sapiens
ttgaacccgggaggcggaggttgcagtgagccaaggtcacgccattgcacaccagcctgggcaacagagcaagactccatctcaaaaaaaaaaaaaaaaaaaaaaaaagctgcccatacttacctgcacgagaatgagtttggagcgcaagggggccatatccggaaactcttccccaaagcacagcaccaccctgccgtcaggaagccggccctggctgttatagaactgctgcagctctggaatgacacaggcagagggtgtttgcaagcaaggccgagatgacctccaactcccgcagcagcagggctgggggatcaggaggcccagggcttgtagcatttaggccagggcaccatgggatctcaaactggtggcccttgggccaaattccaagcaaggagctgttcgtttggccattccaggttgttgccgggattttaatgcctcgtttgaacgcctctccatgggcacagctgcccagtgctctctcttatctctcaattcgtgcattgctcttacctgcctggcccttggaggcaactgagttggcaaccccgacctgaggacacccagggagggctgcagccctcacccgaatctctgacagccaactgaaagggtctcaaagtgggccggtggaccggcagcagtcgccttccctgggagctcattagaaatgtagaatcttgggccccgcctcagacccatggaatcagaggatgtgaggtaggcccgggaatgtacattgcaggacgcacttctgtgccgctctgcctgctcaggggtgataaccgcggcctcacacctcctcactagggggattcctcagggcttatgcccctgagctcacacatacccctgcacccgcccttccaggcccctcctctggcagttctcaggccagtggcagctgagacctgacactatctcgggctgtgctgctacagggagaggagcagagagcatggggacgtggagaagggagacgccatcctaaccctccaggagacacccaggctggtatcctacacatcctccctacagcgtaacgaaagctaacaggcagcacttagtgtgtgcagctgccatcctgagcacttagtgtgcggaaagtcagcgtgtctcaaaacctgtacacagatccccagggaccttgctaagatgcaggttcggatcttgtggctggagcagggcctcagactctgtgtctctagccagcgctcagggaccatccttggaacatactccaaggtacatgaggttaagttcctttaccctcccgacaatcacctgatgagggtactgattctgcacccccactgtacacatggggaagttgaggcacagagaagcaccccaggatcgctcagtggagagggcagagtgccattcaaaggagcacctccttgccacaccatgcccctcactcctcctccacatccctccatgagaccacagggccaccctgagctgcaaatggcacacagataggaggcgtgatctctaagatgtgggggcagcaaggtgacgacggtacagacctcggaagaactggctggtgtcgaagacctggaccacctcatcacgctccagcttgttgggcctgcctttgcacaccacggcgttgccgctgcagaacacgcggccctggcacagccgcttgacgaacacgccctgccggctgctgtgcagcagcaccccgcgctccaggtgcccgaacagcttccgcgtcacctgcctctgtcgctcgctggggatggcgtcggccggcgggaagcgcaccagctccaggccctcgggcccatacagcttggtgccgggcagcccaggctggctcagggacaggcggcagccctcggggcaggtggtggtggcctggcccaccagcttgcccccatagtagaagctgatcaccatctgggagaatgctgtggacaagagggacacgatgacggtgctgcggggagacatacagggtccctcctgcccaagtgcacagtctgtctcacacctacacgggtaactctttgtgtgtcttgaaccactttgatattctggggaaatccatgtactgcttgtagaagtaatgtttttatatgcatgaataaatacacagaatgactaaggaaaccaatgactgaacatattaactacaacagtgttctctgtacttcttcactgactctttaaatacaaggtctagagaaggtctggtaactgttgtaatttacacgtcaagctgagggcaaacgatgtttcgacaactcatttcttatgacaatactccgtctcataggcactgccaagggcactgcggtctgctgcctacattcataacaaaaggaaatgctcaatttaaacctgaagttaaagaaaataaagacataatctttttctcaacaaattcacagcgcccttggtatttcctggatttcagattaagaatctctgcaaaacccttcatccaaatctgttctcaggaaagagtctgaaaaacactcaaactaaagcaggggttccccaaaagtggcacacacagaataatgggggaggggtgatacatgtaatcacaagattattccatcttcaatattcttccaacctctgattacctcaaaaagcaagcctcagtttggtgctgatagctctctaacacctaacacctgtcaacctcccttttgaataatggcactgaacttagggctccaaattcagggcattgtcagaggtcaagacaaattcaatgaaagacaaatacaatcttaatcaattctagccagacagtattacctacttataccaggtgccacaggtcttcctttacagccaatgatagtgggttctcatttaaaataaacttaagttttattttaagattaagatttgaggaaaaacatgatgttagtaacagtccaggctgtgaaaaccaattgtgacactggacctcaagtgaccaaagtttggaaaacactaatctaaggtaggaatgcagataacatgtaaatgcagggaggtatctgcattttaattgccttaaaccaaaagaattacatacgctagcaatgagcttagtgagtttgcagctccttctaagtaccccagaccggttcgaggctgccttgtggagccacacaagttgtgaggtgcctaactccacggcgccccctagagttgtgcaaggctgaccacatctggggaggccctgagtccatctgcattccctgctgacactgctgggcactcagaactccttggaccctcccattgggctctgctccctgccttattatttgacaacccaccattcacgggctccatttccagccatgctggagttacgcaggttctagaatcatgcagggtaggaagctagagctgcagaagctctggtccacctcattgatttgacacttcaggaaactgaatcctagatagggtcacccagaaggaaatggcagcactggtctcgctcttccctgctcaccatcttccccgctggtctcgctcttcctcactcatcatcttccccccacgccaagtctgcaacttctgcactgcctgcggactccacacactcccctccctttaccctgaagcaactttcgaactttgttccaaatgaatgaaacgcttcaggcaactccgtcacccctttggccctttgccctgtcatttccggggccttatcttggtaccagcacctctcagtcatgtgaactggcagcttcacccggaacagctaagtgcttcagagacgcctaagcaggagtgtcttagtgaccacacaccccagaacgtcttatgctaagagaaggttccagctgtcaggcttgtacctgacaggtgagaagcagctcaccaagggctgccaaggtgaggcaggtgagccttctgcaacagtaagggcctgctgcgacccagccctgcccttatagagccactcacccacaagaacagccttgctggggaacggcctgaccacagaggcagcaacaaag

SEQ ID NO: 1886683 - DNA, 4001 bp, Homo sapiens
caaaatttaagtttaaaaaaaatatatatataagtaaacaaaggagggaagggaaaaagggcccaaggagaccaaaagctgctcctgggcaggagcacaggcacacctgggtccctggccctcagttgagggatgagattcgtaccagagttttcacagcagcctccactgcccgacctgggagggacggcgagggactgggatgggcagctgagctgtgggttgcggggaaccggagtgggttcgaggaggtgatctactttaactggcctctgcgcatgctcctccggcagccactcggcctcctggctatgtctcctgggggaccacctgcatgagcttctgacacaggacggtcgtggagactgtcaggagagaagacagctgtgttagcctgggggctgggtaggcacccgtgggacacgggggcgtgagctggggctcccccagccctgctgtcaccaaacccagcgccgctgcccagcgctgggattttaaggaaccttcccttgtgtacttgcgcatgtgggtgccgggtgcccgaggcgctgtcttcaactgaaatgcggaagtgccacatcccactcggcccacccctcgcctgcttcagaaccctggggaggcagagtgcggcccctggggcacacgaaccaggccctggtgtctcagcaaagtgcaacggggggatgacaggccttcctgcaggtccacacccgggccaccacctggacacatgcctggactgttcacagcaggcagggccggaggggccaatctgctaacgggtcctcggaagacctgtcgcgcctgggactgtctacagagacatcactctgtggagggggactgctttcaggatagagacgggggtttgctttaagctcttggtgtcctgaatgacagttaatgcagatcccactgcaaagcttgaggcaaatgttctaccatgaccctggcggtgatcagagtgtggggtaggggtggggggtctccctgcctgtgttgctgccatcccgggaattctccaagccacccagtgacatggggatcagcatgtaggcccgcaagcaccccggcctttttctacgagcctggccacatttgcaggcgctgaggacggggtcctgagcttggtgacaaagcacccctggggctgccgctgcacacagggccggggggcgggtttctccttctgcctttttttttttttttgagaagagtctcgctctgtcgcccaggctggagtgcaatggtgcgatctcggctcactgcaacctccgtctcccgggttcaagtgattctcctgcctcagcctcctgagtagctgggattacaggtgtgtgccactacacccagctgatctgtgtatttttagtagagacagagtttcaccatgttggccaggctggtcttgaactcctgacctcaagtgatccgcctgcctctgcctctttctgcctttctgggtaagtctgctgtgtccgctggtggcagccagcaggattttgttacttggcagcagtagcctggttttccggaatccctcgtcctgagagattagctggtgctgcgctgtgtgtcttatccctgaaccatgtgggctgcgtgtcactggcggacactgcagtgacctgaaccctcctgccacccaacacgcttcgccccatgtgggtggagacggccgacgcctctcaactcccttcgctgcccagggcagagggtaccacgggctgtgggccagcgagatactcacagatgccctggaggagccacttgggcttgtttttccaccagaccccgaagaagtagacgggcagcccgctgaggatgatggtgaagccgatgccacactccacgggtgtcttccagaaggagacggcgatcaggaagaggcaggccaggatgaagaacacaggcagggccaggttcacctggggcagaggacagggcctgggtgagccctctcctgtccagcctccctcccccatgccccgaggttcctcagccctcctgggccctccacacccacggctgctgacttccaggtcaccaagatgcgatctgcactccatctgcctcacacaccgggctgtcccgccctcgactctgcatacagtgctgggcatgttgccaggggctcaggcggcttatgatgagggatggaaggagacagcttcgtctcccgaggcctcccacgggcagggaaggtcacggctccattcccacatcacaggcctggaaaccctgagccgccaggacgcacaggggcctgatgcttccaggagacagtggccacccactaataagccaggagaccaccctcttggagacgccgctgtggacagcgctgagcaaaagcccatccctgaagctgcagcctaaactgtcaccttcagcagatgagctccacccggcacagaagccaggcagggctgcaaggagcctgcaggccgcaacctgcggctcggcatggctgggggattgactcagctgtcctgaatccatacttggacagggcaccctgggagatgcagggctgaccacaggtcccagcccatcagtgtgggctgcatgactgccctgtccccagggaacagacgccaacccgtgcccaggctcacaacagtgggtagagcctaccccatgcccaggtccccatgggggctgagcccccgctgtgcgcagtgactgccctgtgccctaggcactgccccaggctggcacagcaggcacaagctggtgcccatgtagggcggctcctccctgccctctgcagccttctcttggggcagcatctgggttcttgtgctgactgtattttaaagcccctgttttttttgtttgtttgagacggagtctcactctgtcgtccaggctggagtacagtggcgcgacctcggcctcccaggttcatgccattctcctgcctccacctcccgagtagctgcaactataggcgcccgccaccacgcccagctaatttttttgtatttttagtagagacggggtttcaccgtgttagccaggatggtctctatctcctgactttgtgatctgcccgcctcggcctcccaaagtgctgggattacaggcgtgagccaccgcgcccagcctaaagcccgttcaacagcattcacaggcacccccggggcccccaggcttcgggaacacagagggagagatggtccgggcagggaagcaggggctactgtgacagccataggccagctgagtgacaaaagctgctggctagcagccaccaggggctctggcctcttgttctgtgtcagggccagggcggcgggacttgctgggccccaggcaagagcatggcctctgctggacggccccgtttttggagaaggcagcccacggataacagctacccctctgaatgagccgctggggacggggagagtccaggagagtccagctgggcccaggcgctcctcgggccgggttccctgcattcctcctgccagcacagccccgacggccctttgaatgctgcgccaggcccggctctgccccgcccctgccggggctcaccaccgcccacctatgactgcagtgtccttatctgcttccctccacccaacggagcacaagctctgtgccatctgctgtcctttgaggaaccccggctcctgcagtcacacttggcaccctcgtagctggtggtcaagtcatcaccggaattagtcgacccaggtgcatgcaggcaggggcaggtccagaggctgagctgggatgctggctcccaactcagggtccttaggacccacggaccctgcctctgtgaagggtgcctgggtgagcgggaggccccgggctcaccttgatgggccgctcaagctcaggctttctgtggcgcagccagatcatgccgatgatggccagggccacgcagagccagttgaagaagctgaagaagttgatgacggagaagatgtccttggagaaggcgtagagcagcgtcatcacacactggaagagagagg

SEQ ID NO: 1886684 - DNA, 4001 bp, Homo sapiens
gtagcctccagaggcctcaggtccagtctctaaaaatatctcaggaggctgcagtggctgaccattgccttggaccgctcttggcagtcgaagaagattctcctgtcacagtttgagctgggtgagcttagagaggaaagctccactatggctcccaaaccaggaaggagccatagcccaggcaggagggctgaggacctctggtggcggcccagggcttccagcatgtgccctaggggaagcaggggccagctggcaggagcagggggtgggcagaaagcacccggtggactcagggctggaggggaggaggcgatcttgcccaaaggccctccgaccgcaggctccagggcccgctcaccttgctcctgctccttctgctgctgcttctccagctttcgctccttcatgctgcgcagcttggccttgccgatgcccccagcttggcggatggactctagcagagtggcccagccaccggaggggtcgaccacttctctgggagctccctggactggagccgggaggtggggaacagggcaaggaggaaaggctgctcaggcagggctggggaagcttactgtgtccaagagcctgctgggagggaagtcacctcccctcaaacgaggagccccgcgctggggaggccggacctttggagactgtgtggggcccgggcactgacttcggcaaccacctgagcgcgggcatcctgtgtgcagatactccctgcttcctctctagccctcaccctgcagagctggacccctgagctagccatgctctgacagtctcagttgcacacatgagccagcagaggggttttgtgccacttctggatgctagggttacactgggagatacagcagtgaagctgaaatgaaaaatgtgttgctgtagtttgttattagaccccttctttccattggtttaattaggaatgaggaacccagagcctcacttgttcaggctccctctgccctagaagtgagaagtccagagctctacagtttgaaagccactattttatgaaccaagtagaacaagatatttgaaatggaaactattcaaaaaattgagaatttctgaccacttaacaaacccacagaaaatccacccgagtgcactgagcacgccagaaatcaggtggcctcaaagagctgctcccacctgaaggagatgcgctgctgctgctgtcgtcctgcctggcgccttggcctacaggggccgcggttgagggtgggagtgggggtgcactggccagcacctcaggagctgggggtggtggtgggggcggtgggggtggtgttagtaccccatcttgtaggtctgaaacacaaagtgtggggtgtctagggaagaaggtgtgtgagcagggaggtccccggcccagctcccatcccagaacccagctcacctaccttgagaggctcggctacctcagtgtggaaggtgggcagttctggaatggtgccaggggcagagggggcaatgccggggcccaggtcggcaatgtacatgaggtcgttggcaatgccgggcaggtcaggcaggtaggatggaacatcaatctcaggcacctggcccaggtctggcacatagaagtagttctctgggacctgcaagattaggcagggacatgtgagaggtgacagggacctgcaggggcagccaacaagaccttgtgtgcacctcccatgggtggaataaggggcccaacagccttgactggagaggagctctggcaaggccctgggccactgcacctatctccacctctgtcccgcccctcccacctgctgttccagctgctctctcttgctgatggacaagggggcatcaaacagcttctcctctgtctctgcccccagcatcacatgggtctttgttacagcaccagccagggggtccaggaagacatacttcttgtacctacagaggcgacatgggggtcaggcaagctgacacccgctgtcctgagcccatgttcctctcccacatcatcaggggcacagtgtgcactgtggggtcccaggcctcccgagccgagccaccccagtcaccccctggctcctgggctatgtgctgtacctgtgtctgatgccctgggtccccactaagccaggccgggcctaccgcccacacccctcggccctgccttctggccatacaggttctcggtggtgttgaagagcagcaaggagctgacagagctgatgttgctgggaagacccccaagtccctcttctgcatcgtcctcgggctctggcttggtgctcacgcacacaggaaagtccttcagcttctcctgggagggccaggatggccaagggatggtgaatatttggtgctgggcctaatcagctgccaccccatcccagtcagcctcctctgggggacagaacccttggtggccccggctcctccccagtatccagtcctcctggtgtgtgacaggctaagttatgtgcgcagccagcagacttgcagggcccgctcgtccagggggcgctgcttgctctggatcctgtggcgggggcgtctctgcaggccagggtcctgggcgtcggtgaagatggagccatattcctgcaggcgctctggagcagggtacttggcactggagaacacctgtggacacagggacaagtctgagggggccccaagaggctcagagggctaggattgcttggcaggagagggtggagttggaagcctgggcgagaagaaagcccaaggtacaggtgggcagcagggcagagactgggcagcctcagaggcacggggaaatagagggactgcccagtagcctcaggacacaggggcatggggactaccttgatggccttcttgctgcccttgatcttctcaatcttggcctgggccaaggagaccttctctccaatggcctgcacctggctccggctctgctctacctgctgggagatcctgccatggagaagatcacagaggctgggctgctccccaccccctgcacacctcctgcttctaacagcagagctgccaggccaggccctcaggcaagggctctgaagtcagggtcacctgcttgccagggccgatcttggtgccatccagggggcctctacaaggataatctgacctgcagggtcgaggagttgacggtgctgagttccctgcactctcactagggacaggccctatgctgccacctgtacatgctatctgaaggacagcctccagggcacacagaggatggtatttacacatgcacacatggctactgatggggcaagcacttcacaacccctcatgatcacgtgcagcagacaaagtgacctctgcagagggggaacggagaccggaggctgagactggcaaggctggacctgagtgtcgtcacctaaattcagacggggaactgcccctgcacctagtgaacggctcactgagcaaactctgagtcccgaccaccgcctcagtgtggtctagctcctcacctgcttccatcctccctggtgcggggtgggcccagtgatatcagctgcctgctgttccccagatgtgccaagtgcattcttgtgtgcttgcatctcatggaacgccatttccccagacatccctgtggctggctcctgatgcccgaggcccaagtgtctgatgctttaaggcacatcaccccactcatgcttttccatgttctttggccgcagcaaggccgctctcactgcaaagttaactctgatgcgtgtgtaacacaacatcctcctcccagtcgcccctgtagctcccctacctccaagagcccagcccttgcccacagggccacactccacgtgcagagcagcctcagcattcaccgggcacgagcgagcctgtgtggtgcgcagggatgagaaggcagaggcgcgactggggttcatgaggaagggcaggaggagggtgtgggatggtggaggggtttgagaaggcagaggcgcgactggggttcatgaggaaagggagggggaggatgtggg

SEQ ID NO: 1886685 - DNA, 4001 bp, Homo sapiens; identical to SEQ ID NO: 1886684

SEQ ID NO: 1886686 - DNA, 4001 bp, Homo sapiens; identical to SEQ ID NO: 1886684

SEQ ID NO: 1886687 - DNA, 4001 bp, Homo sapiens; identical to SEQ ID NO: 1886684

SEQ ID NO: 1886688 - DNA, 4001 bp, Homo sapiens
ttcccctaactcctcctcattggatctcacctcaggtggtccctacttaagggtgctttctccagctgttagctacagcagccacccctccagccacttcttaccacagggccctagtttaactctgaactttatatcatctagaattattattattattttttgagatggagtttcactctttcgcccaggctggagtgcagtggtgtgatctcagctcattgcaacctctggcccgctgggctcaagggattctcctgcctcagcctcccacatagctgggatttacaggcacctgccaccatgcctggataatttttgtatttgagtagagccagggttttgccacgttggccaggctggtctcaaactcctgacctcaggtgattcacacacctcggcctcccaaagtgctaggattacaggcgtgagccactgcacctggcccagaattatcttaacatcatactatttttttttttttttgagatggagtcttgctctgtcgcccaggctggagtgcaggggtgtgatctcggctcactgcaagttccgcctcctgggttcatgccattctcctgcctcagcctcccaagtagctgggactataggcgcccagcaccacgcctaattttttttgtgtgtgtgtgtgtatttttagtagagatggggtttcaccgtgttagccaggatggtctcaatctcctgacctcgggatccgcctgcttcggcctcccaaagagctggaattacagacgtgagccaccacgcccggccatatcttactactattatttttcaatctgcctttctccatccagcacaaaaggtaagcttttggctgccttgttaatcactacacccttgacttgatgggcacattcacacttttactgagtaaactatgctgcactttcacaccccaatgcctctcatccaagctaaacaagagaagtgaatagatgccttaccccaaaggttctcaaagtatagccctgagaccagcaacctgggagcaggctagaggtgcaggttctcaagccccactcagacctatggaatcagaaacgatgggactgggagccagcatctcatcaggcccttccgtgtgaacgctaggtaagttgaaaggctggcttttcaagcactctgacttagtataatcctcacaaagctctaaacctagtaatattccccacaattttcctctcagcaaagcccacgcttgctcaggctcaccttgggagtgagggtcagtattttgcattattttggtaaattcttcatccattcgttccaccagagttaggatgcagccacggacacgcagtggctgaaaaggaaggcgaaggaggagtcaacaaattagcccagatctcagtctcaaacctcaaccctcgggtcccactgagccttcccaaagcataaaatacacacctccagttatcctgccaactcctccctttacctggtcagcgttgtgcaggttctcactctcttccagaatattctctccaacaaaaatgttgggatttgcaaacaggatatccatcagctcattgatgcagtccaggcacttcccccacatctctggctgccaagatttcaggccacatcagagtcagaggtgtgaaggtagagtaagcggatgcctcccccttcagcaggaatcatggggccttccaccaccaagactgcctccatagcccctgagtcttaagatgctaggtaccttcttcccccaacccaccagcgatgccctgagatgagcctcttcactgctctcaccttcatgtaggttgccaggttggggttgtagtcatagagagaggcgatgatattgaacttgatcttgacaatgacgccctctcccaggttgttttccgctgcaatctgaaccagcagttgcagcagctcaatctgggcagcactagagggccagagagctgggtgaggctttggagacaaatcacaaagtctctcccagcatgcccgcttcggataacgcgccctcctcatcacccatatccctgcttctcctttataaattccaaacagaagcaacaataatcccaaccatcctggaatgctgtgaaatgcttcacacctaccaccatcctctgttacctaataactaaagaaggtaaacactcttttacttttttaatcttaaaaaaaaaaaaagccaggtgtggtagctcatgcctgtaatcccagcactttgggaggctgaggcaggcggatcacttgaagtcaggagttcgagacatggtgaaaccccatctctactaaaagtacaaaatcagccagggatggtggcgggttcctgtaatcccagctactcaggaggctgaggcaggagaatcggttgaacccagaaggcaaaaaggttgcagtgagccgagatcgcgccagtgcactccagcctgggcaacaacgagactccatctcaaacaaaaaaaaaaaaaaaaaaaaaaagaggagaacattatctcattgtatagatgggaaaacagatccaaaacgttaagtgattggttttaagtcacaagaagagtaaacagcagataatggacggggatgccccaagcatacaattccctctactacagccacacacagaccctcccaacaatcccttcccccaacctccaccctctgccaccctgcaatcccactgcccaggcccacgaatcttaccgatcagttcccttcttgcctcgtgcctgtaggatctcattcagtttcttgataacaacagcatgggtgatctcagttcccttggcaaacatttttggcttctcctgtatcagtacatatcccgtcatgtacatgccagcgggaaactgtccttgccttttccccacaaggggacctttatgtcctcccaaactgttccccaattcattttacctctgaaaccctcaccttaaccaacggcactccgccccggaccctttcccactccccgccttcattgtcctcctcctcctcctcatccaggcgcttggatttcctgtcgtgcttcttcttagctttgtcctcccgtttcttctcggctgccttcttgtcctcatctgtggtgggtgccctgccgacagacatgggagaagatgacagatcagcccctccccacctctaaggcttcttcctcccatcaacttcctcttttcctccagcagctcctgggtccaagttatgctctacaacaatgacctagagggcacagtgaaccataaccatagccatctctaacaagacagagtactaaccaggccactgtagacatattaatagaaacaacctgtcagctaagcatggtagatcacttgatgtcaggaatccaagaccagcctgggcaacatggtggaaccccatctctactaaaagtacaaaaattagccaggcatggtggtgcacgcctgtagtcccagctacttaggaggctgaggcacgagaatcacttgaacttgggaggcagagaaggctgcagtgagccacaatcatgccactgcacttaagccggggtgacagagcaagactcagtctccaaaaaaacaaaacaaaacaaaacaaaaaaaaaccaacctgtcattttgctccaaagctaacatctacagttttccaaagaatccacaaacaacttattttctttgataccagctgctttctccagactgaccaactaatcaatgaatcagttcccccaaatatataaaaacatttttttcttttttactattcctaaactgttttatcgctttctctcctctcttgacaaccgattaatctaaattctgaattttaaaaaaatgttcattacaaaaaaggtccccacaaaacagaaaaagatcaccagctaccttaaaatggtcttaggctactggatgttgcctgaaaccatctccagacttgagtatgtatttatgtaacaaaatacaaaccaaatggcaaagacaaattacttcaaactttgcacagatactgaagaataaatcttt

SEQ ID NO: 1886689 - DNA, 4001 bp, Homo sapiens
cttcccctaactcctcctcattggatctcacctcaggtggtccctacttaagggtgctttctccagctgttagctacagcagccacccctccagccacttcttaccacagggccctagtttaactctgaactttatatcatctagaattattattattattttttgagatggagtttcactctttcgcccaggctggagtgcagtggtgtgatctcagctcattgcaacctctggcccgctgggctcaagggattctcctgcctcagcctcccacatagctgggatttacaggcacctgccaccatgcctggctaatttttgtatttgagtagagccagggttttgccacgttggccaggctggtctcaaactcctgacctcaggtgattcacacacctcggcctcccaaagtgctaggattacaggcgtgagccactgcacctggcccagaattatcttaacatcatactatttttttttttttttgagatggagtcttgctctgtcgcccaggctggagtgcaggggtgtgatctcggctcactgcaagttccgcctcctgggttcatgccattctcctgcctcagcctcccaagtagctgggactataggcgcccagcaccacgcctaattttttttgtgtgtgtgtgtgtatttttagtagagatggggtttcaccgtgttagccaggatggtctcaatctcctgacctcgggatccgcctgcttcggcctcccaaagagctggaattacagacgtgagccaccacgcccggccatatcttactactattatttttcaatctgcctttctccatccagcacaaaaggtaagcttttggctgccttgttaatcactacacccttgacttgatgggcacattcacacttttactgagtaaactatgctgcactttcacaccccaatgcctctcatccaagctaaacaagagaagtgaatagatgccttaccccaaaggttctcaaagtatagccctgagaccagcaacctgggagcaggctagaggtgcaggttctcaagccccactcagacctatggaatcagaaacgatgggactgggagccagcatctcatcaggcccttccgtgtgaacgctaggtaagttgaaaggctggcttttcaagcactctgacttagtataatcctcacaaagctctaaacctagtaatattccccacaattttcctctcagcaaagcccacgcttgctcaggctcaccttgggagtgagggtcagtattttgcattattttggtaaattcttcatccattcgttccaccagagttaggatgcagccacggacacgcagtggctgaaaaggaaggcgaaggaggagtcaacaaattagcccagatctcagtctcaaacctcaaccctcgggtcccactgagccttcccaaagcataaaatacacacctccagttatcctgccaactcctccctttacctggtcagcgttgtgcaggttctcactctcttccagaatattctctccaacaaaaatgttgggatttgcaaacaggatatccatcagctcattgatgcagtccaggcacttcccccacatctctggctgccaagatttcaggccacatcagagtcagaggtgtgaaggtagagtaagcggatgcctcccccttcagcaggaatcatggggccttccaccaccaagactgcctccatagcccctgagtcttaagatgctaggtaccttcttcccccaacccaccagcgatgccctgagatgagcctcttcactgctctcaccttcatgtaggttgccaggttggggttgtagtcatagagagaggcgatgatattgaacttgatcttgacaatgacgccctctcccaggttgttttccgctgcaatctgaaccagcagttgcagcagctcaatctgggcagcactagagggccagagagctgggtgaggctttggagacaaatcacaaagtctctcccagcatgcccgcttcggataacgcgccctcctcatcacccatatccctgcttctcctttataaattccaaacagaagcaacaataatcccaaccatcctggaatgctgtgaaatgcttcacacctaccaccatcctctgttacctaataactaaagaaggtaaacactcttttacttttttaatcttaaaaaaaaaaaaagccaggtgtggtagctcatgcctgtaatcccagcactttgggaggctgaggcaggcggatcacttgaagtcaggagttcgagacatggtgaaaccccatctctactaaaagtacaaaatcagccagggatggtggcgggttcctgtaatcccagctactcaggaggctgaggcaggagaatcggttgaacccagaaggcaaaaaggttgcagtgagccgagatcgcgccagtgcactccagcctgggcaacaacgagactccatctcaaacaaaaaaaaaaaaaaaaaaaaaaagaggagaacattatctcattgtatagatgggaaaacagatccaaaacgttaagtgattggttttaagtcacaagaagagtaaacagcagataatggacggggatgccccaagcatacaattccctctactacagccacacacagaccctcccaacaatcccttcccccaacctccaccctctgccaccctgcaatcccactgcccaggcccacgaatcttaccgatcagttcccttcttgcctcgtgcctgtaggatctcattcagtttcttgataacaacagcatgggtgatctcagttcccttggcaaacatttttggcttctcctgtatcagcacatatcccgtcatgtacatgccagcgggaaactgtccttgccttttccccacaaggggacctttatgtcctcccaaactgttccccaattcattttacctctgaaaccctcaccttaaccaacggcactccgccccggaccctttcccactccccgccttcattgtcctcctcctcctcatccaggcgcttggatttcctgtcgtgcttcttcttagctttgtcctcccgtttcttctcggctgccttcttgtcctcatctgtggtgggtgccctgccgacagacatgggagaagatgacagatcagcccctccccacctctaaggcttcttcctcccatcaacttcctcttttcctccagcagctcctgggtccaagttatgctctacaacaatgacctagagggcacagtgaaccataaccatagccatctctaacaagacagagtactaaccaggccactgtagacatattaatagaaacaacctgtcagctaagcatggtagatcacttgacgtcaggaatccaagaccagcctgggcaacatggtggaaccccatctctactaaaagtacaaaaattagccaggcatggtggtgcacgcctgtagtcccagctacttaggaggctgaggcacgagaatcacttgaacttgggaggcagagaaggctgcagtgagccacaatcatgccactgcacttaagccggggtgacagagcaagactcagtctccaaaaaaacaaaacaaaacaaaacaaaaaaaaaccaacctgtcattttgctccaaagctaacatctacagttttccaaagaatccacaaacaacttattttctttgataccagctgctttctccagactgaccaactaatcaatgaatcagttcccccaaatatataaaaacatttttttcttttttactattcctaaactgttttatcgctttctctcctctcttgacaaccgattaatctaaattctgaatttaaaaaaaatgttcattacaaaaaaggtccccacaaaacagaaaaagatcaccagctaccttaaaatggtcttaggctactggatgttgcctgaaaccatctccagacttgagtatgtatttatgtaacaaaatacaaaccaaatggcaaagacaaattacttcaaactttgcacagatactgaagaataaatctttcc

SEQ ID NO: 1886690 - DNA, 4001 bp, Homo sapiens; identical to SEQ ID NO: 1886688

SEQ ID NO: 1886691 - DNA, 4001 bp, Homo sapiens; identical to SEQ ID NO: 1886689

SEQ ID NO: 1886692 - DNA, 4001 bp, Homo sapiens
tgaaagagggtattgcagacacagcagtaagggatgcatgcaacgtacacagtactcaagcaacagaagtagggggaaaatagtttgagttgcttttatcaccctcaatggaccacttgttctgaggtctcctctcatgaatctaatatccttagatcctggcatctgcagtctaggtcagatggtgacaagtctgggaatgggttgtatcaccagagctgaaggatccctcctatctgagcacatcttcctagaacagtgtgtggcgctaggtttttggggaccttcttgccagagaaagcaagcttgatgaggcacttgtggttgctctccaaggcaggatgcattttgcagatttatagaagggttcaaacaggtgaagtttgaaaaatgataccctgacgtttcatgcccacgtcatcatctgtctacatcaatgatcaaactatgatcagttgtgttgaacccctaccccctcctcctttccaccactgtgagattttttaaaaaacaaattccatacatcctatgtgaggatgtaagggagactgctttgaaagggaagaccacagaccttcttaatagtttctgagcaaggtgccccacattttcattttgtcctaggccttgcaaattgtgtagttggtcctggcttcaggctctgaacaagcagtttccacgaacatttcggctgtcatgcagaacctggcatctgcagtccaggtcagatggtgacaggtctgggagtggggtacatcaccagagccgaaagatcccttctgtctgattcccaggtggttggcccccaggaaatgtaggagaggccagttacttaccttggcgaagaccccttgtcccctgagctgagggcttggctgatcatgttcttcctcttcttccttctttttttttttttttttttttttgagacggagtttcgctcttgttgccaggctggagtgaaatggggcaacctcggctcaccgcaacctctgcctcccaggttcaagcaattctcctgcctcagcctcccgagtagctgggattacaggtatgcaccaccacgcccagctaattttgtatttttagtagagacggggtttctccatgttggtcaggctggtctcgacctcccgacctcaggtgatctgcccgcctcagcctcccaaagtgctgggattacaggcatgagccaccgtgcccggccaatcatgttcttcttacaggcctcagagagagcagagccaccctgagacctttgctgcatagctctcaccttccatcccacattctgcttgctcagccctggctaatacacccaggggtggctcagaactggacgtgggtccagtaggaacagccagggctaggacaggcctctgtttctgttgctcaggcttggaaccaacatcagctgggaatggccgatagccaaggagggccaagtaattcctgaacaaccaggagttgatgtccctcttgaaagagctgggttccctctttgccaagtggaatttggtaggaaaaggcagccaacaggaaaaagcaatggcaaggggaggtcactgatgcctgggacacgtgaggccctcgacccctgccagctggagctcaggtgtggggcgggctcaggcccagccacatgctaagaatcgccagggctatgtttatgggaactttggcccttctgcttcctaggggaaggcttgggccctccgtggtgcccctgctgagccccttcccagagctgagacacctgactctggacagactggtcctcccaccagccgggcactacttacatgacgatgagagcagcgtctcgggagtaatccagcacaatctcattcagcctcacctgccgaagggactgggcgggagaaagccgagtggtcacttcccatatcatcgaggtcactcaatccttcaccacgtctatggcctcattaacattttcaactggattcatgatttacttgtagactctgctgcctcataaattcttatagagtctcctgtctccaggaagaaggggaccctcagagtaatggagcaccaagctcacctcctccaagaagcattctgtggcttttccttgcctgactttatgaccataaccagcagggtagagggaagagagaacaccttactaggttcagatctcagctctcacatttcatagcagagagaacttgggcaagtcaggttgtctccctgaccttcaccatcttcatctgtaaaatgggtatgatgataccttctccaggggaatttggggaggatcaaatgagacaacctatgcaaaagcacccggcagagggcctggtacactaaaaatactttataaaagagaggttgccccacttcttctgtaacagagtattggaaggtcttcttcggacacaatgttttattcagcattttccaaagagccagatggctgcatgggccctttggggcagggtctcggggctgacagattagggaagtccccaaacttgcgtgggactgggttgggggtgggagactccttccaacccaaggcctagctcaaattattcagaaatgattgacactcaggaactgatcgtggacggatgccctatcctggagaccaagagaccgaggggaagggagttaacgtgggtaagggattctggaccttgcactgtagttatttggggcatacaagtccttgttgtgggaagtgtcctgcacatcgtaggatgtttggcagcatcgcaggtctctcctcactgcctgacagtagcagccccacccccgagttgtgacaaacaaaaatgtctccagaggttgccaaatgtcccccagggggtaagctccctcgtggtggagaatgactgacactgggggtagaagtaggacccggcccttgcccccatcgctctcgctcgcactcctagagcctgccccaccttgacgcactcacagcatggctacaggcacacaccctttcttagcccttagagtcctgaaggtgctgtccaggaaggggcaccatagctctgagctgtggcaggggtagggtctagaggctaagcagggaaggtcaggcagccgtgttggcccacaggacaatttttttttttttttttgagacggagtctcactctgtcacccaggctggagtgcaatggcacaatcttggctcactgcaacctctgcctcccaggttcaagcgattctcctgcctcagcctcccgagtagctgggattacaggtgcctgccaccatgcccagctaattttttttgtatttttagtagagatggggtctcaccatgttggtcaggctggtcttgaactcctgacctcaagtgatccacctgcctcggcctcccaaagtgctgggattacaggggtgagccaccatgcccggcctaacaggactaattataccttggctgtcaccatgagtctcagaaatctcttccacccggcatagaggaagtgtggaggaggaggaggaggaggaggactccgggcagtcaagcccactgccagagctcactcaagatgggcaggaggaccaggctcccaggtcaaggatagcactgagttccacagccgggttacccatcagcctgaacgactgtggcttgaggatacctcaggggccggagtggaaggcagggtggaggatcgaggggaggggctgggggagctcaagacatgcaggacacccgtccctgacccagtgatgtgtcgcgtttcccacccccacccctctctgcaccttgactctgttcttcgtaatctcctcatctgagatcttccaggggcagtcccgccgcatctcgttgacagtggcctcatccttgaagccatcattcagacggaagggtgcaatcatgtcctcaaacctcttggtgctggggacgagaaagtgggttgaggccggctgagacgataaccccatttctaggggtgccaggtccctgcggggagctggcagtgttgccacagctcccattttcaggc

SEQ ID NO: 1886693 - DNA, 4001 bp, Homo sapiens
agacaacagaagctaatggggtttgtgaatgaagacgaggaggcccgtgtgtgtgtgcgcttgcgtgtgtctgcgtgtgtgcgtgcatgcggacgtgtgtgcgtgtgagcatgcgtgtgtgcgagtggatttgtgtgcgtgtgagtgtgcaggtgtgcgcgtgtgtgcatgtgcgcgtgcatgtgtgtgcgtgtgttcgtgtgagtgggtgtgtgtattgccgtgagcaattgctggaataaaagaagaaagagtttaactggagagggcacagcagatagaattgagccagacaattggtagggcccacaatcacatgtgtattaactgtaaatatttattgggcatttaccatgtgctgggcactgttctaagagccatatgcacattaactaactcctgtgttatagatgcggaatagagagaagtgacttgtccagggtaacacagttaggtgtggcacaactgggattttacctaagcagcttggctcaaaaaaatgctgtcttaaccatgctcctaaccccttatacccttaacctctggacatggtcacgcccaaattcacagacacaacagccacaccttgaaacacacacacacacacaacagcagcacaaattttgacatggtcttatctgctgacaagccagcctcaaataaagtcaacaaagacacactcattttatttaagtaatgtacattttatttaagtcatgtgatggattttcacagaatacatatgcccagggaaccagcaccagattacacaacagaactggatcagctcccagaagctctcccctcgtcccctcccaaccctaagggcgatcactatcttgactttggtgcactataaattagttttgtctggttctgaacgtaatacacctggaaccatctagtatgtactgttgcatttggcttctgtcactcaagatttcatcatgcgacttgtctatgttgctgtgtgtagccgggcatgtcaatcccgttgctgtgtctatgtgcatggtagtgagtagggcatcattcattttccattctgttgatgggttatttccagtttggggctgttatgaaagggctctgaacattcccatgcaccctcttgatgctcacacctacacatttctgctgggtgttgacagcctaggagtggaactgctggatcacagaggtggcatatgttcggcttcattagaaaactgccagttttccaaaatgtctctaccaatttacactcccccagaaatacaagagaggtccagtcgctctactttctcgcctccacacggtgcggtctttttcactttagccattctggtggtggagacccactcgtattcgcagcgcctggagcgtaattggcactcagttaacaagactgttgaatgaatggatgactgagtaagttgggcggtgtagaccaacagcctggcgagggcggacacacgcacgcactccacacacagcgtttcgcggacacccaccgcggctcacgcagcgcaggacacagaccctgtcgcgcaccccgcgcccacgtggtctgaacacacggcctcggccctgcctcgcgcgtccggtcgcaactcccgctctccgtccccaactcgcgcgtccgtccccaactcccgctctcggcggcgggcagggggcgctgagcgtccaggcgctccaagggggcgggcccgggtcggggcggggccggccgggcttccaggcctgggctctggccgcccgcgccaccgggccgctccggggacaggccggggcggggcgcggcggcaggaaacggggcggggacttgcggaggcgttggggacgagagagggcgcggccaactccaggggggacggcaggccgagagcgcggcgcccgggcctggcgcggagcctgagcccgccggacgggaggcggccccgccgcgggctcggccccggccccagccccgccagcatggccggccggactgtacgggccgagacccggagccgggccaaggatgacatcaagaaggtgatggcgaccatcgagaaggtccggagatggtgagcgctgctcgggggccagggacgggacacagcgggaccaccagcaccaaaggcgtctacgctgccctcgccagctctgggccccgggtgttcggtgtatctccacccactagctttgccctggatccacagggctctgtccccgttcgcctggctactcctgggggtctacaaagcgtgatccccagccgtgtcctcccagagcgggagccccctcttgtgccccgccccctaaagctttgacacccctcctgcaggtgcgccccaggatctgcagggctctgatcccgggccaggcccatagccacgccccccatgtgtgccccaggggtccgcagagccagggccccaaatcatatcctctctctagaggcacccaccgcctatgccctggggtttgcaggactctcttcctccatgtaactatgccccattagcaaaactgttgctatcctcctgtgcctcctcaacctctgcaggtacccccagatgtgtccagctcctaggggggtgggtctcccctcaggcctctctgacccagccccccaccctcccacagggagaagcgatgggtgactgtgggcgacacttcccttcgtatcttcaagtgggtgccagtggtggatccccaggaggaggtgagcaacccccattcccacaaggccctgcatctgtgcaacctcaggcaagttcctccccacgctgacctctacctccagctccccgagacctcagatgcagcaggacagacgggaaccatcattagcagctcctccccttttgccctcttttctgctccacaccccctgagtttgagcccttttgcttctcagtgcctcagtttccttaggtgtatggtggggctttccaagagctctgaccctaatcctctaacccccaggagcgaaggcgggcaggtggcggggcagagagatcccgtggccgggaacgtcggggcaggggcgccagtccccgagggggtggccctctcatcctgctggatcttaatggtaggtagggatcctgaaacgcggggggctgtggggactgaaggagtgtactagggatctcaggccaaccatctcggctcttgctcccgcagatgagaacagcaaccagagtttccattcggaaggttccctgcaaaagggcacagagcccagtcctgggggcaccccccagcccagccgccctgtgtcacctgccggacccccagaaggggtccctgaggaggctcagcccccacggctgggccaagagagaggtaggaccaggtacctcccaggagctctctcctctaagtcctgtcttctccagagtctaacctaccagctcatccctatacctgctccccgtcttgtgcaccctcctcaaggcgccttccgactcctgcagaatctccctgtagctacagtctcattcctctggtctcttagaatctatacagacatatcactgtctgagattttcatgtaaattaattttttactagtttatctttctcctcactctcatgtcagtttcctgaatgttgggcccatattgatccttttttttttttttttttttttttttttttgagaaagggtctcgctctgtcacccaggctggagtagtatagtggtgtgatcatagctcactgcagccttgaacttcctgggctcaagcgatcctcccgcctcagcctcccaagtagctgggaccacaggcatatgccaccacacctggctaatttttgtattttttgtagagataaggtttcaccatgttgcccaggctggtctcaaactcacttgctcaagcagtcctccaccttcagcctcccaaagtgctgggattacgggtgtgagccatcacacccacacccggccctccccccccttttttttagagacaaggtctctgtcacccacgctggagtactctggtgcaatcatagctcactgc

SEQ ID NO: 1886694 - DNA, 4001 bp, Homo sapiens
tcaaaaaaaaaaaaaaaatctggactcaggccgggtgacgtgcctcacactgtaaccccagcactttgggaggctgaggcaggaggactgcttgagcctaggagttgaggctacagtgagctatgtgttgctacccttcaacctgcgcgacagagcaagatcctgtctctaccaaaaataaaaaaagaaatctggactccagctacccttgaaagcagatattctgagatactgagtttgcctcctggagtggtcatggggcggaggttggtggggtaggggggtagggggtgcagaacactgactgccctgggggcggagtctctgcccttcagtccccgcaatccctaccgctccctggtgttccactctcctccttgctgttcacttgcatggcctccaggctaatggctgagttttgcggccaggcatttcaggcctcccagccttggcctctgctcaccttctccacctcctcactccctgctctagtcatcttcatctcatgtcctgccctccagccacatgggcttcttggtcccttccacacctgtttttgcccatggagttctcccaccaagttccttatggtagaaaagcccctgctggatttggcccctgcccacctctcctgcccctttccccaagctttcttccaactcatgcatagaacttctaccacaaggaagctggccaggctgttagcactcccgttccctctgtctgtgaagccctttccttccctccaccctccccttctctctcttatctcaggctttgggtttgatttcacctcctccaaggttccctgaccttcaaactaggtcaggtccctggttagtcactatacttcctctttctcacctccttcatctcacttcccctgctagaataaggccacatctgtctcataatctctgtcttcctagggcctagtgtggtgcctggcatacagtaggtgctcattaatgataaatgaatgaaagcaagcacatctccctttctctactggcaaaatcctaatccttttctggttacatttctcctgtagcatccaattctgttctcgagacccaaaagatccctgaggtcctgtgatcaatggagttttagctcaggtccatttcacagtgggcccaggggatccccagattcatccgtggttatttccccaggcacagagtgagtgcactggtggcacaggcatacccagcaagtggcataatcccccccattagttaactgggtgtcgctgtgcatggctgtgaaggcagggatgcacctggctggtgaccccagaacccctccgggtacggcacaagggcagagcccaagaacttactttctgtcctcttgcatttgcctgtggatttgcagttggtaatggcgttcttgcccggccctcctttgttcctccaggcagccaggcagctgtggcgtagtgaaagggcaggatgcgggataggaatggagttattcctgattcagactgatttgctctaactgtgatttggggcaagtcccttcccctgtctagaccttagctggctgccgcatctaaaaaatggagccaataatcttttcctcgtctttggggtcatccatctttcaaccacatcaggagcagcgggaaccaagtgcagaggatggccttaaaagcagtatgggaaccaaatttttgtaaagtaaatattttcaacctttatattttggaatcaccagcggtatttattacgtgcactctaggaaatggaggcaatgcaatgccaaaaacagaaagtaaaactgctgtcctgtgccgcggcccggtggaggttttaatgtctgtatcttaagatctggtgagggcacgggtaggtgcggctggactgagtgaaaccagccccgctgggcgcctgggcccttgtctcagggctgtgctcgcagtggaggcatctgcagctcggcacccagaggccccgcgacccttccaacctttgtgacgctccgcggagacaaaggccggcggcgcagccttgggaagggttaaggccacagacgcagccctgcgcgtgctagagcggccggtggcggacttccggttggggcgcgggcgcgcgccgcgtgttcccgacccgccgaggctgagacctcgggcaacctcagcagtgcgcagggctgcactgtctccgtctgcggcctgcagtaagcgggtaggggatatgtcgcgtggcctcgcctggtctgcggcgggaaactcgcatctaggccagaccctcccgcagggtccgcactcgcgatctgggctgtgggcagcatcgtggcccctcggggcgttataggggcgtgaggatcccgggcgagctgggggcgggcggcttcttcagctcccttgcgccatggaacccactgtatgcccgttatgcagtcaggaaagatgaggccgggaaggagggcgttacgctgcaaccccggagaccagctgtccctcgcgttgccgcagtcggcagaggcgtggccggagccattcccggtctccagtgcggctgcaagagcgggcgcccgagggcgttctgctccgggcctccacccgcgagctgaccgtgtcaggcgcgccacacacggcgcttctcattctctctccacctcgcgaggcagaagctgccgttcccgtgtcacagacagaaaaacagtctggggtgatttatccggagtcaagactcaggtctgtggctcagtcgggaaggatagaaacccaagcttcctccgaatggttcagagacccgaccaagttaaataataatggccctggctcaggggtctttaagtcttccccccgccctccccttttgtttttgttttgttttgagaccgcctcactgtcccccaggctggagtgcagcggtgcgatctccgctcactgcagcttcgacctcccgagggctcaggtgatcctcccacctcaacctcaggagtgtctgggactacaaacacgcgccaccacgcccggctaatttttctgttttttgtagagtcaggatctcgctatgttgtccaggctggtctggaactcctgggctcaagcgatcctcctgcctcggcctctgaaagtgctgggattacaggcatgagccaccgcacctggctaccctttaattaactcaaggagtttaataattgaatttaggctgggctcagtggctcacgcctgtaatcctagcactttaagaggccacgtcgggcagatcacttgaggtcaggagttcaagaccagtctggccaacatggtgaaaccctgtctctactaaaaatacaaaaattagacggatgtggtgccacacacctgtaatcccagctactcgggaggctgaggcaggagaatcccttgaacccgggaggcagaggttgcagtgagccaagatcgcaccactgcactctagcctgggccacagagcaagaatctgtctcaaaaaaaaaaaaaaaggtttgacacctataccttcctctgtgtgtgtgtgtgtgtgtgtatacatatatctatatatatatgtatatagagagaggaggaaaaattatataatttttctatatgtgtgtgtgtgtatatatatctgtacaattttttttttttttgagacagtgtagctctgtggcccaggatggagtgcagggactcgatctcggctcactgcaacctccgcctcccaggttcaagcgattctcctgcctcagcctcccgagtagctgggattacaggctgctgctaccatgcctgggtaatttttgtatttttagtagagacagggttttgctatgttgcccaggctggtctggaactcctgagctcaaaagtgatctgcctgccccagcctccccaaatgctgggattacaggtctgagccatcacacccggcccatatatacgtattttaaaataacacctttactgagagagatgactcacacaccatacaactcacccatttaaagtgtacagttcaatgattcttagtatcttcaca

SEQ ID NO: 1886695 - DNA, 4001 bp, Homo sapiens
acaagaacaagctgggacactgagatccctggcctagggaaacttacattaacaaagaggaagagagaaagaaagggagatggctagagatggggatagagagagaaagagtgagcatgcaccacagatttctttttatttgaccaaaggtggaaaacacttaaaaatggctatatgccctcccatttccagactcaggtttgagatctccctgcctgccctgcacagctgttcagagggaagctatgaacacagtatccccagcacacacagagcataatggaaggttctaacccaccaaattcttccccgcccatttacaatcaaccttaagggctggaccaagtccatagagtttgagagggaaaaatattggccaagatagcgatttattcatgtgttcattcatttgctcaaaataacattgagagtttactgtgtccctaagaaatatcaactactgttgaaaatattctctctactttctctctttacattcctgcccattggcatgtatgttccgtccaatctgccgtaacctcagggtctagcctggtgctaacacacaacaggcactcacttttgtgaactaaatgaatgtacatacttaattctcataatagatcaataagtattaccgccccattttacaggtggggaaactgagactcatagaagtaaagtgacttattcaaagtcaaatagctagtggctaaaattcaaacctagtttcctgtacttcctcgctgaaggatcctaaacagccactgctgaatgatttcattctcctttttgaaagccttgtgccctcaaaggagatagagctgaggcaggatagaaacccaggaaggggcccggctcggtggctcacgcctgtaatcccagcacttagggaggctgaggcaggtagaccactttgagctcaggagttcaagaccagcctgacatcatggtgaaaccccgaatctactaaaaatacaaaaattagctgggcatgcttctgcgtgcctataatcccagctactcaggaggctgaggctggagaatcacttgaacatggcaggcgggggttgcagtgagctgagatcctacctctctacactccagcctgagcgacagagtgacactccgtctcaaaagaaagaaaagaaaagaaagaaagaaagaaagaaagaaagaaagaaagaaagaaagaaagaaagaaagaaagaaagaaagaaagaaagaaagaaagagacccagcaaggattggattgggacaggtgcctctcggggattttagggtttgggcagcttctgggagatacgagagcttcagcctctggcgtatctggggctaccttggaagggaatgtgtaacagacacaaggtgagcattttggaagaaaagcctcacccaataaaaagccctggagagcaaacagggatttccataaccacctggcagagaggggcaggcagggccccactgggaggaagcagcagcctgccttctttacatggccttgccgggcccaagactttccacctccgcacctccagagacacaaaggcaaggccaggagggcggcccactggtcttctttcccagtaagctcagatcaacctttgtcacagacatgagtaattggggaagtgacttttatgagtttgaggggtagggggtggggatctgatgatgtaaggtgatcccaaagctggtttctgggtttgctttttaaaagtctaattgtattagggaggctgcatactgttttctgaaacgttcagcacatccttcagaaaggaggggaaatggccgggcacagtggctcacgcctgtaatcccagcactttgggaggccaaggtgggcggatcacctgaggccaggagtttgcccagcctgggcaacaagagcaaaactccagattgtagaccagcctaaccaacatggtgaaaccctgtctcccatccaagtactagtactaaccaggcccgaccctgcttagcttccgagatcagacgagatcgggcgcgttcagggtggtatggccgtagtcgaaaccctgtctctactaaaaatacaaaaattagccaggcatggaggcacacacctgtagtcccagctactagggaggctgaggcaggagaatcactggaacctgggaggcagaggttgcagtgagccgagatcacgtcactgcactccagtctgggcaacagagcgagactccgtctcaaaaaaaaaaaaggaggggaaatgggtgtatttaatccacaaagtttgggtgcctgtgaactaggtcaacccctcaagcagccaaacctcaacactgaaatataggccctgtgtttccaaggccagattgcagagcaagcaaaggaagaaaacaatcactgggaaagcctgccagcttttcttttttccgcgcctgagtcaacttacagctgtggttactaggctaatacttcagagatcccaaactgtctaatagcctgggtttctcagaccggtgtgtgctatgaagaaggaaaataagcagcaactctaaaggactgggttattagccaggcatggtgactcacacatgtaatcccaacactttgggaggccaaggcaggcggatcacctgaggtcaggagtttgagaccagcctgaccaatatgatgaaatcctgtctctactaaaaatacaaaggcatggtggcatgtgcctgcaatcccagctgctcaggaggctgagacaggagaattgcttgaactgaggaagcagaggttgcagtgagccgagatcgcacctctgcactccaggctgggcggcaagagcaaaactccgtctcaaaacaaaaactggtttattacagttgagtttggttttttttttttttgtaaaggtcttcattctagaagctggagataaaccaatggaataaatacaaggttgagatcatggggtcagccacagcatggggcagaggaatgaccctagcaaacactccaaagtcccctgagttaagaccctacagctgcctgtgcacaaaaagtgacaggtttcaagtttcaaaattcccatggagtaaattctccatgaagccaatgtctaaacctggtgccaatgttacatccatcccttcacttccgtgcactgtccaaagagagtcaggccacatcccaagtcctagcggccttttaaaatcacaagccagttcctcagattgaacgtgtgattttaccagaagggcacttccatcctggggcgactccacattggactgatacaaggagaccccacagtccaaaaaagccaaaacaaatattaaatgtcaggaaatctgttgtgtgggggtgggggtctgtgaacataaagggaactgaaaccaaccacaccagaggcctgcggattctgtgtgaaggctgcctcttcccactaaatcaccagtcccagggtcccccgccacctcccccgggtctgacccatctccatcatcaccaccccctctcggaggtcccaccctgtcaacacctccattctcagcttacttcacattggacactaattccccaaacaccttttttctttgtttttgttttttcaggttattgaggtgaaaaacaaggagaaaaaggaagagaaaagaccaactgcggatgcttcagattacagaattgctttatgcctcagtttcctcacttgcaaagtaggaagaataacagtgcccaccctcctaacgttctagtgaagactaaatgaggtaaaatatgtgaagcacttgccccagagtctgaggcaaaagtgaatacgtgtcactattaattattaacatattagtgttaatatgtaataatattattggtcaaacacaggagcttagaagggagaaataaaaaccagaccaacccacccttggtgctaccaaatatcttggtgcaggaaaacaaagtcaccagccttagcactgggacaccccagacgcatgctcagatacaagcttgtttctagcccctgccttgctctccaaga

SEQ ID NO: 1886696 - DNA, 4001 bp, Homo sapiens
caaaaacctggaacatgtaaactgacctggagtcctaggagcttgtgggaatgctcaagtgcaaaactttctatcactgtaacagcttgtcagccagttcagagtctggggtgacctcggtaatttatggtgggaggggaaggtgggtaacagggtccaacatctgtaaacgagtgtctgaacactcaagggcaactgatcaccaaactgactgatgcttcaaatgaggacgtaccttacaaaaagtcaacatcaatggaaataataataattgtattattactaatagattaagggctttttctatgccaggcacagtactacaaaattcacgtgtctgatctcattcttgctagtagcttcatgcagctttttctgactagctccacttagagaaagaacgtacaacagctgtttaaaaaaaaaaaaaaaaaaagcattccagtgctataccatgagcagaagtgacaggaaagaagcacagggaagcatcatgagacacagcccacgagaaggttaaatacactggaattttatgcatgtgagattctcagacagcatttggctgtgtgaccttgggcaggttgcttgacctctctggtgcctcagttccttcatctttaaaaggagagggctcaattttaaaaaaattatgggccacgtggtggctcacacctgtaatgccagcactttgggaggttgaggcaggcagatcactaggtcaggagatcgagaccatcctggctaacacagtgaaaccccgtctctactaaaagtacaaaaaattagctgggcatggtggcaggtgcctggagtcccagctactcaggaggctgaggcaggagaatggcatgaacccgggaggcagagcttagagtgagccgagatcacgcctctgcactccagcctgggagacagagcaagactccgtctcaaaaaacaaacaaacaaaacactatgaagctggaataaaacagcacagtggcagagcaaggacagtatatcagtggtaactaacagaaagcctaaaaggaaacttagcacatatttgaaaaatttagtatctgataatagcaatattttaaagcaatgggaaaagggcacactattgagtgaatgataacagacaatccattaactatttggagggaaggaatagcattattccctgcctcacaccttataccaaaaatttatcctgggtgtaggtgcttagttctaggttaattttacagttctatagttttgtttttttttttatggggaatgtttgctcaatcttaaaatttggaagaactctctaagccacgaagacactaattaagaagtcactaattaagacactcaactctgaccacagaaaaatatataacttctatatatcaataaatacctcaaacaaaatcaagagactagaaaaacaaaaaaagttggagagtaataactgctacataaatgatttgaaaaaggatgaacagttttctatatttcaaaagaaacccttacaatctttttttaaagacacatgccataattgaaaataaaacacacaaagaatataaacaacttgcggagcaaatgcaaacagtcaacaaacccataaaatgagggcagtgaatgaggtttaatggaacaaatcctgactgagggccactgggcaacattcacaattttaaagagctcagagtccactgctattgggtatgtgtggccttgctgtgtggtcaaaagggtgcattcctgaaagtcctggctttgaaacgcagcctggccacaggctgcccgggtgcaggaaccagtgtggcccagctccagcgtggagatgctctgacccacaggcagccgtggtagccgtgagcagtagctctcacggggccctctcctgccctgcctggaaccagatggtggagagaagaaaatgctcatctctgcgcccttccttcccatctgcggtcacctcagctgcccagaagatgctcaaggtgatggagatggaaggaaagggcaggagaggttcactgcctccttctgactagtgttccctgcggccctgcatggactccaccccggtcatgctctcagatctgctagtgcagccctctgattgtaaaaataaagcacataggccaggcgcggtggctcatgcctgtaatcccagcacttagggaggcagaggcaggtggactgcctgagctcaggagtttgtgaccagcctgggcaacacggtgaaaccctgtctctactaaaatacaaaaaattagctgggcatggcggcacgtgcatatagtcccagctactctggaggctgagacaggagaactgcttgaacccgggagacggaggctgcagtgagccaagatcacaccactgaatgccagcctgggtgacaaaaagagactccgtctcaaaaaaataaaaataaaaataaaaacaataaagcacataatgacaataatataaaaaatcatgcacataaccttagctaccatgtactgagtggctaccatgtacttaacaggcaaactttattccaatggacaaagtgagtgctgcaaagtttgactgactgatgattcattcattcgttcactcactcaaaactatgtactgagcatctagcaggtgccaggccctgttctaaatgctggggatacagtcatggggaaaaaacaggcaaacccctgcctttctagtgggatggaataataaacaaaataagtaagaaacgcgtggtctgtcagatgataacatatgctcaggagaaaaaaacgtaagtcagggaacgagaaataaaaaattgtgggagtgggtgccaactttttggatggatggaatgatcaaggacagcccaaggaggtgacttctgacaggagacaggagggaagcgagggagcgtgtggtgtgggtgtttagacaacaggcatcccaggcagaggaagcagtcagggcaaaggcctcgaggcacagcaggcttggcgtgtccaaggaggcagcccagatcacaccatcagtaagggagggaggctttcacttgccatgctgtctgggcagagaggcgcaggaggcaacacggtgtgtccaaggtcacacagttaatcattgagagatcagccaagcatggcacactggagtcagggcacagagctgcatcccagggagtcacacccctccacatcccaacactctgatgtcacacctccaccttccttggaggctcctggaggaaaggcccaggtgacagctcttccctggcaccaggtgggtctcctggcttcgcctcccgctgcctcgggacctgggaaaggttctcccgactcagctgctgggcaagccgaggcctcctgtggtggcgagactgagcgagggcaacagcgctagtccctggggaggctcagggcgacccccgggattctaaaggtacttagagactgcgaataagttcagggatttatctgttgggctcaatgtattggcctggcaggaaaggtcattcaggaaatttttcaaaattagtgatagtcaatcttctaaaagacaattatatctgtgcgtatacctcctgcatcagcgtgtggaacatacacgcacacgcaggtgcacacacacttctacctaacacacgtccgaatgtgaacaccacttgttcaacttcgacatctaatgatgaggtgatccgtggccagcgtgaagatacgcagaaagcatggactcctgagccctgggactgcagtctgaaagcagcggaaacacttcggacctgggcaccttgcgcacctcgcttctttagctgtccttggcctcgatttccttatctgtagagtggagctcaccagattgctaggagaactacagaataaagcgcccgacttagtgcctgacatccagaagaagcgccatgaaatggaagctatcaaatcgcaggacagttttagaagtatgtgcagtgcaatcatttcatttagaagacaaaccaaacccatgtaagcaaatttatgagccat

SEQ ID NO: 1886697 - DNA, 4001 bp, Homo sapiens
tttatctgccacaggcaactagagcgttcatcctcatccctggctctgcttctggtccatgatgggacaggcagttgcggggttgacagtcagctcagccgaggccaggctgcgtcagccaacacccaggtgactcccagaggtgtgagcaggttgtgccaggccaggtgtgctgcatgtgcacacatgcataaggatatctaccatgtttcttttattcatgaacaacggtgggcatagtggcttccagagcacagtagttctgcttcattactgtgggtacaatggtcacctatatgaaaggctttgggcatcagatttttttcttaagtgtctctttgctcattctcacgagatgaactcttctgcccacgaggctgtgctagggccctgtgtattttctatccagaatagcttaggctaatctacaaacttgtgtgcttcctcttctggatcatcaataaatgtgtaaagacagaccagccctaagattattccacagagaacatgactcttagatattaattttttgttatttttgtgtccaagccaagttcttcatttatagctaaatattaaaatacaactaaatatttaaaaatagcaatgctttagggttgacacatttccaaagctttctggtagtctacacagtatatgcccactggttgtctcaccattcttcttcatatttatttccctccaccaaccccaccccagccacccacccggggtcatgagaagattttttttttttttttttttttgagacagagtttcttgttgcccaggctggagtgcaatagcacaatcttggctcactgcaacctctgcctcccaggttcaagcaattctcctgcctcagcctcccaagtagctgagattacaggcatgcaacaccatgcctggctaattttttttttttttttttttttttttttttttttttagtagagatggcgtttcaccatgttggtcaggctggtgtcgaactcctgacctcaagtgatcagcccaccttggcctccaaaagtgctgggattataggcgtgagccactgcccccagctatgagaagatcttaatcaggcacaacttactgggacagaaatgcattacatcttcttcagaagctatgtttgctccaacctgtggtatctgccctttcaagcagacagcccagtttgtccagaatgtaaatgtgaggcctggcactctgaggacaggagtccctttacaatactttacagaaacgggagggggctatgcacatccatgatcctgatttatgttaaacattagggcatcaaacacatttgccatttgcagcaacatcccagaaaacaatcttcaagtgtagaagaaatatggcagtgacggaagtcactcctgtcatcctcgagccttcaggcaaggtggcctcaaaaataaacctagattgtgagattcagtttggaagagacttgaaaacccacaaaaaatccaatgttatgtaaaaggaggttactaaactgactatgataatgatagtcttaataatggacccaaatgataacattggctttctgtaagagtggatgaatatgataactaacaatttacctacggaatacatttttaatagcagtgattcatacctgctgagaaagccattcccactggaacctgtatgggcccatttctaattcagatattttctgcatcctaccaagtaatgtcaactgcacagtttgacaggctggttttatcttgaaaaaaaaaaaaaaatgtttggatgcaggcaagttagaagaataaacctgagtaagtgtgttaaccctactagaaaaatacccattactttatacatgttattgccctaagcatgaagaacacagctggtgtgaaagacagctgacctagttcttaaatggaggcataccattatggcaagatcaaagtccaggtgccctggttctccgtggggcctggatctttaatgtctcagcactggcagtgaccaggaagcctgaccaagcccctctctgggtcctatttggtcccttttccaagaagcaaattggtcacatggttaccctgttcccttttctttccattctcaatctgcctggtgaccaaatcaccaacccaggcctctccatttttcttaccttattttattgctttgtaaataacaataacaacaaattccttaatattgaaaatatattttttaaatgaaggtaagaataattgaatgctcacttgatcatcctcggatctttatttcttgttacaaacaatatcagaaccatcccaaaatggttcaaaagaagcatgtcatcagatgaatgatgttttcactattacactgtaaaatatgttgtcatagttgatgttttattcaataaatatttctgagtctccattgatggaaaatgcaaccagagaacatgaattctgctttgatagacttcagagtcttgaatggtgatgaccagggctgaacttgtgagcttcattatttgatttagtgcataaacatgcctgtgatcatggcttctttttacagctgaggaagctgaagctcagagaggtttaaaagtgagcctaaggcatatggtttgccttagcgcttttgtgtatttaggggcttagatttgtagatcagaaaccatgttcccagatacacatggagcccagcagggcattcgagacacagcctggaagtagcagttgctgccaggctataccagtgttggacgagatctcttggctggttcacttgaggcaagagccaagcaactaccctgtggttacttgtttagagattccaggacagaaaccccagtaacccagcttcacaaaaaggtaaaatcacaaacactgttgtcatttctgcacttgaaccattgctgccatatagatctgtgatcactgagggcctacatctgtcactgccatgtttcattgtggcaatggacagtaaaagttgtcctacgaacgcggtcccaagcatgtctgagtccaaggaggtgccttggatccccttgaagctccttacttagcatccctgacggtttgccctggctctgctcctacccccgaggacagccagtttgaaaagagactcttgctgggtcaccatgttaggatctaccaactttgatagaatgagatcagaatggaaggcaaccatattccaaatgatatctatcccactgatatggcttggctctgtgtccccagccacatttcatcttgaattgtaataatccccacatgtcatgggaggaagtgggtgggaggtaactgaatctcgggggcagggttttcccatgctgttcttgtgatagtgaataagtctcacgacatctgatggttttatacatgggagttcccctgcacatgctctctcttgcctgtcaccatgcaagatgtgactttgctcctccttcaccttctgccatgattgtgaggcctccccagccatgtggaactgtaagtccattaaaccacttgcctttattaactaccctgcctcaggtatgtctttattagcagcttgagaaccgactaatacacccacatagaccagtaaagttgtcctccagctgatatcacttacatcttgctataaattggaaatagtaaccccaccaccacccagtatcccagaagttaagatttagttaccccttgtgctaaaccctgcctcctcctttacacaccttccatcactgttcacaggcactgacctttccctgacaccagcttcaaagctaccatgagagaggacttggcctctccatcttaggtaaacagatgacctgcagccctgaaatcctaaacgtaatgggtaagactcagttccattcccctctctgcccatttgtacaatgtctgaggcagattcctacatctacgaagggagagaagcagtggatttcccatacacaatctttattgaacgaagcaagagcttacaaatgttgagctctcatttctagcattttgatgaaa

SEQ ID NO: 1886698 - DNA, 4001 bp, Homo sapiens
tactccctttgcaatttaaaatgattaattagcttaaatgagtaagtgtccaattacagttaaattgtccctatttttgtctcaattacatttgagaccactgctttttatcacttgtatcagtactttaatttgcttgttttccactctgtataaagtatggagaaagtgaaaataaatagtcaaatgattgcactaccgttgctgtaaggacaagacttcaggctttgccagtactgaaccagtagctgtcaggtatatcaaatttgcaatacccaaaatgttaatttgccaactgatgtacacaagtctgaatttgctatgtgcaaagaagtgaggccagtggctataaaaggtaaagggtaaggatcatttggaagttggacctcagaaactgcaactaatgacgcttatttgagtctgtgtcctctagatggcagtagaggaaacaccattacactcaaggtgggcttgctaacagctcacaattggccttcaaatgggcatcgtgataattagggatgttgagcattttttcgtatgtttgttgggtgtctgtatatcttcttttgagaactgtctatgtatttcctttgtctacttttttttttttttaagacggagtctcactctatcgcccaggctggaggacagtggcctccgcctcctgggttctagccattctcctgcctcagcctcctgagcagctgcgattacaggcatgcaccacgacgcccggctaatttttgtatttttagaagagacggagtttcacgatgttggccaggctgacctcaaactccccacctcaggtgagccacccacctcgacctcccaaagtgctgggattacaggcgtgagccaccacacccagccctttacccactttttgatgggattatttcttttattcttgttgatttgagttccttgtagattctggatgtcagtcttttgtcggatacacagtttgtgaatattttctaaaagactacatattgggtagagagtcgttgctccagtgatgagtgcaacaaaatctcagaaatcaccactaaagagctcatccatgtaatgaaaaaccacctgtaaccctaaaactattgaaagtttttttacaaaaagagcacctatgctttggaatgagaaaagaaaccagaagtgtgtggttccagggagaagagtgggagcttcaaaatgttccaacttgcactgatgtaaaagagttgttggctgggcgtggtggctcagacctgtaatcccagcactttgggaggccgaggcagctggatcacgaggtcaggagttcgagaccagcctggccaatatggcgaaattccgtctctattaaaaatacaaaaattagccgggcatggtgactggtgcctacagtcccagctactcaggaggctgaggcaggagaatcacttgaacttgggaggtagaggatgcagtgagctgagatcataacactgcattccagcccaggtgacagagtgagactccacctcaaaaaaaaaaaaaaaaggagttgttaagattgcaagcccaggaatcaggtgacctgggttgtgttcccagcccagttttcttagccacagtggagaaagttacggaaattctgtgtgctgcagttctcccagcttatatggaagagtacctacctcacaggtttgaaggaaggctcattcatgaccactttgtaaagtgttatcacagcagcatgtgcgggacagtaagtgctcactaaatcacagtgatgcggctgtattaaaccttcccaatatgcccttataggctccaaaacaaaagacaaataaacatagttgggctaggtggctcgtggacagggcctggaggtgagtgctatttccagataaatcaccgctgatattgtgtgtaattacatgaagccaaaattcaactgttcctacaagacatcaaagcccttgccttgctgaaaaatacaacaacaacaaaaatgatggctctcatgtactgagctgtcactatgctatgcacttttcatctgcttaatttgattctcaccacaacatacagggtagctattagcatctccatcttaagggggtcaaataacgttgaccaggaaacagctacaagaggtaaaagggcttgcccaagggacacagagattgatgtgggttgggaacccagcaggtgtaactcccatattcatccttactctcgttcatcagactgtggctagttgtctcatgacatcgtctctaatacagaataataattatttttagtatactgaatgcatacatgtgataggtaccatatgaagtagcttacctgcatcctgtgtcctttgtgaagaggcctcttctgggcacacacagatgcccttcctctggtacctctgtgccctccttggcttcctagcttaagtaggactggaaaagaaagctcagacatccaatcctcctgtgagatctttagacggaagcttatagagagcaaacaggtggaggcttaacctttctttcctacttggggatgccatttctactgtctccactctatcattcacctgaccctagtgaacaccccagtgtccatcccagaaaatgatcctacaatgggagctgcctttggccaaattttgactttgtaagagaaaagctcatctagacaatgctcaacttcctttcaccagactctggacacttcattgaataaatactcagtaagcacctcctaagagccaaaactcaatactaagtacaaaaaatgagggtaggggaaggcaatgatcaagtagcttccgttctaggaggtgggaaacatgaatgcagaagggcaaaggagtctgcaataaattacctaaaactgaagtcaaaatgtaatggatacatagaagagacactttttttttttttttaaatatggagtctcggtctgtcaccaggctggagtgcagtggtgcgatctcggctcactgcaacctccgcctccttggttcaagagattctcctgcctcagcctcccgagtagctgggactacaagcacccgccaccatacccggctaatttttgtatttttaatagagatggagttttgccatattggccaggctggtcttgaactcctgacctcgtgatccacctgcctcggcttcccaaaatgctgggattacaggcgtaagccaccacgcctgcccgaagagagacttttaaatgtgcatgaggattggagagagcctctaagaccctgaccagtaacatcagccaccaacatcatcatcatcaacctcatcaccttcatcagagcaaattccgacatactcaatgaccggttgagttttctttgctttgctttagattgtttcaaatgtagatgcagcacctctgagtgccaacagtcacgttttggggactggtttggccatctgttgtggacaacctctagatacaagtgcgacccttccaaggggaatcacttcaccactcccactttccctttcttaaatgtcaaatgttgccattctgcagctgttttggaatagatggagaaaataacatcagaaaccaactaaaaaaaacatatttggtcattaaacatcagcaaactaaaacatgtaaagttcaagttgctcccctctgaaatgacttcctcatccacacactctatctccctcattgccttttttccaacaattgaagtccaaggcgagagttagagcctggccctccagatactgcctgggtatgaatgacaagcccacgtccatcaggatagaaaaagaataagaagccggcttggcttctctctgggaaacgctggttgatgagggcactgccaccaatcaatggaaacttcagtcctttccatcaagagtatcatgaaagccacccgccagtgctctgaaggtcctgacgtggcctgcaggcagagattgaagaacttttgtaatcagatggtggggcacatctgatgtctaaggtcccaaagttttctcctttttttcttt

SEQ ID NO: 1886699 - DNA, 4001 bp, Homo sapiens
cactgctctgcatggcctggtgcagggctcccgtgagcagacggcccatgggccacgagccaggtatgtggaagagcctgtgccttctgtcctccaggccggcccagtccaacggcgtggctcaactgaaaccacacccagaactcggagaggggaagacctcgcggtggggcgggcccaggccaagcccctccactgccatcacaggtttacagcggagcagaggggcaggccggatacaggcagcccaggccacaggtcaggggacccacaccaggccacaggaacaggcttgctgagggtatcagaaaaccccaggtcacagtggtttgaaaaagaagtttatttctcagccatgtaggcaggaggaggcagtccagcactcggtcacctgaggtctcagggaggcaggctccatctgctgccccgtcatcctggttcacgcctccctcctcatggtcacctctgtgttcaaggaagtgcttggccgggcatggtggctcacgcctgtaatcccagcactttgggaggccgaggcaggcggatcatgaagtcgaaaaatcaagaccatcctggctaacacggtgaaaccccgtctctactaaaaatacaaaaaaattagccgggtgtggtggcgggcacctgtagtcccagctactcaggaggctgaggcaagagaatggcgtgaaccggggaggcggagcttgcagtgagccgagatcacgccattgcactccatctggactacagtgagactccatctaaaaaaaaaaaaaaaaaggaagtgctcaagttcaggccggggtagggtgtgtgcagtggcctccgtcaagtgtgtgtcacccccaggcagctccctgctgcgcctggacccaactgtgcccttggctcactccatcttgctgggtttcccatctctgtcttactggctgctttcagagaccaggcccagagtccccaggactcaggtgaccttggctaccctggaatcctggactaaagatctgcaatagaaatgtgtccagcagggaatgtaatgtgtccagcagggaaccatcctgtttgctttgcttttctgagttcctacaaccaaccggccagggcgcactgtggggcacagggatgcaggccctggagtatggccacttctgcctgggggcgtctggggggtttcctgagtgaggtggggtctcaccagctccaggagacaccactgccatgcacaaggtaggtgtgggggtggaggatcacctccgtgaggacccagaccccacccactgtggctgtggtggagactgcaggtctgtctcaaggccccaggcctgacacctgcaagaacagaacctgggggtgacggagaggggattccaccaggccagcccggggcttgaaccccagccagggcagctgctgtctgctgccccaccaggtaacgcaccgacccagctgctgttcagctccccctctgggccagcaccatgctcatggcataggccggctgggccctctgagacccccactcccacacagactggtctgcatggaggctggtgcagcctgtgccgtacagaccctgcccggctgcactactggccagagccccctgcagacaggcggctcgaggggagctccaccatgcaggagatggcccagcactgcagtcacttaggctgctcatccctccccgaactgacatgtccctccctccagatgccccccaccgccgaaccccagcatgctgggcatgctctggccatcccacacagggatcagggtgggagggctggaggctgcctgtcaggggcaaggcctcctccaggaggtaggacggggtggtgcaggtggggtcccctcacctgatgggccctcgaggccaggctgtaggcaggcaggagggggctgaagcagtggggtcaggcccggggagcgggggccctgccttccttcctcaacacacggggctgcccaggccccgctcctggggccgggcccacacctcacagacactggtgttggatgcttcggcttgaaggagctccaaatggactagccgcagctgcccctgggtccacctggcccaggcaataccacagaatcaccaaggctcatctagccatgggcccaaacccaaggccctaagaggcaccccgggtgcctcagtcacagtcccaggcagctcaggtcccaggcggctcacagtcaccatccttgacttcatggtagcagaaatggagtgctttgagcttgtgatgagcacaggctcccaaccctgggagagttcagacatgcccactggagaggccccaggccctgatgatacccactcctcagacatgcaaacctggagccagggaggccccaatgaactgcatactctcccaacagaccaagctcaccccacaccagcgcaaggccctttcagacccagcctggccacccccatggacctggccagcacctcccccagccccaccctctccagacaggcaccaggctgtggtgacccgcctctcagcagctcctcctctgatgcctccccacggtccagtcgttaccccctcgtccacctgactgggctgcgcatggcctcagtgcagagccaggttttagtagtgggtaaaagggctcccttgctgtgctttaccagagaatgcaacacccccaaagctccttcatgacccactgtgacctgcagcaccaccaagcccatcctcatccctgtgtcccaggccaccagcctctgagggcaggcactgcaggagccaccgggccacagaggatggaggcagggaggacattctgccttcatgagggcatgctctcaaagacagagccgccccaaactgtcagcaggtgaccctccgctctgggaaggcaaggggaggagctcagggccgtggccagagcccacgagaagcccgtgcccagctcagcaggtgaccctccgctctgggaaggtaaggggaggagctcagggccgtggccagagcccacgagaagcccatgcccagcactgcagggctctggccactgcctaatgccctccatgaagccctgcctgcccttccagcaaaccagggcccctgaggctccagaaaccccagctccactgccctcagcctccatggccttagcagcctggctctggggctgagctcctggaagggcagggtgggggtaggctcctgagttttattttctcacatttcttccagacatgcttctgctgatcctcaaaatggcaaaagccaggatgctcaattctcaaagctcaacagctgatggcacatttgataacaaaaatcagtaatatttagaaacaaatttgattaaattcgtaagtgcctgaataaatcatacttgtagatttaatataaaatgtgtgaaagcttattcgcaggccaaatgacattactgcagagcattaaaaaccagcagggggagggctgtcggcccagctggtgctgcgtcacgcccacccatgtcatgtggggtcaccaggctgcccctgcccaccaggtgtcagtggggccctgggcatgggctctaggtttggggccttttagcacctctgaccactggactccaatgccacctcagagaattccgcctatgcctgcctggaccaccgaggctgccccctcccctagcgccgactctggggccccttcagcaggggggcggcccctctgttccacttaatcttccatgcctgggcacagcaggtgtgacagtaatgcagagactctaactcactttacatgtcatcaaacccaaatccaacgggtacccaaaccagactgatgggcctgccagcctccacccacaggaacacactggtgacttactgcagcagactcgggaggtagctcctcctcctagctgcctttgtccccaactccttggacatcccttagcccagggtgaagggtcaagggcacacttgacaccctcggacagggccagagggagtgggtctcggcaggaagtcaccaagagct

SEQ ID NO: 1886700 - DNA, 4001 bp, Homo sapiens
gcccccggcctcgcccacacacaggtgagtcccccaccaactcggagaccttgggtgaccagctgcccagcctcagtgtcctctgagatggggatggtgggggtccctgccttggagaaaacaaacccccctctctactcacctctcctttcctccccagcccatccttccccatccctgatcgatgtgagggcaattttgacgccatcgccaacatccgaggggaaactttcttcttcaaaggtgagtcatttcacttggcctcatatatgttggtttcctgcccacttccagtgacccactggggctgtgggcttaccctggaagcggaacttttttcttctttgagacagggtcttgctttgttgcctgggccgcagtgcagtggtgtgatcatggctcactgcagcctcaaaatactgggctcaagcgatcctcccacctcagcctccctggtagctgggaccacaggcacatgccaccacgccttgctagtaatttattttattattttgtagagatggagtctcactatattgcccaggctgggctcaatctcctggctcaggtgattctccggtgtcagcctcccaatgtgctggcattacaggtctgagccaccaggcaaggccctggcacttttagcgctaaaaagggaaaagtctcaggcgggccaggatgggctggtcaccctagatccattgcgcccttgatttccagatgggacccctccccacccagccacacaccctgggggaggagacctcctgctgtctcatgccttcctgcgaacccctttgtcccctgcaggcccctggttctggcgcctccagccctccggacagctggtgtccccgcgacccgcacggctgcaccgcttctgggaggggctgcccgcccaggtgagggtggtgcaggccgcctatgctcggcaccgagacggccgaatcctcctctttagcggtgagtggggccggcggcggggcgcgctggggccggcgcggggagcccacccctgacctcccggcctccaccctgcagggccccagttctgggtgttccaggaccggcagctggagggcggggcgcggccgctcacggagctggggctgcccccgggagaggaggtggacgccgtgttctcgtggccacagaacgggaagacctacctggtccgcggccggcagtactggcgctacgacgaggcggcggcgcgcccggaccccggctaccctcgcgacctgagcctctgggaaggcgcgcccccctcccctgacgatgtcaccgtcagcaacgcaggtggggagcgcggtgacctgcgggttactgggcctgggggtggggagagggatgtggggaatggggacatggaggccaccctgcggggatgggggtccttgggcatcagggagcggcggggcggggagggaccgggactcaagctctgctcctccaggtgacacctacttcttcaagggcgcccactactggcgcttccccaagaacagcatcaagaccgagccggacgccccccagcccatggggcccaactggctggactgccccgccccgagctctggtccccgcgcccccaggccccccaaagcgacccccgtgtccgaaacctgcgattgtcagtgcgagctcaaccaggccgcaggacgttggcctgctcccatcccgctgctcctcttgcccctgctggtggggggtgtagcctcccgctgatggggggagccatccagaccgaacagcgccctccacggccgagtcccccgccgctggacctggtcgggggttgtgaggcgctgcggaggccccttgtctgttcccacggacgggggctcgggcgcggactaagcaggggggatctcccgcgcaggggcggcggcggcggggaccggtcgcctggcgctgggctcagtctcctcagggtctgagaccccggcgctgccaccggaacccgccttcaggggcgcacgcgcgctgggaccatgcgtcggtcgtcgcccccgtcgttccctcccggctgccgccagggggcggtcggaccccgcctcccgagcccggggaggggcggggaggacaaggggcgggcccgcggcctcacccggagggacggcagccccggtcgcgcgctggccccgcaggaccttccttttccaggaagagccagcttttctcggagcgcagtcctgggactctccgcagccccgccccgcctggccactgcgtctggcattcctgggtcgttagaggacaggcctgactgcgaagctgtgccttgcccctctcccacccgcagtttctcaccccgttctgctcccacaaggcccccctacagtcactgccacactggtggggacctgggacccagacccggaaccagcccagatatcacccctgaggacccatgcgccacgtcctgggtggtggaatcagtggctggagggacgacccttgctctccaggctgttaaccttttccgttgctcccccgccacccacctcctcctccccaggccacccaacttgggcacctccctgggcccagaactgccttccattcaatggggaacccttctatccccaagaaccccttccctgcttgcaccctggagagaacagcttgactcccatcaactcaacgctggtggaaagacagggaccgaaccctggctcaggcctggtcattgcctcctcagcactccctcctgggaggccttagctctagagtgaggggtgggtggaacctgggggcacctcgttcaccctgtccccactccccacagttttaggatctaaatgattgcctctggaactattcttctagactatcccacatcagaatcactgggaaatttaagtttgcagatcccacactcaccctgaatcctcactcagggtggggtcaggaatctgcattttaactagtcgcggggattgtggggggcagtagctggctgtttcgtggcatttctgtggctctgcagtgttcctccaccccaggaccaatatgttcaggccacaccgatggcctgaaccccatgggtagagtcacttaggggccacttcctaagttgctgtccagcctcagtgaccccctagtgcttcctggagctgaggctgtgggcggctgtcccagcaaccatgcgaggggttgccccagttgctcatacaaacagatcagcatgaggacagaaggcaggagactttggtcagttacctgggaattctgggctgccaggaaacgatttgggcctctgtcagtttcttttccatgtatgaggagggggaaatttgtatattagaaacttattcatcccactcaggacaataaaaacgaatgtacaaaaagcccttccattcttctgagcattgatggacctggggagaagtgtggtggcaggaactggactgacctgaatctccctgcttcgcagaaggaatccatggttgatggggaatctaagaaggaagagtgggcccgggcgtggtggctcatgccttaatcccagcattttgcgaggcccaggcagacggatcatttgaggtcaggaatttgagaccagcctggccaacactgaaatcccatctccactaaaaatagaaaaaaaattagccaggcatggtggtgcatgtctgttatcccagctgctaaggaggctgggacaggataatcacttgaacccgggagagggaggttgcagtgagccaagatctcacgattgcactccagcctggccaaaagagcgagactccgtctcaaaaataaaaataaaaataataataataagaagaaagaagagtgggaggacgaagtagagaggaatcgaaaagttggttatggggcacccggaggacggacggccactgtggaattgagactgcctcatggctccatgtagacttccagagcctttaaaattttatgactgctacacaaaaatgtcatgtcaaagtgattatttttattttttaagtggtatcgtttaaaaatgg

SEQ ID NO: 1886701 - DNA, 4001 bp, Homo sapiens
ggctgtgaacctgcttgtgtgacaccaaaatgcctgcactttgcccaaggctgctttctcttcttgttttattttaattttttgttttacatagagagaggttcttactgtgttacccaggctggtctccaacttctggcctcaggcaattctcctgccttggcttgagcagagcatgacgtgagccactgaagtggtgtgagccactgtacctggccaggctaccttctgaaatcccctcttcacaaagcacctttaggccagcatgatgcttagtcttgggccatgtgactcctcttcctctttgaatatcaaatagcaattccctcaccaaatagccagataactaacagttgccatgaagtacaagacacccagggccttcctccttcatactgaacgtcactgcaccttacaacagatgtgcagcgttagtattttatttttcctgttattttgttcttcacatctgttttgagatttctttgttgaatataagaaataactttgtatttttatttttcatacttattcattctatttatctcaccaaagcataggtccatgactgattcctgtgccctcatatcatctggcctgatgctcttacatttttagctaggaaacggacctgagacaggtgacccgacttgccttaaggcactcagcataaaggatgatcccagctctgctgggtctgaggtgtcttatttcaggacaccccctcaaaaaaaacagaggcagaataaggccaacaatgtttattatcattcccatatttcatttaagaaaacagacatagtaaatgggttaggtttgtgtttaaaaaaaaactagatttgtaggggttgcgttatttacaactggacgcagggctgtcccaacatcaggcacggcagctgcacttctccaatgccccttttcaggtgcagccctgggcacatttggcacagcccatggggcagcaggagcagcagtctggggaagaaggggagtgagagatcagagcaggcttgaccagggatctccccgacccaacagaggcctgcctcaagctgtgcctccagccccaaaagacgcttagttcaggatggcattgttctgtcaggagacaactcctggatctttggggtgagagtcttgccatgaaaaagctacccacccttcctgtgcccaggacagggcagaagactccagagggagcgacatgctctttgcagtaaaaggaaggacagtctcctagaataatacacctaagtgaggaaagtcctcaagtatcaggcctgtgcttggcaggctggtgtgctctcttggtgtcagtttccccctggtaagaataaagattgggaattaaccatctctagtgttcttccagctgtgatcctaagtcatttgctgaagcaaggggatgtgggaagttcgtcattggtctgctcctgtctgcggaggtctgggatccctcctttgactctgcccagcccccagattcccagggaaggccccacactcactcttcttgcaggaggtgcatttgtactctttgcatttgcaggagctggcacaggtgcaggagccacctgcaaggaagaaaaaggcagtgaggagtgaatgttgtgtgcctcccatccacctcaggcagctcaatgctggacagagcactgggtcctagttcagcacacctttggccttgagggtgacctgcagccgggcagttttcagcctcagtcctctcgcctcagaaatcggaggcactaggaagatggcaatgttctaagtggtgatgaaggctcttggcggggagaaagctcgagaagtgcaaagcaaaggagtccactttaggaagagctcaaaatgcacctgcctcctgccccagggatgttctattctgtggtatgaaaatgaagatcctaagacccgaaaccaggcatcctttaccagtggcgcaggagcagctgaggtccattcggagatcaggtgaggctggagttcctaagccacaggcgaaaaaacaggcgggccggtaggaggcggaacaggagcaggccgcctgactttacagtcagggcagggtgctgggtgcagtggccccgccccaggtctcgcaccagcccagctcagtgtcagcgctgcccagggttcagggcggggctgtgcgcaccaggcgggccgggcgcaggatcctccttaacgtggctgttgcgcaccctgggggcggccctttggctcacgctcgctttggaggggctgtgctcctggcggtacgcggcgtccctgctataatcccggccctcccgaatttcccggagattgcactccattcctgcccttgggcggtccgggaacccagcctcaggtggtcgcggtatccccacccccgcaccccgcaccagtgacgtgagcttcggctctgtgggagtccatgtgctaccccagcctagtgctcacgtccccagataagaccgaggcgggaagcgcagcgagggagttgtgtgcagaggaccagcctcccatgtgatcttcgacccacctgcatagtcacccaggtcctttggcctcatttttccttttcacagcacacagcaacaggccagatacagggctctgcctccctcccttccattctccactcctgagggggcgatgtgcatatttgcttaagtcctcttttgctttaacttcttttgggcttcccacagcctagctggcccaccaggactaaggacatccaaagcttgggacgtcaccaagggagggatcttttccctgatgtggtgaccctacattaaattaggaagcatgaaaagtgcttatttcactttcagaattcctgactattgccgagcttttggtcttggccagaccctgtttagtcactttggctatttgaaccctctcagcaaccctcgaggataatactctttatgacagcatcttactaatcagacaacgacaacacaaggagataggtaactagcccggaacagagggtggaagtgctgaggcaagagaatagattctggaggcagtgaacctaaggctgattcacagtctttctagaactaaaccaaaaggaaaaccccaactttccacacccaagtaacaaaaggaccagaggctacttcgtttgcaacccctccccactttgtctgcatgggagatgagaaattgaaagtacctctgatttgccccttatggcaaccagttgggctggtcttgggctacatcttcatttgcacaggagtaactttgtaacttcacttcagcttctaattggttgctttctgcaatcagtcagactgatagcggaccactacttcttgtacatagagtgtacactaagcaaccaatgagaaacctctagaggatatttaaaccatagaaaattctataaccaggcccttgagccactcgctggggccagctcccaccctgtgcagtatacttttgttttcaataaacctccgcttttgttgcttcctccctcccttactttgtacattttgtcaaattctttgttcaaggtactaagaacctggacaccctgcaccggtaacagtggtactgtgggtctcaatccagtcagcttttcaagggaaagaggtcaagggcaaactttccctttggcctgggtatgtcttcagcacctctttactgcttgaaatctttaaacataaacaaacgtccaggtcaattctggaagtgacagaagggatgtatatgtaattttatggctaccttccatatctgcaagtgtgactgattctttttctcagtagtgtcaaagagtttgcttttcctataaatatattaaagaaatatgattacttaagagaaaatgttaaggaaaataacagcgcaggcgatagcagaaatggcaggaatccttttgcatttgttatgcagacagggactgtcttgctcgtggctttatatatccaatatggatccttatttgtggactagtggaggaccctctctgggccacaagtcacgtgctcctg

SEQ ID NO: 1886702 - DNA, 4001 bp, Homo sapiens
cactatcacatttcatcccaatgtagatatataatcttctttctacaaatgagtaaataaagcctcagagagattaagcaccttgcccaggtcacacagccagtaagggatgaagtgggctgtgaacctgcttgtgtgacaccaaaatgcctgcactttgcccaaggctgctttctcttcttgttttattttaattttttgttttacatagagagaggttcttactgtgttacccaggctggtctccaacttctggcctcaggcaattctcctgccttggcttgagcagagcatgacgtgagccactgaagtggtgtgagccactgtacctggccaggctaccttctgaaatcccctcttcacaaagcacctttaggccagcatgatgcttagtcttgggccatgtgactcctcttcctctttgaatatcaaatagcaattccctcaccaaatagccagataactaacagttgccatgaagtacaagacacccagggccttcctccttcatactgaacgtcactgcaccttacaacagatgtgcagcgttagtattttatttttcctgttattttgttcttcacatctgttttgagatttctttgttgaatataagaaataactttgtatttttatttttcatacttattcattctatttatctcaccaaagcataggtccatgactgattcctgtgccctcatatcatctggcctgatgctcttacatttttagctaggaaacggacctgagacaggtgacccgacttgccttaaggcactcagcataaaggatgatcccagctctgctgggtctgaggtgtcttatttcaggacaccccctcaaaaaaaacagaggcagaataaggccaacaatgtttattatcattcccatatttcatttaagaaaacagacatagtaaatgggttaggtttgtgtttaaaaaaaaactagatttgtaggggttgcgttatttacaactggacgcagggctgtcccaacatcaggcacggcagctgcacttctccaatgccccttttcaggtgcagccctgggcacatttggcacagcccatggggcagcaggagcagcagtctggggaagaaggggagtgagagatcagagcaggcttgaccagggatctccccgacccaacagaggcctgcctcaagctgtgcctccagccccaaaagacgcttagttcaggatggcattgttctgtcaggagacaactcctggatctttggggtgagagtcttgccatgaaaaagctacccacccttcctgtgcccaggacagggcagaagactccagagggagcgacatgctctttgcagtaaaaggaaggacagtctcctagaataatacacctaagtgaggaaagtcctcaagtatcaggcctgtgcttggcaggctggtgtgctctcttggtgtcagtttccccctggtaagaataaagattgggaattaaccatctctagtgttcttccagctgtgatcctaagtcatttgctgaagcaaggggatgtgggaagttcgtcattggtctgctcctgtctgcggaggtctgggatccctcctttgactctgcccagcccccagattcccagggaaggccccacactcactcttcttgcaggaggtgcatttgtactctttgcatttgcaggagctggcacaggtgcaggagccacctgcaaggaagaaaaaggcagtgaggagtgaatgttgtgtgcctcccatccacctcaggcagctcaatgctggacagagcactgggtcctagttcagcacacctttggccttgagggtgacctgcagccgggcagttttcagcctcagtcctctcgcctcagaaatcggaggcactaggaagatggcaatgttctaagtggtgatgaaggctcttggcggggagaaagctcgagaagtgcaaagcaaaggagtccactttaggaagagctcaaaatgcacctgcctcctgccccagggatgttctattctgtggtatgaaaatgaagatcctaagacccgaaaccaggcatcctttaccagtggcgcaggagcagctgaggtccattcggagatcaggtgaggctggagttcctaagccacaggcgaaaaaacaggcgggccggtaggaggcggaacaggagcaggccgcctgactttacagtcagggcagggtgctgggtgcagtggccccgccccaggtctcgcaccagcccagctcagtgtcagcgctgcccagggttcagggcggggctgtgcgcaccaggcgggccgggcgcaggatcctccttaacgtggctgttgcgcaccctgggggcggccctttggctcacgctcgctttggaggggctgtgctcctggcggtacgcggcgtccctgctataatcccggccctcccgaatttcccggagattgcactccattcctgcccttgggcggtccgggaacccagcctcaggtggtcgcggtatccccacccccgcaccccgcaccagtgacgtgagcttcggctctgtgggagtccatgtgctaccccagcctagtgctcacgtccccagataagaccgaggcgggaagcgcagcgagggagttgtgtgcagaggaccagcctcccatgtgatcttcgacccacctgcatagtcacccaggtcctttggcctcatttttccttttcacagcacacagcaacaggccagatacagggctctgcctccctcccttccattctccactcctgagggggcgatgtgcatatttgcttaagtcctcttttgctttaacttcttttgggcttcccacagcctagctggcccaccaggactaaggacatccaaagcttgggacgtcaccaagggagggatcttttccctgatgtggtgaccctacattaaattaggaagcatgaaaagtgcttatttcactttcagaattcctgactattgccgagcttttggtcttggccagaccctgtttagtcactttggctatttgaaccctctcagcaaccctcgaggataatactctttatgacagcatcttactaatcagacaacgacaacacaaggagataggtaactagcccggaacagagggtggaagtgctgaggcaagagaatagattctggaggcagtgaacctaaggctgattcacagtctttctagaactaaaccaaaaggaaaaccccaactttccacacccaagtaacaaaaggaccagaggctacttcgtttgcaacccctccccactttgtctgcatgggagatgagaaattgaaagtacctctgatttgccccttatggcaaccagttgggctggtcttgggctacatcttcatttgcacaggagtaactttgtaacttcacttcagcttctaattggttgctttctgcaatcagtcagactgatagcggaccactacttcttgtacatagagtgtacactaagcaaccaatgagaaacctctagaggatatttaaaccatagaaaattctataaccaggcccttgagccactcgctggggccagctcccaccctgtgcagtatacttttgttttcaataaacctccgcttttgttgcttcctccctcccttactttgtacattttgtcaaattctttgttcaaggtactaagaacctggacaccctgcaccggtaacagtggtactgtgggtctcaatccagtcagcttttcaagggaaagaggtcaagggcaaactttccctttggcctgggtatgtcttcagcacctctttactgcttgaaatctttaaacataaacaaacgtccaggtcaattctggaagtgacagaagggatgtatatgtaattttatggctaccttccatatctgcaagtgtgactgattctttttctcagtagtgtcaaagagtttgcttttcctataaatatattaaagaaatatgattacttaagagaaaatgttaaggaaaataacagcgcaggcgatagcagaaatggcaggaatcc

SEQ ID NO: 1886703 - DNA, 4001 bp, Homo sapiens
ttggcctgccaaagtactgcaattacaggtgtgagccaccatgcccggcctacatgtataatgcttttacattttttagcagagacaggtaatgtgatttgtcttaaggcactcagtgtgtaaggtgataggacgtggtaccagcacccatgtgtctggactctcaatgcaattgcttatcccagctctgttgggtatcagatcacttttttccaaggcacacaaaacaaaactgagccagaataaagtcaacttttattatcattaacatattttatttttagaaacccaaatgtactaatgggtcagggttgtatggaaaacaattccaggtttgtacactttctacttctgggaacacagctttccctacatcaggagcagcagctgcacttgtcagtgtccctttgcaaacacatccctgggcacacttggcacagcccacggggcagcaggagcagcagcctggggaagaaggggagagtgacaggtcacagcagacttgaacaggcacctctctgccccaacagtgggcctggctcaagctcgcacccagacccagaggagctttaggtccggatggtgtgctctgtgagacaatggtggatctttggagtgagagccttcctgtgaaaaacttgctcagccccaccagagccaggacagagcagaagactggacaggcagtgactgggactgtggggacaaaggaagggcaattccccaggaccatacatttcagtgagaaaagccctcaagaatcaggtctgtggttggccagctggtacattcttgtgacctcagtttccccattgttaagaatgaaggttgggtaggaatcaaccatccctaatgttcttccagctctgatcctgaatccgtttcaggggatgtgggaagctagtgatgagcctgctcctgcctgcagaatctgagatccctcctctgactcagcccagcacccccgctccctgcgattcccagggaaggcccctcactcactcgtcttgcaggaggtgcatttgcactctctgcatttgcaggagctggtgcaggtgcaggtgaagagaaaaaggcagtgagcagtgagtgtgctgcagggttaggagcaggccctcagcatcctcctgctcagtgcatgggaaacctggtaccttgttccactcaggcacacggaagcccagctccaccttttttccccacaggctgggatgggcaggcgccctcctaattttactccccaaggccttatatcaggaatccctaagaggcaatgctccctgcctcccatccacctcaggcagctctaatgctggacagagcactgggtcccagcccgggaacccactggctatctgggtgacctggcagttttgagcctcagtcttctcgcttcaaaaatgggagggccactttgggaggccgaggagggcggatcacgaggtcaggagatcgagaccatcctggctaacacggtgaaaccctgtctctaccaaaaatacaaaaaattagccgggcgtggtgacgggcgcctgtagtcccagctactcttcaggctgagacaggagaatggcgtgaacccgggaggcggagctttcagtgagccaagatcgggccactgcactccagcctgggcgacagggcaagactccgtctcaaaacaaaacaaaacaaaacaaaaaacaaacaaaaaaacaaaaaaaaagtgggggggcgctgggaagatggcaacattccaagtggtaatgaaggcgcttgacagggaaaaacacgagaagtgcaaagtaaaggaggccactttaggaagagctaacatgcacctccctcctgccccgggtacattctatcctctggaatggaaatggatattctaaagccccgaaacccggtatcccttactagtggagcaggagcaattggggtccattacgaagcgaggtgaagctagagttcctaagggagaggagaagaagcagtggggcaggtgggaggcgtggtggattctaggaaccggaagctcaatttatagttagaagagggggccgggtgcagagtacccttctcacccacccccacgcggaatccgcggcgcctgcggtcttgggttgagctgtgcgcagcaggcgggtcaggcgcaccatcccctgagtgcagcctggtgggctcccggggaccgcccttttggggcccgctcgtgcgggaggggctatgctgccagaggtacgcgccgcccctgccaccctgagggccatttcccattcccaggtggtcgcgctgtccccaccccctccattctccctcccccgcacagtcgtcctcagcttcgcctctcccgggtccgtgtgcatccgggtccatcctcttgctcaccttcttcattggctagagccgggagcagagcgagtgagcagtgtgcagatgagccatggtggaggtgacttttgcttctccctcgccctcccccctcattacctgtaactcttcccacctaagaccctcaaactcttttcccctgtagacagatcgtggcgaccacgggtcggcctctctctcttccctccatgctcctcctctgaggtgatggcgggcacatttgtcagtttcctccttttcatatagttctccgggactttccaggcctgccggccaccccactgcaggatggcagttttgaaaatgagggatgccctccaaagaggatgactttaggtgacatgcagaccctgcggtcaatcaaggagagaagtgggtatttctgttcaatgttcttatcatgtaacatttagaatgtgccaggcctctttaaatcattaattccttgaacactcccaacaatcctaaagggaaattttcacttgcatccttgtgaagagaccaccaaacaggctttgtgagagcaacaaggctgtttatttcacctgggtgcaggcggcctgagtccgaaaagagagtcagcgaagggagataggggtggggccgttttataagatttgggtaggtaaaggaaaatcacagtcaaaggggggttgttctctggcgggcaggagtgggggtcacaaggtgcttagtaggggagcttttgagccaggatgagccaggagaaggaatttcacaagataatgtcatcagttaaggcaggaacaggccattttcatttcttttgtggtggaatgtcatcagttaaggcaaggcagcgcattttcacttcttttgtgattcttcaattacttcaggccatctgggcgtatacgtgcaagtcacaggggatgcgatggcttggcttgggctcagaggcctgacagaaatactatttatgacctgttttactaatctgactgtcaggcctctgaacccaagccaagccatcgcatcccctgtgacttgcacatatacatccagatggcctgaagtaactgaagatccacaaaagaagtaaaaatagccttaactgatgacatcccaccattgtgatttgtttcttccccgccctaactgatcaatgtactttgtaatctcccccacccttaagaagatactttgtaatctcccccacgcttaagaagtttctttgtaattctccccacccttgagaatgtactttgtgagatccacccctgcccacaaaacattgctcttcaccgcctgtcccaaaacctacaagaactaatgataatccaccacccttcgctgactctcttttcggactcagcccacctgcacccaggtgaaataaacagccatgttgctcacacaaagcctgtttggtggtctcttcacatggacgcgaatgaaactgacaactgtaacaagaagtttaagtaacttgctcaacatcacagagctaaacagtttacactgatttgaatctagccagcgtttcaagagaaagtgtccaagatcaagccttcctttggcccaggtttgtcagcacttctctattgctggtaatctttttttttgagacggagtctccctctgtcggccaggctggagtgcagtgg

SEQ ID NO: 1886704 - DNA, 4001 bp, Homo sapiens
ttctctaaaaaaataaaattaaaaagcaagacatccagttatttccctaaagtacacctgactaaggcataacattgagtctataccagtccctttctaatcactttcattcacagccaccactggagtgacctaccagaggatgaacacactctttaccatgggatggcaccaagtcattctttagggatgtgtcctcatgaccccaaaagctccctctaggccccacctgcaatagtggaggacacatttcaacatgagatttggcagtgacaaaatatctaaatcatagcacacatgtaggattcaagaaactaagaagttgggttccagcactatagccacttttaagcctaaaatccaatgtggatctcaagttgtggaggaaaatcagaaaataaaaataaggaatgaagtttctgtgccacgtttggcatgagactggaagcgatcatgtatggtccccacccatatggtgtggcaaagtgcagtaccatttcacagaagtgtgaactcagtgaggtaacctgactggcctgaaggtgttcacattattagtgactcacatttccatccagagcctggtctctaagcttgcggtttaacctccaccccagtccattttttccaaggcacacaaagaagaacagagtaagattcaagtcaaaattgttttattgtcactcacatatttaatataaaaagaaatgcagcaaatggctcagtattgtataaaaaaaaaatccaggttgtgcaggttgttctattaacatctgggagaagagctgttcccacatcaggcacagcagctgcacttctccgacgtccctttgcagatgcagccgtgggcacacttggctcagcccatggggcagcagaagcagcagcctggggaagaaggggagagtgagaggtggcagcagacttcaccaggcacctccctgccctaatagcaagcgtggctccagctcagacgccagacccagaggaagcttttttcgtctggcatagctctgttctgaaaccatagatggtacagttggggtttgcatcccaagagaaaaatgctgttctgccccatctgaactcagggcagaaagctgggagaaggaatgaaatgggcaacgagggcaaagaaagcccagttcaccagaagggtgcactcagggccagccttgagttccctcccaaccttaaccacagccccagattcctggagatggccccgcactcactcttcttgcaggaggtgcatttgcactctttgcacttgcaggagccggcgcacgtgcaggagccacctgcaaggaagaggaaaacgcagttggcagtgagtgagatgaagaaggtacagcagtgggtcaatgagtctccagtgccccctcctctgtgcagggccagccctcagagctcctttcccactcaggacagaggaacagaagccccatgtcctctccactcacactgggaagggcaagcaccctcctgtttcaccttatcaggaaggtcccacgtgcacatacaacccaggtattctgagattgccagccagaaccttctgtcctgaaccctgaagactcaatgcctctagctcagcatccaccctgattgctcagagcctggaggagaacactggggcccagccagcaggaccctgaccaactgggtgatgtggagcaggactgccttgagcctcagtatccttaactctgacttagaggcccaggagggagggcagtgctctcaggagcgcgatcaggaagaaagcaccccaaggaagtaaaggagtccccttccgctcagaacttaaaatgcaacctcctcaaacccagagaccctcagtactggggctgggaaatgggaatcccagggcgcagagttgggcttctcttaccagtggtgcaggagtagttggggtccatttcgagccgcggtaaggctggagatctcaagcgataaatggagagaccgcaaggcgcacgtggacggcgtggtggagcgccacaacctgcggctgctttcctactcaaggaagggggccgggcgcagaggccttgccccgcgcttgcacccgccccgctgggttcgagcccccagcggtcctgggctggcctgtgcgcagcagaagggccgggggcaccaacccctgagctccactcccggcgcgccgcgggaccgcccttctggcgccccttcgcgcgtgaggggctgtgcgcccggcggtatgcggtgtccccgaggtcctggccgcctttcccagtttccctgaagttgcctttgccttccaccctcctccccgcgctttccgggaccccagccttggcgtcgcgggcgtctccaccccatccctcgcttcgccgttttcagctgggcctgtcccggagtcccggtgcagccctcctgctcctgtccccggatcggctgagtgggaagcggggagcgtgcggtagccagcgagttgtgtgcagagcacccgccaccgatgtggctttcgtttctcctcatctcccgccttgcctgtccctgtccacaccgcggtccctcggacccgctcctccgtacacagcaacacggggaacacgggtcggcctctctctcccgtcgattctcctcgcctgagaggatgtgtgggcacatttgtccaggtcgtcctttgctgataaatctccatgctccccacagcctagccggccacccctactaccggctggcagttctggacctgtgggctgtccccaaagagagatgagttcagatgatatgcagaccctactttaaattaaaaagcaagatgggaaattagccgggcgtggtggggggcacctgtagtcccagctatcccgtggctgaagcgggagaatggcatgaacgcagaggcggagcttgccctgagccgaaatagcgccactgcactccagcctgggcgacaaagcgagactcggtccccccacccaaaaaaaaagaaagaaagaaagaaaaagaaaaagaaaaaaagcaaggtggggaaggtggcgggaagctgaagtcccagctacttaggaggctgaggcgggaggatcacttgagcccaggacttcatgtcctgcctagtccacatagtgagtcaacgtctctaaaaaaataaaattaaaaagcaagacatccagttatttctctgaagtatacctgactaaggcataacattgagtctatacctgtccctttctaatcactttgacagacagctctggagtgacctaccaaaggaaaaactcacccttcaccatgggagggcaccaagccattctttagggatctgtcctcatggccccaaaagctcccactagaccccacctgcaatagtggaggacacatttcaacatgagatttggcagtgacaaaatatctaaatcatagcacccgtgtaggattcaagaaactaagaagttgggttccagcactatagccacttttaagcctaaaatccaatgtggatctcaagttgtggaggaaaatcagaaaataaaaataagggatgaagtttctgtaccacatttggaatcacactaaaagcgatcatgtatggcccgcacccatatggtgtgcacaatgcaataccgttttacagaagggtgaactcagtgagtaacctggctggcctgaaggtgttcacattgttagtgactcacattttcatccagagactggtctctaaactcccagtttaacccccacccagtccattttttccaaggcacacaaagaagaacagagtaagattcaagtcaaaattgttttattgtcactcacatatttaatataaaaagaaatgcagcaaatggctcagtatcgtattgaaaaaaaatccaggttgtgcagcttgttctattaacatctgggagaagagctgttcccacatcaggcacagcagctgcagttctccaacgtccctttgcagacacagccgtgggcacacttggcacagcccacggggcagcaggagcagcagcctggggaagaag

SEQ ID NO: 1886705 - DNA, 4001 bp, Homo sapiens
caacctccgcctcccgggctcaactaatcttctcacctcagcctcccaagtagctgggactatgccaggctaaaattgctagtttcatcaggctctgatccacagtgacattttgctatctgcctcctgagaaatgtatctctttttgtataaacaacaaagttttaaaagtgtattttctgaaatcagtgttttacatgccaaaattaaaaaaaaaaggtttatatctgggatgcataggtagtaaaaatttccttcaccatggagtttgagaagcccggtgtgggaatcaagcagctgaggaattggattccacccctgtcatctctttgaagcctaaaatctgaagaggaaactgaaattgggcagggaaatcagaaaataaaaacgagagatggagaagtttctgtgccacaattgatatgaccagaggtgatcatagatgtccccccattatgacctggcacagtgcaattcccttttatagaagatgaagctcagtgaggtaacctggcttgtcaggaggcgctcagattgttagcgactcacatgtccatccagagcctgggtctctaaactccaggttcaatccctaaccctggtccattaattcaaagccacacaaaggaaaggagggtccgaatcaagtcaaaactgttttattgtcgtttacatatttaatagaaaaaggaatgtagcaaatgctcagggttgtatgaaaaaaaaatccaggtttgtgcaggttgctctgtttacatctgggagcagggctgtccccacatcaggcacagcagctgcacttctccgacgcccctttgcagacgcagccctgggcacacttggcacagcccatggggcagcaggagcagcagcctgggggaaaagggagagtgagaggtcagagcggactcaatcaggcacttccctggcccaacagcaggcctggttcgagctcagactccagacccagaggatgattttttaggttggtacagctctgttctaagaccgcaggtggtacctttggagtttgtgtctcaaaagaaaaaggctgccctgccacattcgagctcagagcagaaagcctggagagggaatgacatggccaacaggggcaaagaaaggcgttccccagaagcatgcactccaggccagcctggagttccctcccaaccttagccacagccccagattcctggagatggccccgcactcactcttcttgcaggaggttcatttgcactctttgcacttgcaggagctggcacaggagcaggagccccctgcaaggaagagaaaaacgcagtgggcagtgagtgagaggaagaaggtacagcagtgggtcaatgagtctccagtgtgcgccatcctctgtgcagggccagccctcagagctcctttcccacttagagcagagaaagacaagccccatgtcctctccactcgtgctgggaagggcaagcaccctcctatttcaccccaccaggaaggtcccagatacacacacaacacaggaggactgggattgggggccaaaacctcctgtcctgaatctcaaagacagtgttccctgcctcccacccaccctgcttgcttagagcctagacagagcattggggcttggccagcagccccctgatcaaccaggtgatgtgaaacaggacagccttgagcctcaggacactcaactctgacatagaggcacagtgaggagggcaatgctctcaggagctattccaagaagaaagtactggacgaagtaaagggttcccgtctgctcagagctcaaaatgcgacctcctcaaacgcagggacactgtactgtggctgggaattgggcattcccaggcgcagagccggggttcccttaccagtggcgcaggagcagttggggtccatttcgagccaagaaatgacgggagaggcgaagaggcagtcaggcagctggaaggcacgttggagcctggagccagctgctccttttgcaggcggagatgggaccggacgcagaggccccgccccgcgcttgcacccgccccgctgagtctgggcctcctgtgggtacgtggagggactgtgagcagcaggccggccgggcgcaaggtgtgcaccgcgggtctcttgcttggcacccgctcactcgctcgctcgctcaggcctgtgcgcccggtcgtccgcggcgtccgtgccgtcctgcccgcgcaacttccccatattccccatttccttgtggttgctggccatctccgtccccgagcgttccgggaacccagcctctggtggtcgcgatattcccacccccaccaccccatctgcggtatttcgccattcccggagccggtgtgcaaccccagcttcgtccctgggtaggcctgagctggggagcgcagcgagggagttgtgtgcagagaacagtcatggacgtgacccttactttctgtcctcctgccctccagcattgcctgtcactatccccgccatggtccttctgccactttctcttgagcccagcaacacggtggaggcgagccctcccttccattccccattcctgagaggttgtatgggcacatttgtctggggcctcctttacataaaattctgcaggggctcctccaaagcccctagcgcgcccacccaactccaggagagtagtcctgaaaatgcggagtgctcccaagggcgggatctgcttaggtgactccagatccggaggatgcagaacctacgttaaataagaaagcaagaagtgattatttacctttcaattttcctattacacaacaatctgcgtgagtctgtttaatcactttagttttttgagccccctcaagaacaataaaagggaaatactattctaaacacgtttttccaatggaaaaactaaggcacaaagagccttagtaatttgcccaaggttatggctctgtgaaatggtgccactctacctgaatccagccagcttcccaagaggaggaaagaaaacataacgatttcttttggtcgagatatgtcttcaacaccactgtgctgcttacaattgttattattatcattgttttgaaacagggtctcactctgtcatccaggctggagttcagtgatgagatcatggctcactgtagcctcagtctcctgggctcaatctatcctcccacctcagcctcccgagtagctgaaactacaggtgcaggccatcatgcctggctaattttttgctcttttttttttttttttttttttttttttttttttgtagagacaagatttcatcatgttgctcagtcaggctggtctcaaactcctgggctcgagtgatccacctaccttggttttccaaagtgctgggattacaggcgtgagcccctgtgctggtctgcttgaaattttttaatcaggggccgggcacggtggctcatgcctgcaatcccagcactttgggaggccgaggcgggcggatcatgaggtcaggagatcaagaccatcctggctaatatggtgaaaccccgtctctactaaaaaaatacaaaaagttagccggacgtggtggttggtgcctgtagtcccagctactcgggaggctgaggcagaagaatggtgttaacccgggaggcggagcttctagtgagccaagatcgcgccactgcactctagcctgggtgacagagcgagactccgtctcaaaacaaaaaaaagagaaattttttaatcagggagaagcatcaatctcgaccctggacagcttgaaaagtgatggagatgggaaatttattaaatatgtgtatatacacaaaatacacattagagtaatcgatatgtctgtaagtaagactgattcttgattttagcattggtaaagactttgcgttcatttaaatatatgtgatgattaattttatgtgtcaacttgactaggcaaagtgcccagttccttggtcaaataccagcctagatattgcagcaaagttattttttaagatgtgattaacatttaaatcagt

SEQ ID NO: 1886706 - DNA, 4001 bp, Homo sapiens; identical to SEQ ID NO: 1243108

SEQ ID NO: 1886707 - DNA, 4001 bp, Homo sapiens
aaactggcaaaaataaagcaacctgggaaaaaactcaggctggacctgcacggagataagcagacagggtccagcgcagaagccctttgttctttgcataattagcaggctcccgggaaaaagtttcctctccttttcaggcatatacacagtgggctccatggaaaccggcacagggaggagggggccttatctaaaacaaacccacagttacacaaacaagagaagcagcgatttgcacttgcctagagacatacccacagctgcataacataaggggagctgcacaggcagttttactggtaagaagttactcagttaccaggaggagagcagtgtcctataaaagttttttgcggccaggcacagtggctcacgcctgtaatcccagcactttgggaggcggaaggaggcggatcacctgaggtcaggagtttgaaaccagcctggccaacatggtaaaatttcgtctctacccaaaatacaaaaattagcagggcgcagtgacgtgtgcctgtaatcccagctactcgggaggctgaggcaggagaatcatttgaacccaggaggcagaggttgttgaggttgcagtgagccaagatcgcaccattgcactccagcctgggtgacaagagcaaaactctgtcttaaaaaaaaaaaaaaaaaaagctttttgcattcagctgtaacccgacaatccactcggactcccgtctccactttggagagctttcttctttcccttattaaacgttcgctccaaccccacccttgtgtccacgctccttagttttcttggaggtaggacaaagaaccccgggactagttcagacaaggagaaactgctatattaaggtgcactggcaagaccgcaacagtatcaagccaattagacttgccgtggctcctggaatggcccacgcactgcactggcaccaagacaccacccaaccctggacactgcactgggacaggaggcctgaagagaagaatcctctcaaaggaagcttgaagtacatgctacaaaataaactggcttctatactcagggccagcttcatgggctcactcagaaggtccctggcttgctgcaaccatttgctctgaccatcttgaaattcttaatagttttctgggttttttagtaagtgtccccacgttttcattttgcattgagtcacacaaatcatgtagctgggctgtcttcaaaaatgtcaaggtagtaaaagacaaaaggctgaggagccttccagatgaagagatcaaagagacatgacaactaaaagcaactcctgggttacagggtcaggggcggacaaaaaggaaaagaaaaaaaaagacattagagggacaattgaaggttagctgtggatgacatcacagaaatgtcaatgggagttgtcctaatgatatttgccctgtggttaagaaaatgcccttgttcttaggagattcatggcgaggtatggggtaaaggatcatgacatctgcaatttggttgccattggttcaggaaaaaaaaaaaacaaagtacaaatgattgagtaaatcaggcaagcctaaaccactgctaaacatgaataacagttctacgagagttctttatgctctccttgcaacttcctgtaggtttgagattacctggagataaaaagttaacatcaccagcaccgcccgccagcccgccagccgaaaagagcgcaggtaattcagtccgagctgaaagcggccaccctgggacttgagtcacgtgaggcgagcccacatgacccgaggccccggtccaatatggcgacctccacgggtcgctggcttctcctccggcttgcactattcggcttcctctgggaagcgtccggcggcctcgactcggggtgagtgcagctccctgggccagcctggttcggggggtcccccctgtcctccgagctcacgaggacagccccctgagctcacggccgcccgtccccgcagggcctcccgcgacgacgacttgctactgccctatccacgcgcgcgcgcgcgcctcccccgggactgcacacgggtgcgcgccggcaaccgcgagcacgagagttggcctccgcctcccgcgactcccggcgccggcggtctggccgtgcgcaccttcgtgtcgcacttcagggaccgcgcggtggccggccacctgacgcgggccgttgagcccctgcgcaccttctcggtgctggagcccggtggacccggcggctgcgcggcgagacgacgcgccaccgtggaggagacggcgcgggcggccgactgccgtgtcgcccagaacggcggcttcttccgcatgaactcgggcgagtgcctggggaacgtggtgagcgacgagcggcgggtgagcagctccggggggctgcagaacgcgcagttcgggatccgccgcgacgggaccctggtcaccgggtgaggaggcagggagccccgtgctgtcgagggcagagggcctgagatttgggttgtagccgtgcctccgtgttcaagtcacttaaccaagctgagcccctgtttcctcctctgcagaatggggataggaatcgcttccttgcagagtttattcatcatccagtatcattgagcacttgcttgtatcaggcaatgtgccgcgccccggtgagatagccgtgaacaacacagtctttgccttaacagccctcccccattactagaaaaatcaacaaaagccgggtaaatagctaacatacattctgattgctgtgtgtgcagcaaagcaaccaacggggtgaacccgttgtaaatagtgttgattttagggagggtgatctggaacacgcctctccgaggtgacctttgagtgggaacttgaagatgaatcactaagtgagccaaggtcagaactggaggaagagcgtttcagtccaaaggaaccccacgcacaaaggctcagaggctcaggggggcttgtgtgtatgagggactgaaaaaggagtggggtgtcagaaacatcaactcatcaagactgatgatttttttttttttgagacagagtcttgctctgttgcccaggatggagggcagtggcatgataccggctcactgcaacctctgcctcccgggttcaagcgattctcctgcctcagcctctggagtagctgggactacggacgtgtgccaccacgcccggctgatttttgtatttttagtagagacgggatggggtggggaacgggggagtgggttcaccatattggcctggccggtctcgaactcctgacctcaagtgatccacccacctcagcctcccaaagtgctgggatgacaggtgtgagccaccacgccctggcaagattgatgatttgaattatttaaaattatcttaaaaattatttgagtctcaaaaaaaaagtatttgttgatgataaagcttgttctgatcctgagtgggaccaggtgggagagagcagtggagaaacaaggaagccaatgaagggccgtaacagggatcaagtggtagttgggctgggtatggcctggggattgagggccatagatggatttgagctctgttgggggatggtcatttctgttaaatgaaacagactgtttgcaaaggcttgtggggattgtattgtcagaaccctgtccagcttcagctctgacaacagggagattcctagggctgttaagttgtcccagctacactcaggccccaggaggttcctggggcatgagggggaatctagcagccaggttgggatggctagggagaaagagcctgactatctgcagttgcccctgctggtgagtgagcttcccaccttccccggatccaggtacctgtctgaggaggaggtgctggacactgagaacccatttgtgcagctgctgagtggggtcgtgtggctgattcgtaatggaagcatctacatcaacgagagccaagccacagagtgtgacgagacacaggagacaggttggatggggaggctgttggcaacaaccctctcgagaaccag

SEQ ID NO: 1886708 - DNA, 4001 bp, Homo sapiens; identical to SEQ ID NO: 1243127

SEQ ID NO: 1886709 - DNA, 4001 bp, Homo sapiens; identical to SEQ ID NO: 1243140

SEQ ID NO: 1886710 - DNA, 4001 bp, Homo sapiens; identical to SEQ ID NO: 1243147

SEQ ID NO: 1886711 - DNA, 4001 bp, Homo sapiens; identical to SEQ ID NO: 1243184

SEQ ID NO: 1886712 - DNA, 4001 bp, Homo sapiens
ttgggaggctgaggcgggcggatcaccaggtcaggaaatcgagaccatcctggctaacacggtgaaaccccctctctactaaaaaaaatacaaaaaaattagccgggcatggtggcgggcgcctgtagtcccagctactcaggaggctgaggcaggagaatggcgtgaacccagaaggcggagcttgcagtgagcggagatcgagctactgcactccagcctgggcgactgagtgagactctgtctcaaaaaaaaaaaaaaaaaaaaaaaagatactcattcagaattatctctattctgtaatggcatctactccagagcacagactcattcctatttcctcaccaacattacacaagcagaagtcctttttaggactcttctattgagacacctcactattcccgatgctgatgctgtgtattctcccttgttatataattagtaaatccaacttattgaactacaggtgtgttccttctaggttttggcaggagggcattgacaattggaattgtcgggtcatttaattaaaggatctctctttccatctttaacctaaagagtctatatgcagggttttgttctcccaaaatagataccagatgtttctattatgaaaacaaatgctggccaggtgcggtggctcacatctgtaatcccagcacttagagaggccaaggcaggtggatcatttgaggtcaggagctcgagaccagcctgaccaacatggtgaaaccccgtctctactaaaaatacaaaaaaaaaaaaaattgtggtggcacacatctgtaatctcatctactcaggaggctgaggcaggagattatcttgaacccaagaggcaaaggttacagtgagccgaaatcgcacgactccactccagcctgggtgacagagactccgtctcaaaacaaacaaacaaacaaacaatgctaagtttcacacagtagaaaaaataaacgattatctcagaaattagctccttctaggactttcttaagcctataccattattgaacagaaaaaaatttcacagcaaccacttttacaagagccccttttatgtccttgttcctcaggctgtagatcaaaggattcatcacgggagtcaccactgtgaacctcacagcagctgctatatctctctgagctgagtgggaggatgaagttctgaaatatggagacatgatggtgccatagaagaggagaaccacagccaggtgggagccacaggtggagaaggctttccatcttccctttgtggatgggaccctcaggacaacgcaggtgatgtgcatataggaagccaggaggcaaagaaatggggtgatcgtgactagggcagcctcagtaagaatcatcacttcactgaggtgtgtgtctgaacaggagagtttcaggaggggagtcacatcgcagaagatgtgggggatggtgttgtctgcacagaatgagagtcgagccatcagcagggtgtgcagcagagcattcgagttggcaaccacccatgatccagtgaccagcagggcacagagctgatgggtcatctttgctgtgtaatgtaaggggcggcacacggcgacaaagcggtcataggccatcacagccaggaggaaattgtccatgtcagcaagctcactgataaaatacatctgcatgagacagccagagaaggagatggtttgagtcctgagtatgtgattggccagcatcttggggacggtggtggagaagcagttgtccacaaaggacatgttgctgaggaagaagtacatgggggtgtgcaggcgggagtctatgcttatggccaggatgatgagcaggttccccaggacagtggccaggtacatgctgaggaagaacacaaagaggagatgctgctgctggggctgcctggagagtcccaagaggaggaactcggagacactcactggtttgtccctctcatatgtctggacccagctgcatagaagacagtgaattcagaaacatacacatgggtggttaagatgtgatgaggctccaggaagaaccacgtttgcaaatcaattcacaaacttgcaaaaacaggatgtggtctcctcacccatacgtccaatttccaacactcagttacgatgcttttcctagacgactcactgattcttattttgcatatttaacgttgaaaacacagacaggctgggcatggtggctcatgcctgtaatcctagaactttggaaggccaaagagggaagatggcttgaggccaggagttcaagaccagcctggacaacataccaagaccccatctctattaaaaaagaaaagaaaacaaaacacacagacacgtacacatagcctgactctgagaatgtgtgtgtctctggtacattcagttccccacccaactagttagcagctcataaagagactggaggaatgactgatgattactgggttaatctcaagtgacaactgatggattcaggactcctgtacttcacttctctgtacattactcattacttcctgtatctggatgatgtagcaaagaagattcctaaaagaacttcacatctgagccaacacatacttaattgttcacctctgcgacctttcctggagaaggttggtgctgtcactctcagttgttcctcatttctacataactggtcaatgcttctacttactgtgggagttggaatgtcttggaaacacaggcgggtcctgagtgtgtgaggagtaggggctcatggtcttagtcctctgtgtaagtaaatgtttggggcaatcacagagcaggcatttgtaggaacctcctttggccactgggaccagattccctgagagcctcattagggacaagaagaacataattgtcccacctaattttggcccctttggaccaaacaacgacgacattcaatattatctaacgtttagataaaactcttggaccaaaacttgtagatattagaaatgaagccatcctgatacagataaatcgcagacaagattccttggaaccacaaacctcctcaccttgtgatctgctcctgtgcccacaggtgtggaaattctgtcatgaaatcctttgcagtatcacttcctttgttgagatatggggctcttccgtgttttctgtgtagcccttgctttcctctgcctggtcatcttaagacattagtgatgcttcgtgttttccattttacaggagggaatgttacgagcacattactgagatgggcttaattcgtgaaaatgtttggggtcaggcacagtggctcacgcctgtaacccaaaagtttgggaagccaaggtgggcagatcacctaaggtcaggggttcgagaccagcctggccatcatggtgaaacccagtctctactaaaaatacaaaaattagccaggcatggtggcatgtgcctgtagtcctagctacttgggagggtgaggcacaataattacttgaacccaggaggtggatgttgcagtgaaccgagatcgtgccactgcactccagcctgggcaatagagcaagactctgtctcaaaaaaaaaaaaaaaaggaaaaagaaaatgtttgagatgaagggtagtctgattgtaagggaggttttctccaggagaatccaggatgccgtgatttatgaactctagacccctaggatggacatctttggggatgtccctgcaactcacatggtttgcccttttcttgggatagagcttcctaatctgcataggcacaatgtggtggagccccaggagtcgtgtttctaccacctccccttcaccatagctggttgaaccagagtatttggaaccaggattgagcaaagctatcactacatgcttggctacaatgtataaatccaatcaccttctctctgtcccattctctttttttttttttttttttttttgagatggagtttcactctgtcatcaggctggagttcagtggtttgatctcaactcactgcaacctccacctcccgggttcaagagattctc

SEQ ID NO: 1886713 - DNA, 4001 bp, Homo sapiens; identical to SEQ ID NO: 1243197

SEQ ID NO: 1886714 - DNA, 4001 bp, Homo sapiens
gtaatatttaaagcaggattctgacccaccctgcagattttcctataaaggctaattattcctggaggaaagatcaccccagttcttcaggattccaattacaatcacatgaagcccacccaccttcttaggaaattgataacaccactttgcatcattttgtactcaactgctggtgttataaacatgatcttgaccaggatttctcagccccaacactgctgacattttgggccagagaattctccagcgtggggggctgtcctgtgcaacgtaggatgtttagaggcgtccctggcctctacccactaggtaccggcagcacctccctgcccccattgtgacaatcaaaaatatgtccagagatagccaaatgtcccctggggaaataaattgccccctgctttaagaaccactcatctggacaaactcaaagtaccaaaaggtagacaccctgctaatcagacgaccgggaagactttattcccagccaggaaaatacgtaacattcaccccagagatggcacaagaaaaccatattatctttttcttgtcttccacccaatttatgctaagcaacccaggagcaggctataccactgtgagcacatgaagacatctggcccaacctttacaattattgccttcaactctccagtgacaagtgaacaaaatctacagcagctgctgccttgaaaaaagacaaaatatattattcctaccagctcaaaattaaaatgtagccgtcttaaaacacgagcattgctcctgaatgccacatgcatgaaaaaccgggtatgcactggattggacaagcagactcccaagctggaacagagagaagggctttgagggagggcagaatgtcaggtaccgaaagcaggaatccgtgaagaaacccaaaccggtttccatttacaagccctaacactgggacaatgagaatccgtttcacatggtagagcagtcagccaggtacaccacgctgctgttcccccaaggggaaaccagaggtaggctctgttaccagtggatttcgagttgactcggggatccctcctcgccaccggaatgggggaaccaggaagttgtggagcagctgcgatccccgaaactcaattcgcaatctacgcaacacccacccctttctggaactcagaggttctcgcccagtgatcgcaggctcagcatcagaatcacctgcgtggggcggagtgggaggggggcggtggctgttaaacacgcagttcccggtcccgcccccagaggttctgaccccgggactgaatctccgcattttaccaaaggccccaggtgattcccactcaggctgaagttggaaaaccactgctttagcaattttcattcctaactcggagaccaagaaaaacccacaggtttgcagctggctctgaaataactgcggcttctttccgggagcatctggggccgccaacggagagctcccggtcctccgaaagggccagccgagctcaggccggccactcgcggaacctcggcagggcccaaggtcggccccgcggtcccagtcctgggctccgggcccctcgcggcccccacggaaccccgcccagcctcttcggcccacggggacccaagagacacccggccccgtgacgcgcccgggccccagccgccctcccggcgaggcctcctcaggcgaggcctgtcagcccgcgtccccctgtccgggtcacaatggcagctcgcgactgggaaatagttgcctcggaagcgggagccccgggccgcagcaccgtccccatcgccccctcccggcacgcaccttctccagggacgcgtccatggctgaggcggccggtggtggcccggcggtcccgggctctacttcctcctcccgcgccccgcagctctttccacgctggcagcgctgacgtcccccgcgcccgcggccagcggggcggagaagaggaggagctgccaggcggcgccgccggctgccgaacctgatggttgaggggcggcggggcggcggggcggggccctgtaatggtgggcggagccctctgggattccgtacctgggcgccacgccggccctccctaacgtgcgcaggtgaaggggggaggatgcccggtggattgttcaccaaactctttccagcagcctgttgcaatcatctaggtagaagtataataatcacaaagtactattcatggagtgaaaggctggaaatactagtgacgcacctcacttccgggcccaggcttccaagtctcccgcctcacctcccgccggcatccctcgagaatggaacaggccattcgccaaggaggcggtgagcgagagagcaaccttgcgcatgcgcaggactcgcagcgtcctcggcgcccggggacttgggggttttggggttgggggctgcttagtgaacgctgttcagagaaggcactgatctaagctgaggtgttgtctcagaccctaccgccgaattctagacggaaaaaattgttgaaacaactggtccagcctcttgcatgtcacaattatgacttgtcaggtaatgggtagtagtaataatgataatattaatacatcagctgctgttcttccattttcctatttcagcagctctaggagatcattatccccatttcgcagtgccgatctaggtaggattcagacccaagccccatgagtccacatactgcttccactcctacgttactttaaatgttttaaaaagttaattttttattaatttttttatcttgttaaccgatgaactgaagagaaaaaaaattaaaatctcattttaatagagaaggtgggggtgtctcactatgttacccaagctggcttcaaactcctggcctcaggcgatcttcccgtctcagcttccccaagtgctgggattacaggcgtgagctaccacgcccggccacttttgcaattttactgcaatgtgtttcgaacgaatggggagggcgtacatttgcttagtagattcctcccaccttaatgtgggaaactgatgtagactaccacagtggcaatcaatggaacacttcacctctgcgaggacgctgcaaccacaatcttactccttttctctcctgttttatactcttcgtcccgaaatctgtgtaaacagggtcacattttcagcgcagtaactccatgttttgagctatctacgttgtatttggtaaattgcctggttatgttaataaaattattttctaccaaaaaacccttgtgtgctggtttagactgtactgtgggaattattctgactctctaaagagctttccaaacagaaggaatgatagatttatgtctttcaagaattgaagattgaatgtacccctgcttgagcaaaacaagtcacttttccaacgtgttttgaaatttttcaaaggtagaaaagtttaaacaattgtacagtgaacaaccatatacccactacctagattctacagttaattttccctatatttgctttaatcacatatgcatccatatatccatccatcgatatatgttagtacatttcacctctgagcacctcagtatgggtatcattcaaaactagtacattttactaaagtcacctccaagtttctgtggattacattacaaagtataatagattctacaaaacaaatactagagagaaaagttaactttactgttttaaaagtagtctttgaaaacccaacatgaaaaagtggaaataatcaaccgtattatttattatatttagccaaacatttattgactgccatctcggacagttgtgctggaaatagtatgtaaaagaataagaggctggttcaagaccagcctggccaacatagtgaaactccgtctctactaaaaatacaaaaaattagctgggcgtggtggcaaacacctgtaatcccagctacctgggaggctgaggcaggggaatcacttgaacccccgggggcagaggttgcagtgagccgagattgcgccactgcactccagcctgg

SEQ ID NO: 1886715 - DNA, 4001 bp, Homo sapiens; identical to SEQ ID NO: 1243220

SEQ ID NO: 1886716 - DNA, 4001 bp, Homo sapiens; identical to SEQ ID NO: 1243229

SEQ ID NO: 1886717 - DNA, 4001 bp, Homo sapiens
gagtcctgcggcgcccaccaccccagagtcccacctgctgtgctgaggagccggtacacctgcagccgcagctgggcgggccgccggagctcctgggtcccaaattcggccgtggtgaggaaggcttcacggctcagacgcaggcccgggaataccatgacctggtgggcagggggccgcctcagctccacagaccccatcccagcctgaagcccagactccccccacccgaacttcgcaggaagaggggagggaaggagagcgagccatcggacccccacaggcctggctcctgtcgctcgagaggaagactccgatggaaactgtccatggggggcaggacccctgacctgcctttcaggaataactcacccacactcagagaaaaggcctgggggtaatgtgagtaaacgctttcctctctgcactctggattttcccaaccatcttcactgggcacaagcaacattaaggcccccaagttttttggcgagacccacagtgggcagggcaggcgaggcctccaggggcaggcaggagggcaggttatagaacgtggggggccgactacctccacgggctcgtgcggggctgagaggccgtcctgccgtgccagaggcatcaggggtccctacaggtccccactgggcgctcccacgaggaggttctcggcatcctgcactgggcctggggtggcaagtgcacagtgaggcgccgggccagggcccaggacaccaggacgaacagactggggaccgagccgcccgagaacccccccaccagcccctcctcctcagcccaggctccaccgcgggcgctcggcaggcccctaaccacagccagcgtctcaggcccctgcctggcccctcgcacacctccaggccgcagctcgcagacgtagctgtgcggcgctgagcacaggtcggtgttacaccacccggtgggcccgagccggacgcagtgctcggctgtggctgggtgtggctccccgggcagccagttctggcagctctccaggctgaaggcctcgccctgcggcgctgggcccacctccaccccctgcacagtcgagaagccgatccacatgtctaggctcctgggggcgggtgtgggatggcagggggctcagggcactcctccatcctcccaccctcacagcagcccgctgggagccccgtcactgtccccctttccagatggggaaactgaggctcagagcccggagaacagggcccaccagcccaggctcacagcagcacccacccacggggcctgtgggcaccggcagggatccccgtgcaggccacctcccgtatggcgtgcccaggagtgtccggaggctgcccccagctcgcgtccacctctgcatctgcagagctgacaggaacggccccaccggccggcgccacctgctcaccagggccggcccagctcccacctccctcctcctgagactccccagccgcaggctctgccccactgcttcagagatctcccaacctatggcccctcggggggtggggcaggcacctggtgacccgggagaccaggaagcgctgcacggcgggactgtccaccattgccagggtggccccggcccaggcccgacactgctcctgcgcctgcagccaggccgccttctccaccaccaggcggtagcagtgcccattgccagagaagatctccgtgtccgaggggcagagcgggtgcaccgctggagaccggtgggaacgagggtgtcaacggtcagtgtgggcccaagacgggggtaccaggctctgccccatctggatggccctggggaggaaggggagtgggcagcagacactcacctcgggccggctcctcgcccagggccacgatgctgtaggcggcctccaggcctgaaccaccgcggttctggatgctgaggtcgaggctctcgtcactctgcaccgaggacgggcacacgagctccagggcggcaggtgccgcttccacctgcacgtctgtccccagcagggctgagccggtccccagggccagcacggccgtcacgtgatagcgcccaggcagcacatagcgatgcgaggcagccggcccagcggcatccacctcgggggagccgtctccgaagtcccagcgtgtggcagtgacagggagcggggcagcgatgtggaaggctgctagctggccggaggccaggggtccgtggggccccaccaggggggcccctggggaggcagggaagacgtgctggaggagggtggggcccctacaggtgggggcaggaggcggcggggggccggagcagagggacaggcaggcgaaggaggcactggagggctgggctgacccacacaggcaccagccctgctcggagagggctgcgaggccctggccggtggagaagcagaaggcgctgcaggcctctggctgaagcaggccttcgtgggcagctgaaaaggacactgctgccacggtgcctgagctgttgtcagggaggcaggcgacatactcctcacctagaagaggcagccactggaccccgggttctgctcctcctggctccaccccacacccccccatccgcccgccgcactcacaggctcccatgctgttcccttggcccggaggccccccccagagaggccttcctgagccctgcccagtgtctgcagggcccaggtcccacctggctgggaaggacagagctgccccacccaccggcactcaccacagccactgtccagcaaggggatgccaagcagaggctggccagccagggagccaggcccagcacacgtggctgcctcgggctgcaccacccgcacctgctgctcctccgcccatcgcggcagccacgccaggccacagtcacactcaaacgggttcccactcaggtttctgcggggcaggggcaggtgttggggaccaggtctggtgggaagggtctatgccagccccccactggcaaccaggccctggagccaccctgacagcaccgcctcccctgccccaaccaagccggcactggggggctccaagcaggtagtgaactgcccccaggatctggtctcaagcctggaaggggacacggaccaactgggagggcagaagggatactgggggcctggggtccagccaggaccccacccaaagaaccacaacttacatttcacttaaattaaataaattagcaaatattccttcttctaacgtagaaatcttgttgttgcttatatccctggaagagaggggggattcggcaaagctgacggaagcccccacagctgagcagcaagaggcggtgccgccagcccacccggagtgagccccgcatgctggcacgactgggggacactcacagctctgccagcgccgagaggttcgccaggagcccaacgtccagcgcccggagcaggttgtgggagacgtctctgaggagtgagtggccgtgggtcagggccagagcccttagtaggccagaggccatccctgggcccatcccacacatttccagcatccccaagctatggcctcccacccttgagctccccactcccagaggtcaggaggggcctttctgatggaagacccaaatgaacactcatctggggaaaccaagccgggagaggcctgggggcctcagccctctgcacccatctcagccctatgccgagtgccacctggacctgtccacccagggccaggaagggcacggacccccaacccatcccacgcagggccaaggccccccatcccctgtccacagtcccccacagagccaaggtctcccaaccctgtctacagcccccacacagactcgaggggcccccatctcctgttctgaacccaacagggtggtcccactgtgggaccacaaccaggtatgactgtgtgagaagcaggctcactaccaggctaccagggagcacagcggagcaggcgccaccttgaggcataaacccagagaaacaagacctccaagacggccaggcactggggcacacgccggtaac

SEQ ID NO: 1886718 - DNA, 4001 bp, Homo sapiens
tggtagcgatgctcatgtcacttgtggggccacgctactgtgcagaatgtgggctgcccaccctgactgactggcacctacttccagctaggagctgtcctagtcctcagggacagtgagtgctcacgaggtcattcccaggatgaacacacgagcccttcacacagcactgcaaaaactgccttgttctgacgtctgcgatgagactcactcccagagggtgcaaccagcacagccagtgagagcaggggaggccctgccaccccgccgcgcccctcacctgagccccggccccagcctgtcttgacgaggatctcgtacttgaagcggccccgctgcccacagaaggggatggcgcggccccggctggcatccaactggtccagcttgtgcaggatggcggccatgaccatgtaggtcaccaggcacacagcacatgtcagcatgacgatgtagtttacatccgctgtcggctcctgtgaggacacagccgccgggcccaggaggtcacgtgcaagctgtgccttctcaggatagagccgagcccacccaggccctcctcgactctgcagaggctcccaggagcacagggtcactcacaggaaacacaaagcgtacatggcttgggggcacgaagaggctggcgccgaaggcggtgaggtggcgggtgaggcagacggcctggcggggcgaggtctcctccaggggcagcagcccctctgtccgccacaccacgtcctcctcgctgaagtactggcacagggacgtgtacaggcccacggacacctccagcgccgacaggcggaagtggctggagaggttcagacggtaactccccactgggtctctggtcctgggcagggaaggggcagtggacgtgagcccaggctccgccaggttggatatcggagtcccagagcccatacccggtccagtcccctcgctgcctgccgtccccacagggcctgtaacccgggcaatgctgacccatgatgccctgccctgccctgccaggccggcccgcagagctcaccccggggaaatgaagaaggtgtagggccggtggtcggcaccctggagggactctgggcggatcctcctgctagccgagcagttgtgctcattgggccggggctccgagtgcaggtagactgccaggtagggctcgggttcctcagacaggtagcggcctggggcagaacgcgcaggtcacacgcctgctgggaagctcaaccacccgggggacacccacgatggccctcctgagcccaccctctgccacgggcctgaaaggccataggagcctctgcaccagagctggcacctgcttctccgtggcccccagctcctctccggccaggcccccagcagcccatgaaacagaaagcaaatttcaccagagacacccatggaagccctacgagaaacgccttccccccaagaacaaggccagggggccgcgtgtgcctcacccgctgcacgcaccgtccagcagcgtatagttgagctgcagatgcagcacggccgcagggttgctgctgtccagggtgaccacagcaccgacggaggcctggggctggaccacaacggagttggcagagctgcggtggccccgggcagcccagtccgagttgttgggcaccttcacggtgatggcgcgctctgaggccagccgctcgatggggatctgggcgccggcctgtgtctggaacgccatcgaggccaccttggtggagacggtgtagttgctgatatagccaaagggaaagggattggagtccaccagaaagatgagctgcaccacgtcactgaggttagccggggccctgctgaaagcctaggggatggagaagtggcagccaggccctggggcgccgccatagcacagcaggctccgcgggtccgagcgcttgccctgggccacgatctcctcgcccgccagtgtcaggggctcctcgttgagcacgcgggagcgcgtgaggatgcgcatgagggcagaggtcaggttgtaggcctgggacgccaccatccgcgatggtgactcggctcccagctctgagcgctgtggtgcccgcacgtctgagctggccaggtggatgaggtctcctgcagacagacgtgaggtcagtgcagagacagggaggcagagggagggtgggggcaggcaaaaagggggagccggagggtgggggctgggagaaagggggaacctgagggggcagagagcgaggtgcaggcagaagaaagggggaagctggagagagagtggtggaggggggagggggaaggggatggggatgaggacgaagatgagggggatgatggggagagggaggaaaaaggaaggaaaagggtagagaaaagagaaaggggagaagaggaggagcagggggataagggaggggaagggggataaggggataagggaggggaaggaggataagggggataagaaagatgaggggaatggacaaaaggacggggaggatcgggggggaaatggagaaaaggggagagagatggagaaaagggatggtaatagggaagggggagggggaggagaatgggaattgggggagggggataaggatgggaagggggaggggaggaagggggaggggaggggctaggggagggaggggctgggggaggagtggaggggctcagcgggaggaagtgaggggaaggtctaggggaggggaggaggagaagggctagcggaggggaggggagggggcaggggctaggggaggggggaggggcaaggggagggagggggaggggaggggttaggggagggaaggggcaggggaggggctaggggagggaagggggaggggaggggagagtggaaggcacagaacagcatcttcttagtccctccccacatctgggcccctctttacaccctgggtcccccgagaggcaccctgcgttcacacaggacagcagaaaggctgaggctactgaagcaggtcagagaccgaggaacgccatggcatgaaggagcccaggctggaggctcagctcctcggccaagctgcccgtctgccctggggggctgaacccagtaccctggcaggcatgcggggcggggtgagcatgtggggccatcctaccatgcactgggccagcgcagcagcgatctgctggatgtcatccacagtgtggaccctcagggacaccagagtctccgtgatgttcttgcgtatctgggctcggcgctgccgctcgtgcttgggctctgccgccacgtccagggcccgctcgtactggggcaggcaggcggcacagcaagctgtcagcagggcaggagaccggcaggaggccagcagatgcccacgactcccggggtgcagttacgtgctagatgctgtgtgatgtgggcattgacccgcaacactgagctgtttcttcatgggcaaaacagggtaagcacatgggccctcctgggcgggggctgcattgtggaaagcagacgccggagagggcccggtgggtgtggctgctgggagcggaacgtcggggtgctgcttcagggtcactgggatttatctctggggcccgggataagccctccgcaaagctccaggcaggggtacaggtcttggtccccagcacgcatgcagcagatgtgaggtcccctgccaggctgcactcacctcgttcaggacggtgaccagggccagcgagtactcgatgacgtgctggggatcggcctgccgcagcagccccgggagcacactagcggtgagcccgtgcagccagactgtgagccccattgcgctgccgttgggctctgggagggtgatggccagagacctacgagcagaggggggtggtgagcaggtggcagtctcgggggcgccctcccacggcctggctcacctgttgagggcgaccacagcggctcccagctggtcctgcaccaccacggccaggcccacctcgaagtgtggcctgaaacccgggggcagcacggctccgtagccggagaggct

SEQ ID NO: 1886719 - DNA, 4001 bp, Homo sapiens; identical to SEQ ID NO: 1243247

SEQ ID NO: 1886720 - DNA, 4001 bp, Homo sapiens; identical to SEQ ID NO: 1243254

SEQ ID NO: 1886721 - DNA, 4001 bp, Homo sapiens; identical to SEQ ID NO: 1243262

SEQ ID NO: 1886722 - DNA, 4001 bp, Homo sapiens
ccctgggcttgtcctccctgactaggagtaggggctggtgagtgcatattccccttccccctctcctgagtggacccccagcccgtttacccagcacacggtcccaatggcgaggggggtctggggtcctgggaggcagatggggctgaactgggaggcctgcaagggggagtccagctccatcagggcaatgtccccgctggtggtggtcccatggtatgaggagtggaccaggagcctcctcacagccaccaaggccgagtggggctctgaaagtgagggtgtcagccctccgactttaacatggtagagcccgggatcctcagacctgggaggggaatggaaacacggcccactgcaggcagccgccaaggggaggggtgaggagcacccccacccagcgccactcacctcaggaagcagtgggcggctgtgagcacccagcgtgggtggatgagggagcccccacatacatgccccactgaggtcaaccacaggccaacctgccacggccagcgtccttcctgggtgtcttggcctcccacaatcctcccggcctccttggagtggccgcattctgcagagggatgggcgggtgggagacctcagctttattccctctcagaaagcccatccctcccggtctgactctttaccctaacatccctctgcccttctgacatcccttctgacattcctctgcccttgatgtccagggatgaggctcccagggccaagggcctctgcatgtcccctggggccagtcctccctggccaggagtaggggctgtttgagtgcagggatgagatgtctacggtacctgaaggcagcacatcccaatgggcccctggaaagcaagagagcaaaggggggcacacaggctggcaggggatgggagggaggagaagacagaggcgcatcccttacctggcagcagccacagcagcagaagcaggatggggcctgcccgaagccccatggctcctcttccctacagacactgcactggggtcagagtccttggacggcaccagaggttgggggggcgggggtggcaggtcattaaccagtggcaatcacgctggagccctctgtgcctggcagaacccgccctcctcagatgccgcttgggctcctgtcccgcatgttccagggaggtggtttagaggaggctggggatgccagggcccacctcaggccagtccctccaaggagccagaggtcagaagaccggtcagtccaccctactgggctgcgatgtggaagccccacccatccttccggcaggcaggagatccccactgcttcacccactagaagctctgctcaaggcagaggtggggaccaaccctcttcaccctgtccccaaccaggaagtgtgatgtctccacacaggccagccgggctgccccagcccacctcccgcctcccttcccaccagaaggacctgtagctcctgcagagccctcctggggcacaccgtatctaaggggctggaacataggggagccctattcgttgctatgggaacaaagacagccagggttcggcccccccagacaggaagggtcgactcaggagacacgttttccaggtgctacttcctcctgctgctgccactgcccaaaacctttggcccccatcccagggccaggggcagaggcggagccagtcccgaggcagctgaggaccccaccatgcgcttggtgttgtgcacggcctccagcccggactgaagttggcctgacccgagaagcccaggatcgctgaggaagctccccactgttgtcgcctctcagccccacgcccactcatccacaggcagccgggatgctcacgcagccacgtcacggacctcatctcggcctcgctacgactctgccaacagggggcgctgcaggaggctacgcggtcgcagggactcctttctgtccgtttccggcaaacttcccgcgctcttccggaggttgagggtggttcgctaaacttccggtgggctccaagagagtttccggcggacttcctgtgcgatcgggcggggttccggtcagtatgcgagtcctgtgagcatcatctcagcctggcctcaggccctggagggtctggaaactgagtggtccctctcaggaggcaaccaaaagacgttctcactggctgacgatgggacacttggagcatcactgtgggcaataacttggagtgatttaaatacgtgagataaggccgggtgcggtggctcacgcctgtgatcccagcactgtgagaggccgatgcgggcagatcacctgaggtcaggagttcgacaccagcctggccaacatggcaaaaccccatctatactaaaaatacaaaaattagctgggcgtggtggtggcacctatgatcccagctactcaggaggctgaggcaggagaatcgcgttaacccagaagcagaggctgcagtgagccgagatcgcgtcactacactccagcctgggcgacagaacgagactccatctcaaaaaaaaaaaaagaaaagaagaaatccatgagttcatattacaaaaaaaactttatcatttttggagtatgctaaggaaatagttcattattttgaggataattaaatagatgccaaaaacataaacatttttaaaaatagaatgaaagaggcaacaaaaataaatagatgatgaaaagtttctctttatggaggaatttctgctaataaatggaacaggaatatcaccatgttgcaatctaatggactaattggtctagggaataatcctcaacagctagctcatcactacgagacagtcaactggtgtgtaccccctgatagacttttctggaaaaatcagaggcctgcaaggcggagttcagctgcatcagggcaacatcctcgctggtagtggtcccatggtatgaggggtggaccagtagcttcctcgcaaccaccaaggccggagtgtcagccctccgactttaacatggtagagcctgggatccacagacttgggaggggaatggagacgcagtctgctgcagtcagccgcccaggtgaggcaaggagtgcctgaatttgcccaagactgcagatctggggtgtgggacatagggacagagcccagaacaggcagagcctgaagagtccacaaatctggactgggagtccagagggaaacacagaaacagaggaatatgttagagacagcatgggggcacaaccagcaaatccagatggtgagattaaaggacaaatgatcagttattggacagtgacaaagaaaaaaaagagatggagggggcatctcgagaataaaagaaacttaagacgtatagcaatcaactgcagtgaataaagtttattttgtaagggaaaattgtgaaagactttaaagtggacccacaaaaattactgagtaaattcaatggggttgtctctcatactcttccaggttttctgattctgtgggggtccctccctttgagctattttaagactgtaaattgtagataactgataggaatgcagattgttcttgtacatctatttaagcaaattaatttcaacattgctgatgtgttaaatatgttcctactctgaattctcctttgaaccagttgtaacatctcactgattctgtcattaattgagttaaataaaaacacaggctgggtgcagtggcttatgtctgtaatcccagaactttgggaggctgagaaggtgggatgatattttgaggccaggagttcaaaaccaccctggtaaatatagcagaccctgtctctctaaaagtaaaaaattgacatgtattaattttatatttgtatgagtcatgattttatctttttagcacatcatcctttaacaatttatattctgattcaaacgcacacattggaaaacataaaatgagctgggaataggaaatatgaatattaattatatttgatgttgttaatgaattgttgttacttttgtttagtttgataatgatattgtaggtcttttt

SEQ ID NO: 1886723 - DNA, 4001 bp, Homo sapiens
atctttactcagcacctaatgtgttccagatacatttttttttttcagatggaatctagctctgtcacccaggctggagtgcagtggtgcaatcttggctcactgtagcctctgcctccgaggttcaagcgattctcatgcctcagccgccctagtagctaggattacaggcgccctccaccacacacagctatttccaggtacattcttgacgctaggaattcagcaaagaataagacagttaaggtctccgatgctcataggcctcacattttagagagggatgaatgtccaataagcatataaacgtataatatgtcagggtcgtatgactacaaggaacagtgattgttacaacccagatgagagggaaaaataaaggattccaaatatcccccttgggaagtagagtcaggattcaaacaaagaactgtatggcttcaagttcatggtctttaatctcctggaggctgtctctctttcttttttcttttttttaatcagtgttgggatcaaattctggctcccctaggaagcatctggcaaggtttcgggagccatcgggttggccatgttatgctggaatatttataagcaccggagggttatccccatgtcgtagaaaatgaaactgaagctcagagagatttgcactctctgcccttttgtacaactcatttttccccagtatgtggaattgagggagcttcacgcttctagctgtcatgattccaagattctacgacatgtgggagaggatcctaaggttcggggaaccgcggaggtttcggggttctagaaatccgaggttctaagcctaggtgctccaataaacccagtgagagccagcccaggtttccggtctgtacccgctggtgcaagcccagagacaagcaggcgccacccatgagcccctctgcggccccctcccgggtcccacctcgcaggccagctggagggcgcgatcctggcgtcccccgacggcctggggccccaatccagaggcctgggtgggaggggaccaagggtgtagtaaggaagcgccttttgctggagggcaacggaccggggcggggagtcgggagaccagagtgggaggaaggcggggagtccaggttccgccccggagccgacttcctcctggtcggcggctgcagcggggtgagcggcggcagcggccggggatcctggagccatggggcgcgcgcgcgacgccatcctggatgcgctggagaacctgaccgccgaggagctcaagaagttcaagctgaagctgctgtcggtgccgctgcgcgagggctacgggcgcatcccgcggggcgcgctgctgtccatggacgccttggacctcaccgacaagctggtcagcttctacctggagacctacggcgccgagctcaccgctaacgtgctgcgcgacatgggcctgcaggagatggccgggcagctgcaggcggccacgcaccagggtgagccgcccccgttcccctccaccccgtctttcccctccacccacaccagcgcttaccccgcgggctcttccgctttctgttcctcctacccctaaacaaagctgctctaccggaaaggaggctccccacgcttggcctaccgaccaacgggaccccggccccacggcgggaagggaagggaaggggatcacttggcccatatccttccaggctctggagccgcgccagctgggatccaggcccctcctcagtcggcagccaagccaggtgaggcctccacacccagcccggccccaccgcactcctgcacagcctgcatctgtgctcccgcaaccagggcagggcagggcagggcaggcacggcttggcaaccctgcgcaccccacccaccaacccacaccctgcgggggaagggagacaatattaccctcatcccactgcatgtggggtcctggtggccgccccctggagccctgcccctaggcttgcagaggaattcctgaagaactcaagttcagcagggacaggccccacaccctggctgctggctcatgttctcctcccacccccaggcctgcactttatagaccagcaccgggctgcgcttatcgcgagggtcacaaacgttgagtggctgctggatgctctgtacgggaaggtcctgacggatgagcagtaccaggcagtgcgggccgagcccaccaacccaagcaagatgcggaagctcttcagtttcacaccagcctggaactggacctgcaaggacttgctcctccaggccctaagggagtcccagtcctacctggtggaggacctggagcggagctgaggctccttcccagcaacactccggtcagcccctggcaatcccaccaaatcatcctgaatctgatctttttatacacaatatacgaaaagccagcttgaacttgtgtgttttcctgcttctagcctgctggcatgtgcagagctcagctatgcttcagaggccacccagcctccagctccatgtccctagggtctctggcaccccaaatgcttcccccatccttcctggtatcgccatggaatatccctcctcattcaccaggtggtgctcctccagtgctccctaaagggtctaaccttaccattatagataacagcctgtgacccaggtccgaaggttaaaagaggcatgtaccaaagggcgcaaactggtgggcagctctgtccaagccatttagaaacacactagtcttcatagctcccctaccttccacattttccactggagaaaaatgcagaattagagaaatttgcagggggagacacattagagcattatctaaacataggacagaagagcacaagtcaccaaattgctcgagggctccttctggtgctggctcttaacaggcttaaaggctccctctgccccaccccatcccgtgggggaaagggtcataggttgcactttgctcaaaaaacatgccaaccaccaaagcagattttcaggaaatgagttgtgtgtggtagctgcctcttttcttgatgcgatttttttggagggttattacttattcattcatttgaaaggaacatttaaaactttttttttgagatggaatctcgctgtgtcacccagactggagtgcagtggcgtgacctcagctcactgcaacctccacctcccaggttcaagctattcttgtgcctcagcctcccgaatagctgggattacaggcccctgccaccacacctggctagtttttgtgtttttagtagaaacaaagtttcaccatgtcagccaggctggtctggaacttcggacctcaagtggtccacccgcctccacctcccaaagtgctggggtgctggaattacaggcgtgagccaatgcacccggccacttttttctttttttttttttgagacggaggctcactctgtcacccaggctggagtgcagtagcatgatctcagctcaccgcaacctctgcctcccaggttcaagcaattcttgtggctcagccagtcaagtaactggaattacaggtgcttgccaccccacccggttaattttcgcatttttagtagaaacgggattttgccacgttgcccaggctggtctcaaacacctgacctccagtgatccatccacctcagccgcccaaagtgctgggattacaggtgtgagccaccgggcccaccttcttgatgcaatttttgcctacaaagggaaatatgagtatctctctccaggaaacttgaggtctttccagaggctgtttgggaaagcaggaatctagggctacttcctaagtacactttacaagcaatcctttctggccttgaagagggaggatttgcaaagcaatgggcagataccaaggagaccctgaatcctatccttaggaatcaccaaacaaccactttccaacctcactgccccaccaggcttatctctaattacatcttatctgcaacacacctcctaccttgtcctccctgcctctagctccaagagcctgagaaatccaaactgat

SEQ ID NO: 1886724 - DNA, 4001 bp, Homo sapiens; identical to SEQ ID NO: 1243306

SEQ ID NO: 1886725 - DNA, 4001 bp, Homo sapiens
tagtgaagtacacatatgacatcccaggttgcaagagcagtaacattttctccataggattcctcttaatttaatatccaacagtcttcatttctcattatcagtgtcttcttatgtagaatttaaaaaatgggaaaaagtacttatagatcagtctagcaatttcgattgcaaaaatgcagattttctcttttcaggtagaatagtaggtgatgctgttccacaaaaaaagaaaaaaactttatgacccaaattgtcagtgtgattctaaacattttcttatgttaaatgcctcttataattagaataggtgccaacaacaaatgaaaaaatagttacatagatagcttacatattagttacatagagagcttgagtcaagataggactgaggctaacagcaaattaaccataaaaatagggtctgattactgctgctcaaacttaagcatcttcagtattaaggtagattcaggatgtttgttgatcccaatgggacatcaggatggaggaaggggtgagggaggattccccagaacaagatgcactcatacacagaaacttggcatttaacactgtaattttcaaattgagaagaccaattttaattttgttttatctccttttggatcctactttctggagatttgaaaatgtatttatagtgctagtaaaatctgaacgtctttcctccttctccctaatttttggatatttcaggaattgggatatgaattatacaaataagaaccagccccttctcctgatctgtgggcagcaatagccccaagggactgaaaaacaagtgttttctgcacttcctttcagtttcctaacagcctgttcatgtacttgttcggtaggaaaaagtgttttctaataacaaatctctattatgttaataagtgaggactaaactctgacctttgtcctctcttgcccaaattcttacctgggaggcctggagagtcatgccctaggaaccacaaaatctcatcagatgggttatatttaaccctatgtaatgtaatttactttccaacttgactgtggcgtaacatcacaagacaggtataaaagacaataaaaatattttaccccaaaatatgtttctttgctgtattttaaaatgaccctgcaaagccattttttgtggaagaaaagttgcatctgtaaagaacttctactaacataactggatctttcctccttccaggccctcacaatcttgaagagatgaactgagagtctagcaccttttaaggcctgaaaaggaaaactttgccatctattgtctctaaggggagttgctcatgagactttatttattattatttttttttcggatttctttttttttatattatttttatactttaagttttagggtacatgtgcacaatgtgcaggttagttacatatgtatacatgtgccatgctggtgtgctgtacccattgactcgtcatttagcattaggtatatctcctaatgctatccctcccccctccccccaccccacaacagtccccagagtatgatgttccccttcctgtgtccatgtgttctcattgttcaattcccacctatgagtgagaacatgtggtgtttggttttttgtccttgtgatagtttactgagaatgatgatttccaatttcatccatgtccctacaaaggacatgaactcatcattttttatggctgcatagtattccatggtgtatatgtgccacattttcttaatccagtctatcattgttggacatttggattagttccaagtctttgctattgtgaatagtgccacaataaacatacatgtgcatgtgtctttatagcagcatgatttatagtccttttggtatatacccagtaatgggatgactgggtcaaaaaaatatggaacacttcacgaatttgtgtgtcatccttgtgcaggggccatgctaatcttctctgtatcgttcctattttagtatatgtgctgccgaagtgagcacgagactttatttacataataagaaccttgttctccacaatcctttatcttaatcgagatgctactttctatttatttcagatctttagataatgacttaactgtttcaaccaattgccaatcagaaaatctttgaatccacctattacctgtattccccactcccctttttgagttgtctcatcaatgtataccccatatgtattgattgatgttctaaatgtccccccaaaatatataaaaccaagtttcaacccatccaccttaggcacatgtttcaggacctctggaaaatgtgcctcaggccttggtcattcatatttggctcagaataaacctctttacatattttacagagtttgactctttttgtcaacataaacttatcttcctctcaggtttagaatttccctttctcagtcttcattggacacttatttgttaaggcaacactctgaataaatgactaaccaatgtataactgttacacaggcattcattgcaaaaaaattattgagcttctactgtgtgccaggcacattgttggattgcagggtgctcataggcttcaaaagacactgtagtgagtctgacttgagatcatttctcttctctaagactcaattttctcctttgaaatgagagaaagaagagtactgactctcacctgtgcttttgagtgtatgcatatcattttgcccaccatttagcaagaggcaaatatgtgattgtgcttattaaatacttccttgaaatgtcaatgcattgtattttcatgccagtgtgtaatatgtgggaatgggctttttattccatttaacacacagtgacattgtctattgatttaatgaggaaattacacatgttgtactttcctatttagcaaagggttttgcattaaaggtatatcaaaggaacacattgccatgggtagttgggtgcagcacagccatatggcagagaaaaggccccaccaatcaagcagacgacctgtggtgtctcagacgaggcatacagaaaggcattttaggaagcagcgaaaggggttagccactgggcagcaaacatgtgtccagtaaatggtggccttaatacctcaaatccatttacagtgcctattatttgacactcattcaaaatccagggaatgtgttttgcagtgaccttagataaaaatgagggaaagcaaatagagtaactattaacataattacaaagagacctgttcgatctatgcttcatatgcccatatggccgggtattcagtggacttcagtagtcactgctctcctaataagccctgttaattaggtaataggaacattctctcattgttgacagcagagttttctaacttgctcatattaaaccaagctaattttgttaagcattgagattccagatggcccctaaggtacactctggtatgcaggcaggggaatcagtgcctttgtaatccatgatctacttttttgaactggaaaagctgttttggaaaagattatgtggaaaccaagaaatcaatattcattgtcttatttcctttccaacaaaattagatagttagatatttgtatgcatgtatggatttgtgtgtttacacgtctgtatgtaaatgtgtatatgcaaaaaggagctcatcctctcagcccaacgctttgaagagtgtgtgctccagattgaagagcaatttgacggcgcaatattcattgactttcttttctctccatctttgcagaagctgatttttaaaaaggcaggatattagagctggaatgggttttagtatttagctaaccaacacattcaatttgtatatgagaagactaaggacaagagggaaataccaatataagatcaaaaaataagttagtgtcggaaccaggagttaaacatttttctcctcctgaagagctaatcatgtacttttgttttttaaaataacaccttcattgagttatgatttacataccatcaaattaatgcttttaaattgtaccat

SEQ ID NO: 1886726 - DNA, 4001 bp, Homo sapiens
gcttgtgcgacagcctgcctcagcttcccgagtagctggattgtgccactgcactccagcctgcatgacagagcaagacccttgtctctcaaaaaataaaagaaaatgtaccaagtagctaataggaaatgtgcaatcatacagtacttgtcctcttgtgaccagcatattctacttagcataatgtccacaaggttcatccatattgtagcatatgtcagaatttccttcctttgtaaagctggataatactctattatatgtacataccacgttttctttattcattcatctgtcaatgatgggttgtttgtagctcttggctactttaaatactactgctatgaacatgagtgtacaaatatctctttgagctcctgctttcaattgtgttgtctattttctttttttcttcgagacagggtcttgttctcaatttttgcttcaaaataatccaggtttgaggtataggtatagatacaacaaggttggttaaattgataattatagaagagatgaggccacgcatggtggctcacacccataatcccaggactttgggaggccgaagcaggcagatcacttgaggtcatgagtttgagaccagcctggccaacaaggcgaaaccctgtctctactaaaaatacaaaaattagccgggcatagtgtcacatggctgtaatcccagctacttgggaggctgaggcaggagaatggcttgaacccaggaggcagaggttgcagtgagcagagatcgtaccactgcactccagcctgggcaacagaacgagactctatctccaaaaaaaaaaaaaaaaaaaagaggggatgagtagtttctctgggttaattaattataacaatttttcatctttgaatatatttgaagtttccataataaaatgattttttggctgggtaaaaactaatcaggcgtggtgatgcatgcctgtagtccctgctatttgtgaggctgaagcaggaggatcaatttagtctgggaggtccaggctgcagtgaaccatgattgtgccactgcacgctagcctgggcaacagatcaagtgaaattgctggatcatatagtaatttttttttttgctcataatctttattggaaaatggacaccaaaatagatcactattgtatactttgcaaaatcaaacataattatgaatacattatcttggtagatgaattagaattgctagacttatgataaggctttctgtgagataacacagattcaggaagtggtgtggatcactccatttgtgttgctttcctctaagtgaacaccctctgtgagtctgggctttccttctgtaggctgatactgttgaacaacccacacaaagaaccactgtctgagcatggctgaaaactatggtaatcttgggacaatctcaacattttacaaccataaaataagaatttggactttgaactagccatttcttttatgatttttcttttcctcttccaaagacggatgtaataaatctgtagccaaagacttgatcctttcgcaagccctgcctgtccagtccagatctagtaattctagtgttttttttgttttgttttgtttttgagatggagtcttgctcttttgcccaggctggagtgcaatggtgcaatctcagctcactgcaacttccatctcccgggttcaagcgattctcctgcctcagcctcctgagtagctgggattacaggcacatgccaccacacccggctaatttttgtatttttagtagagatggggtttcaccatattggtcaggctggtcttgaactccagacctcgtggtccacctacctcggcctcccaaagtgctgggattacaggtgtgagccaccgcgcccggccttcaattttttttttttttttttagtatggaacgcttcatgaatttgcgtgtcatccttgcgcaggggtcatactaatcttctctgtatcgttccaattttagaatatgtgctgccgaagcgagcactctagtgttaattttttgaagagcaccatactgtttcccgtatctgctgcaccattctccactcccaccaacagtggacaggcttccaatttctccacaccttcactaacacttatttatttatttatttgagacagagtttcgctcttattgcccggctggagtacaatggcacgatctcagctcaccgcaacctccacctcctgggttcaagcgattatcctgccttagcctcccgagtagctgggattacaggcatgcaccaccatgctctgctaatttttgcatttttagtagagacggggtttctccatgttggtcaggctggtcttgaactcctgacctcaggtgatccccctgcctcagcctcccaaagtgctgggattacaggcgtgagccaccgcacccagcctaacacttggtattttctcagagcatcactcttctttttttttttttttccctctgtacctcaatgggatgcaaagggagcatcaagtttccccttacccttctccttctccttccctttcctctccttctcgttgtccttcctccttctttttttttttttttttttggacagaatcttgctcttttgcccaggctggagtgcagtggtgtgatctaggctcgctgcaacctccgcctcccaggttcaagcaattctcctgcctcagcctcccgagtagctgggattacaggtgcctgccaccatgcccagctaatttttgtatttttagtagacacggggtttcaccatgttggccaagctggtctcgaactcctgacctcgtgatccgcccgccttggcctcccaaagtgtttggattacaggcgtgagccactgtacctagccacatcactcttaataaaacaaatgcagatgaaaatcaccacactgagatatcatttttcacataccagattggcaacaatcaaaaagcttgataactatcttggcaagagtgtggggcattcttatccactgctagtgtaactggaaatctgtgccacctaatcccaaaattctgggattacagatgggagacaccatgcccggcctttttttttcttttttagttttcttcctccagtgccaaggaattggcttttttgcggggtggggggatacagagtctggctctgtcacccaggttgaagtgcagtagcgatatctcagctcactgcatcgtacaccctccaggttcaagccattcttttgcctcagcctcccacgtagctgggattacaggcacatgccaccatgctcggctactttttgtattttaagtagagatggggtttctccatatcagccagactgatctggaactcctgccctcagatgatccgcctgcctcggcctcccaaaatgctgggattacaggtgtgagccactgcacctggcctggattgcattttatgctccagagctccctgttcaatcagattgaggcaaaatttaggtgaacttacatctttacttggtttctttccctgccctatcctgctttccccactcccctaggaagtcgcttacacaagaattcctgtctcaggctctgcatctaggcacccaacctaaaatatccctatgggcagttctggctcccagagggaatttctgctaccagtaacagccacacatctcatcaggggcctgaagatttcaccttctccaaaaagtcctccctcccagacctggaccctcacattctggcagtaggtcatttgtttaacaataaggagtttggatgcctacattgtattaggcactgcgctaaaccctttatgtgcattagctcatgaaaccctcccaacaacctaatttggaaattctattttaatctcacagataaggaagttgggctcaaacaggttgagtggcttgctcgcacggttagaaagtgatgagaggccaggtgtggtggctcacaccagtaatcccagcacttttggagcccaaggtgggaggatcgcttgagccaaggagttcaa

SEQ ID NO: 1886727 - DNA, 4001 bp, Homo sapiens; identical to SEQ ID NO: 1243308

SEQ ID NO: 1886728 - DNA, 4001 bp, Homo sapiens
ttatgggaggctgccctgtgcactgtgagatgtttagcagcatctctgtcattcacccactagatgccagtagcaccctttcctcccagttgtgacaaaaatatctgcagccatcaccaaatgtcttctagggggtaaaactgtccctggttgagaaccaccagattaaagtaagggaggaccatggagagagcaagttctgcagaacagaatgggacccaaagagcaaactatgtctgtataaagtggcaataattttgctaatgatcaaacacaaaattaattacctttatgtctggatctaacagctggttcttcaacaactcaaagtcatttgtttcacccttaacaagaaggggaaagaattaagttatgcttttgtttcctgtttagtatcaacagcaagacttttaaccgtactttaacatcagatgaaattataaaaggaacactaactttcacatgtcaattgcggattataaaatcatgactacaaaaatttaaacactcatgttagtgcagccagagggcttggaaaaaggaaaatgataaactacatttagctatacttctgtattgacatttgaatataatagttgatactcctgcgaattctcaaaaagcatgaggggaaaaaacagccagctctaatgatctaattcaggaggatctaaaaaagtattcactcaaatatggatacaaatggatatttcatataaacatacggttacttaacattttccctctactgctgagatatagtagaaatgcttctaaactaccacaaaaacaaaaatccctattcagagaaccggtttactgtcccaaagtaatgcttaggtaagttcctcaaaaaataaaatgctgtaggccaggcatggtggctcacatctgtaatcccagcactttgggaggccaaggcgggtggatcacaagctcaggagtttgagaccagccaggccaacatggtgaaaccccgtctctattaaaaaaattaaaaaattagccaggtgtggtggtgcgtgcctgtaaccccagctattcagaagactgaggcaggagaattgcttgaacctgggaggtggaggatgcagtgagctgaggtcacgccactgcactccagcctgggtgacagaggaagactccagcacaaataaataaataaataaaatgctgtaattgtttttaattctagcacttgctaaagttaaaagatgctttgtaaataaagcatttgaagaggtgaaacctcagtaaagacattattactctctcattattacctgtgaaatgggccaaggtgggggaaaaaaaggacactattactctaattttgcactgacggcatcatgctattattaaatatttgatttcaactggtatcttaattaatcttgctatttctattggtctttagtataacagcaatagttgtattctgacctgaccaaaagcaaacctcacacattatctcctcttacctttttgtacttcagcaagacttctgtcacagttccaccaaaccgaacagtttttcttgggggagaattgaaaaaatcattctctaatgcacgcatatttgaaatcctgtggaaccaagattaacaagctattaagttcatgaaaataataaaaattataatagccaacctttattgaaccaacataattcagtgggactattgttaaggcctctttactggtctccctgcttccactcttaaccaacaatccctcctttgctcagcaaccaataactgtcttcccactgcacttacagtaacaatccaaatctctcagtgtggtctttaaaatcctacattaatctggcccccgcctacctctctcacctcatctccaacaacttgttttactacagccatcatgtcttttctgctcttcaaacaagccaagctgtttctcatttcacttactgttcactctattggaaatactcttttcccaaatctctacgtggctggatttttttttttttttgagatggagtcttgctctgctgcccaggctggagtgcagtggtgtgatctcagcttaactgcaacctccatctccgggttcaagcaattctcctgcctcagcctcctgagtagctgggattacaggcacctgccaccacgcctggctaatttttatattttcagtagagacgaggtttcgcatgttggccaggctggtctcgaactcctgacttcaggtgatccgcccacctcggcctcccaaagtgctgggattacaggcgtgagcaaccgcgcccggcctagatttttgtcttcattcaagtagaagctgaaatgacagatgtcttcccaatgagaaatctcgaacactccttctctcccttctccctcccccattaccttgttgtataactgaaatcatcgtgttcgtttatttattggcctgtgtactgccttcccaccctatgctgtaagctctgtagaaagcagggacattagtgtctttggataaaccactgtccccagtgtttaacacagtaagcaggagctcgataaatattaggaatcatattacgctaattgttttacaaggtttgcttcacttacacgtagtaaattaatgaaaaaacatagcatcctaatgactctgaaagttaaacgccaagagtgctatgggggttagggattttaaaagtggagcaaaataaagactgcgaaacaaatacgtgtgtcgaaacaaatttcaaacaaaaaagatgtaatattcaatttgccatgagtgacaacgttcggctgataacccacatagcccagggaaatcccttccaaatttggacgaagaagagggaaggaagaggggtcaaggcgcagaaggcagtacccaggcctgggaaatcacgaagagacacagtcgggaaagtgggcctccagaacagagaacatactcacttttccaggccccacccatgtctattacccagttaggaggaatgagctcatttctgtgaacgtgagatgaccctcgaccccgtgctcctatcacacgccattagctttgtcccacatcctttcaatccgctcctctaagcgcggtcctgagctttggtcccagacgcgcagaaggaagcggcctgaatcttacccagtcctcgacgcgcccagcgtcttgactgcagaggacgaagcggccgcatctcccgacaaacaacgtgtgaagcagcggtgccgccattgggccgaactaacgcgaccgctgcgcctcaggccggatgcccagctccttccagccacagcctctgtcccggaagttgcgcgtgccagcgcaaccttcagacaatcaggggccccgtgtggggagggcgtatgctctcggcgggctagagcgccgctaaaacgcgctcttcgttctacttggaggacttgttccagccagcgtgagtgcgcgagtgtaaggagagacgggaaggatcggctccatccagccctgaggatcccaaagaaagggtggaaacaccctggatgtgctaagctgtggccaggtacactcaagtgttaattttttggagtcaaagcctccctcagtcagatcgaagaaactgaagcacttgtgactgacccagatcttcacggaggaaaggggattcgaacccggctgacccaggagcctgggctctatactcagtgcagcattctcacagacacccaagataacgttatcctcatggaaacgagctcgacgaagtgacctaccccagagcctcaaggctgtgatgatgctggcatgagaaacaacaggagagttaccaagaggtgttacccccttgactttatttatttatttatttatttatttatttatttatttattttcttttgagaccgagtcttgccctgttgcccaggtggagtgcagtggcgtgatctcagctcactgcaacctccgcctccccagttcaagcaattctcttgcctcagcctcccaagtagctgggattacaggcgcatgccaccacacccggctaa

SEQ ID NO: 1886729 - DNA, 4001 bp, Homo sapiens
tttctattggtctttagtataacagcaatagttgtattctgacctgaccaaaagcaaacctcacacattatctcctcttaccgttttgtacttcagcaagacttctgtcacagttccaccaaactgaacagtttttcttgggggagaattgaaaaaatcattctctaatgcacgcatatttgaaatcctgtggaaccaagattaacaagctattaagttcatgaaaataataaaaattataatagccaacctttattgaaccaacataattcagtggaactattgttaaggcctctttactggtctccctgcttccactcttaatcaacaatccctcctttgctcagcaaccaataactgtcttcccactgcacttacagtaaaaatccaaatctctcagtgtggtctttaagatcctacattaatctggcccctgcctacctctctcacctcatctccaacaacttgttttactacagccatcatgtcttttctgctcttcaaacaagccaagctgtttctcatttcacttactgttcactctattggaaatactcttttcccaaatctctatgtggctggatttttttttttttttgagatggagtcttgctctgctgcccaggctggagtgcagtggtgtgatctcagcttaactgcaacctccatctcccgggttcaagcaattctcctgcctcagcctcctgagtagctgagattacaggagcctgccaccacgcccggctaatttttgtattttcagtagagacgaggtttcgcatgttggccaggctggtctcgaactcctgacttcaggtgatccgcccacctcagcctcccaaagtgctgggattacaggcgtgagcaaccgtgcccggcctagatttttgtcttcattcaaatagaagctcaaatgacagatgtcttcccaatgagaaatctcaaacactccttctctcccttctccctcccccattaccttgttgtataactgaaatcatcgtgttcgtttatttattggcctatgtactgccttccccccaatatgctgtaagctctgtagaaagcagggacattagtgtctttggataaaccactgtcgccagtgtttaacacagtaagcaggagctcgataaacattatgaatcatattacgctaattgttttacaaggtttgcttcacttacacgtagtaaattaatgaaaaaacatagcatcctaatgactctgaaagttaaacgccaagagtgctatggggttagggattttaaaagtggagcaaaataaagactgctaaacaaatacgtgtgtcgaaacaaatttcaaacaaaaaagatgtaatattcaatttgccatgagtgacaacgttcggctgataacccacatagcccagggaaatcccttccaaatttggacgaagaagagggaaggaagaggggtcaaggcgcagaaggcagtacccaggcctgggaaatcacgaagagacacagtcgggaaagggggcctccagaacagagaacatactcacttttccaggccccacccatgtctattacccagttaggaggaatgagctcatttctgtgaacgtgagatgaccctcgaccccgtgctcctatcacacgccattagctttgccccacatcctttcaatctgctcctctaagagcggtcctgagctttggtcccagacgcacagaaggaagcggcctgaatcttacccagtcctcgacgcgcccagcatcttgactgcagagggcgaagcggccgcatctcccggcaaacgcgtgtgaagcagcggtgccgccattgggccgaactaacgcgaccgctgcgcctcaggccggatgcccagctccttccagccacagcctctgtcccggaagttgcgcgtgccagcgcaaccttcagacaatcaggggccccgtgagccaccgcacccggccaaacttaaatttttaaaagaggaacagaagtcagccagaccaacaaaagagcgactggtgttccaagcataggaaacagaggaaacagaggccaaaacctcgggactgtggaggatgtagagggagagcaggggctgcccctactctcagggagggggaaaggttgcaactttggaaactgtacaggcctatcaaaaatacaaaaatatccagcctgggtgacacggtgaaactccatctctacaaaaaacttaaaaaataaaaataataaaaattatctgggtgtgatggcacatacctgtagtcccagctactcgggaggctgaggattgcttgagcctgggagatagcaccactgcactcctgcttgggcaacagagtgagaccctgtctcgaaataaataaataaatttttttaaatgcatatgtatgggcccggcgcagtggctcatgcctgttatcccaacactttgggaggccgaggcaagtggatcacctgaggccagaagtttgagaccagcctggccaacatgacaaaaccctgtctctactaaaaatacaaaattagccagacatggtggcagtgcctgtaatcccagctacttgggaggccaaggcaggagaatagcttgaacccaggaggcagaggttgcaatgagccaagattgtgccattgcactccagcctgggtgaggagtgaaactgtgtctcaaaaaaaaaaaaaaaaaagggtgtgtgtgtgtgtgtgtgtgtgtgtgtgtgtgtgtgtttatatgtatctctctccaggagttcaagaccagcctgggcaacatatgatggtgcatacctgtagtcccagctacttgaaaactgaggagggaggatcgcttgagccctggaggtcaaggccgcagtgagctgtgattgcacccctgcactccagcctagacaacagatctagaccctatttcacaaaataaaatacagcaatttggtttttatgttttttgtgttttttttgagacagagtctcgctctgtcacccaggctggagtacagtgtcgtgatctcggctcactgcatcctctgattcccaggttcaagcgattcttgtgcctcaccctccccagtagctaggattacgggcatgcaccaccatgccctgctaatttttgtatttttagtagagacagggtttcaccatgttggccaggctggtcttgaactcttgacctcaagtgatccacccaccttggcatcccaaagtgctgggattacaggcatgagccaccacgccccgccagcagtttgttaaacataaaccatagctctgttttgcaacagtgtaaaatcagtaactgtctttcctgagtctctatttggtccttactgagttccttgggaatgttggacaggaatcatctgtgtctcaaggacagaggaaataattgcaccctagctcacaaagatacttcaatacttcaagataacggtttaaatgagaatctcttcttcacttccaaggcaaagcaaagcaaaaacaaaaagcaacaatagcaaaacagcaatttgacaattatctgttttgttttgttttggtttgagacaggatctcattgtctagcccaagttagagcgcaatggcgcgatcacagctcgttgcagcctcgggctcctacagcttatgcaatcctctcacctcagcctcccaaacccacaccaccaagcccagctaattttttgtatttttggtaaatacgaggtctcactttgttgcccaggctggtcttgaacccccggcccaagtgatcctcccaccttggcctcccaaagtgtgtctccccacctatactcccattctttcccttaaaaaaagtctgagtctgggtgcagtggctcacacctgtaatgccagagctttgggaggctgaggcaggaggataacttgaagccaggagtttgagaccagcccaggcaacacagccagactccgtctctacaaataacacttttaaaaaacttacccaggatacccaaaggactataaatcgtgctgttttaaagacacatgca

SEQ ID NO: 1886730 - DNA, 4001 bp, Homo sapiens
ttccaatataatttccagcagcctgcctgatgatggcaggattacttggatcctgcaattttttccaaagatgttccaaaaatgcctctgcgaatccctataaaaagagagggcgtcggtgtgatattttttaatgcctaagataatctgactatcaaaatcccaagatttttacttcaccaatgtagggaaaagttctactatctcataactatctcatgcgcttcatttttaaaacacgttgagagaatatcattagaaacaaaaggcacctcgggtgttaaataatccaatggatcccaaacctagctaagcatcaaaatcaacccagggccaggcacagtggctcacgcctgtaaatgtaatcccagcactttgggaggccgaggcgggtggatcacccaaggtcaggagctcgagaccagactggccaacatggagaaaccctctctctactaaaaatacaaaaattagccaggcgtggtggcaggtgcctgtaatcccagctacttgggaggttgaggcaggagaatcgcttgaacccaggaggcagaggttgcagtgagctgagatcatgccactacactccagcctgggtgacagagtgagactccatctcaaaaaacaaacaaacaaaaaacaacaaaaaattcaacctgggaggtacaaattcaataggtttgtgacagggctttggaatccacatattataaaaactcttcaagtgattccaatgtcagccagaactggtgaccaacaataattcacatcccatggagctccacatgggcactcctgtgagtgcaaagcaccttccggtctctggacacactgaactcaaccatgaacagaaatacggactaacgtacagctggtatttgagttaattatgccaatcatggaaaaaaacagacacagcttctcaccaaagggtgtaacttccaacttctcctaaatagcgctgttctaaagctaggcacgcccatgtgggcagactgaattcaaccttctttcccatgaccaacactctcctgacctctaggaagccacaaaatcgttgcagagaaggaaaagccttctatattgtttcccccaccaaaaaaaaaaaaaaaaaagaagaagaagaagaagaagaaaagacaaagcctaaagtttttaaaatcccggtgctttccgggaagcgttcgggagaaaagtgtgtggccgcactagtggagatccccgccgacaggacccgcctctctccccaggcccggcggggccgaccccgcttctcgctcccagcataccgtgcgatagcggcggcgcggccagcggagccgggaggcgggttagcagtggccttgtgagcgtgaggagctgccgccaccgcctgctcctcgtcgtcctcgtcctccgcggccccggcgacgtgggccgcgcacggccctggaagagacgtcgcctccccttcatccacctctctctcaccgcgccgctcccgcctcctcgtcctgtgctgcgggctcaggcggaacccggaacggtcgtcctcttcccccgcccgccgccgcctcctccttctcctccttctcggcttcctcctcagccccgggccggagcggggtgttggcggcggccggttcgggcggcgactcgcgcttctctgggcggcggcgcttggccatgtcgtgtcggggaaggtaatgagccgcagagccccggggtctcggctgagcggcggcggcggcaccaacggcaccaactattcgcggagctggaatgactggcaacccaggtgggtgaccggcccgggaccccgccccgacctcccgggctccgcctcgggcgggccgaggcctaggccctccacccccgggagccgggcgcagcttcctgggtctcctccgccccggctgggggaggaaggccgcggggaggcgaggcctaagtgcctctcccctccctgcttgttcagcccggggctgaagccgagacccggggctcccggcggtggcactggcctagggtcgggaccaggaggtgagaaagaggcgggggtgggggggcggggggcattccacttaccgcttccccctgaccccgagttgggagatcctgagagtccaggaccctccctgttactcattcactttctcggttccccagtctttcagccgccacgtgagagctcttctaacctctgttcctttctgtgacccccacgtggtaatattgaaaaaaccaaaacaaaactccagctaaggcattgctctgactttaggcagaacattcattagtggagcgtgagatgagattgtgtgactgttgatgggatcgacctactctggtcttgggcgatggaagttttccctaagtgcaaggccggttactctggtgaatcgtaattcatacctggacacttgagtgaactctgggcacccacttagaagtctagagaatttcctcttttatggaggatttgatgtcagaccgttttggggcttagttagatttgaatatattaggaacattaactttttaaataaatgtaatttcctgtctttttgatcaatggggggagggcagctgtgcctaatttaggattgatttattctaacctctcttactaaataaatgcttgtattcagagtctgtttggaatttaacccaatgcttagaactccttaaatatacagaaatatattttaggggtaattgattcatggaactctcctactttggagcacaattgtattataattgtccggaaactggccagataatgtagaacgcacaagttgttgagaagcccttttgtttcctgatagttacatgtaattccagcagtatttggaaataatttgctaagatgttagaatgtaacatttgaagacttgttagaaaaatcaataaaattatctttggctaatgggtagtacacatcttagtctgtttaatatgcctttccaaaaaaaactgtgtctgttgagaattggtgtatataactacatgactttaataattagtgcctgagtctagaattgagatgtttagtcgtaaaaaaaaatattgttcgataaacagcgttgacttgtcttgtaccacttaagagtttgtgagtgctttaaataaaattagttgattaagtatttttttcctatgattgacatgcttagttttgcctttttattgaaatgtgtaaaatttggttttctggcatcttaacaaattaggtggtaaatgaatgacaatggattttctattatttttcagtattgtgatcagtataagtatataagagaatttagtaaccttttagaagaataaagtgcccttcccaaatagtcctacagcttttggaaaagtgtaaattgtagtttgtagttctaaataaatagagaagagtcgcagccacgtgctagggccagctgacttcattgctgacaggtatgaagccaaatggcttatgtagttatggaatatgtacatgagctattaataaatattatccatgttgtttctttcaagtgctttatttcttggctctggggaggggcgatgggggaagggaggagcttacaagaaagcttgcaaggtttctttgaagctgtgctttttgtaggaaagtttcaggatgtaacgccttggtagacgatactgtgatacatttggttacaggcagtaacagtttgttaggatgttggaaaaatttgattttctcctgttgtagagggaacagggaagtgtggacataccccatagcataacttgatttgttgctaagattgtcatagctgatttgttagtcaataaaaatacctggggtgtttgccaagtcataaatttttattagttaaatttgaggtgattctgtcccctattcagaaagatgacagactccaggtaactgacggaacagatcttgatcttgcttcttgcttaaatgaaggtttagaacatcttcagatgcaggcacatttattattgttcatctgaataattttggtgaaaattttttt

SEQ ID NO: 1886731 - DNA, 4001 bp, Homo sapiens
tccagtcctcagcagctggtggtggtggtggtggggagggggggagtttctagtagcctgaggtagtgttggagacagttgcccccgtagtgggcaacctcagtacgtcgctccacctgtctgtgccccagcgtccttggggacagtaatagtaggacctacctagagagccaagtgtgctgggcaggtcccatccccagcccggctatgcctggcctgtccttgccttgtggagctgcctatgccccctctagtccctgcttccccaaattcactgtgcggcctgaacatctcctccaggctcccccctcgagactgggatgccatcacgtggccccaggcctggtgctcaggacaggaaaagatttctcaagtgggagccagctgggaaaagggggcagtccctgaggctggccaagggctgctcacctttgaacaagggacagatgttccagacattgatgctgccggccttcatgaactggcccagcgagatctccaagaagaaaatggggattcctccgaccagggctatcaggatgcagggaataaggaacacacctgggggtggaggcacagggtggactcagggtggcccccagccaggctgcccaggcccagcgggccagcccagactccaaaggccccatcacaacttcccactgggtgagtcagtgtaggggtggccactgactcgggccccacgtagggtcttgaggggctgggttcagtgtgttgaagaggtgctacagtagcccctgggccattgaagtcctattccctgggtggcagagaggcgctaggcccacagggcttccacccccacggtcacttggggtgatggccatggaggacacgcacgctcagacacgcagcctgtccctagtgccgcaattccctgtttcaggcagcacagtgagggcatgtgcgtgtgtgcatgtgcgccaaggctgggtgatcaggcctgaggggctcatccaaaggcagggagcgcgactgtcctgcacttggacgcttgcctgcaagtgtgaggtccaaggcagagggcgggtgggtcacagtcccctgctggtgggatggccacgtgcaaggacagagggatacaggtgcgggaagaggggccaggccggccttagcaagcccagggagtcaggctctacaggagataggcagggcatggcacaggccctggccagcaggctggggtgggggtggcaaaagggcagggagagctgggtgccactacccccttctcctctctgggcctcctacccttgccctggctgggctcgctccactactcagaggccgagcttggctgcaacttgcctgactccaggtcccagcatccttctcctaactttgggcaaaggcctttgctctggacctctgtttcccacccatcactgggtcacttcggcttccagaaaccccagtgctgttttgtagtcacaggacacacgcgtgcccatcgctcttgctaagctgggcccagacaggcgggcgggcatgggacgtgcatgcagtgtttccagtggcggcgccaggcgggccaggccacaggcttcccaagcctggctcaggtacccagtgttccagccccgggccagaggggaggagcgggagggctgcgaggggaggggagggcagggagaggaacagagtggcccattgtgtgtgtgtgtgttcgtgtgtgtgcacacgtggggggcccacacaatgtgccgcttgtgtgcccgacccgcaggggcagccagggctccttacctcgaggagaccccaaggcgcaggcctgctttcccacctcggcggccaatcgctccttccagcccaggagtctggggggcagcctcgcgggcatcgccggcccccgcccctcaccctgccaggcacatgactgcgagaggggtggaggcggacggcccagccaccgagcagcagcggtggaccaggggcggccccgaccccgcgtgcccaggggccaaccgctgcccggacttcacccctccgcggcggctccgggggttgggggtcgggcgtcaggggccggcggcctgctgggggagggggccgcggggggcgggggagctcacctccgccattcttgtagcacaggtaggggaagcgccacacgttgcccaggcccacggcgaagcccacacacgacatgatgaagtccatctggcgcgtccaggtctatcgcgcgcggcggcacggccaggccgccgccgggtgtccccaggcccgcggggccgtcgcccttggcccgggccccgtcgggcccgggcgcgatgagggggcccttcttctggtcgccggacacgctacagatgccgttctcggcgctcttcttcgccatggcccctgcgggcctcacggccgggctggggtcgcggcaccctgcggggggctgcggtcaggcgcggggcaccggcggcaccggggagggccccgagggcgcgggccggccgggggccggggggcggccgggccgggggacggggcggcgggagagcggcggggtgcgggtcacaggcggcgcagtcagaagcagtccacgaagcacttgaaagtgagcctgaagaatctcctgtgtgtcaggggcccgggggcgcgcgggcgtcggcggggcccggccaggcgtccgcggcagcggttccggaggctcttgcccgcggctcgggcggtggcggctgccacggctcctcggccgacccgaggctcagcctagcggggcgcgggcgatatcggcgctcgcagtctgcaagcggcggctggagcaggggcctgtggcccgcgcccccggccccgaccggggcccgcggcggctgcccggctcacccgagactccggtggcggcggcggcggctcaggcgcgcctcgccctctccttctgggcggcggcggctgcagccgctctcggggccgcggcgggctcagcgactcgccaccgcgttccgactgttcctctcttcccggttcccggccggcagccgcttaaaaaccgactccggggtgatgtcactatcgccccacccccacggctggccggcccccctctccctcccgccctgctcgtcacagtccgcccaccttgtccctgccctcctcccggggaggagtcgccgctccagcgggaggcaggatggttgctacctggggcggccgccagctcctcccgcagtgctccgggccgcccctcaccccagggtcgcccgctcctagtgtggcccaggcttcccggcctgcccctcccagccctaggaagacgtcccccgggccccctcagccctccgcctccccttctctccctttctccccgctcctggcaggctgcagccgtctcctcccggtgctcgctccttccttgagctctgtccaccgctgcccactgggggctagagcttcccggctaccctggaagctggaggctgggaccagctcttcaggtgacaggcctctgtgtctccacagtggccagaggggagcctgcctgactgatgagcaaggctccactttgtcaccaaggcagagaaggggcccgggtaaatgaccccggtggcccccacccctgcctggcatgagagtgggtaggggcttcggacttgaggggactggagcgggaataaggcaaggctgccccctggtgcctggcgggtgcacagacccttccccaaaggcctcaggtctgaggtcctggctgcccgccccccacccaccccgtgttcctctccccaggacccccaggcctacccagcaagagccagcttgttgggctgcctctccgccaccagctgagcagcttggttagaattttctagggcaagagtagcctgggggtggggtggggaaggaagtggtcattctcctggcctgggaggtaaagtgtgcccccctcaacttcaagctccctgatctgatcgtggacactgcagtccccagatggctcatcccgttaagctaagccctcggccatccctccagctttaggaagaaaagca

SEQ ID NO: 1886732 - DNA, 4001 bp, Homo sapiens
cacagagccctgctgagtcttgccctcggggcattctcacatttatgaagaaatgcctccccctcccccttctccccaaagtacggtgtggcagaaaacagcgccaacaggtcctgccagtcagaagccactcccctgatttcatggctcaagaccccaactgtaaattagcccttcccaccttgaatatgtacacacactactgagatccaggccgatccttgccatgggatgaacctgagaattgccaagacccgccttcccacgccacccaaccaaatcatgtggtatctggtacaagtgattttccccctgaaatcccacaagaaaactattttgaggccgggcacggcggctcacgcctgtaatcccagcactttgggaggccgagccgggcggatcacaaggtcaggagatcgagaccatcctggctaacacggtgaaaccccatctctactaaaaatataaaaaaaattagccgggcgtagtggcgggcgcctgtagccccagctactcggaaggctgaggcaggagaatggcgtgaacccgggaggcggggcttgcagtgagccgagatcgcgccactgcactccagccagggcgacagagcaagactccatctcaaaaaaaaaaaaaaaagaaaagaaaagaaaactattttgaaaagcagttctctctggcctggtgaagaacacaccagcaccatgcccaccaaaacaggagccccatggctgtttcccagagtaacctgggacccgcacgtccattcactgcaacacagactgaatctgcagccaagctccgctctctcactactgggcaaccctcaggggggatcccttagcctaaaccagcaccagtcactacccgcacacgattttattactactgttttcttatgagtcagcccgtgtcactgattcctgacgagctggtgtggagagcagaaatgaataattttcttttcaactgcaatttccttttcaacaaccagtcagcaatcggagctttaacaataaaccggttgctcagttactccacgtgggtgccacgcaagaggctgggagtattgctcagcggggccaacgggaggctggcacttgcctgaaccgcttaagtgggggaatgaaatgcccaccgaagggcagggcagggaccctgctgtcccgtcactgaagatattcccagcccgtggggagaagtgtaaacgaatgaatgaaagaaacgcacgtggtttctgggaccaatgaccttagcctagaactgccgggacggtccaggaacgcaaaaatgtagagatgtgggagccaggggcgtagtgatgcaaggatgcagggacccagggaccacgacctcccaacccccggcccgcgccccgtactcacgcacgcagtggcaggccatgagcttggctgcctcctcgggcaccgggcagctggggaagagcggcttgagcaggtaggtggcgaagaccagggccacgatgtactgcgatgaaggccggatgacgagcagctcgatccagagcttgaggaaggcgggcagcgagccgtagacgtccagcatgtaggcgtagtcgccgcccgatttggagatggtggtgcccagctccgcgtagcagagcgcgcccacgatggagaagacgccgcacgcggcccacatcaccagcgccagccccggcgagcctgcctccttaagcacgcccgtgggcgtcacgaagatgcccgagccgatgatggcgcccacgatgatggccacgccgttgagtagcgtgatgttccgctgcagggtcacgccctcgccctcgcctgccggcgccgcgccgtccgcgcgcttggaggccagcatcttctcccgcgcctcttccttctcctcggccaccggggccgctagcgcccgccgcttcgggcccgcacccgccatgctctgcttaccggccgggcctgggacacccgagagccgcagccgagcgaggattgtgcgcgccgctcgccgcccgcagctgcgtcaagaaccccgcccgcgccgccttttaggccccggcccgctggccccgcccaccgtccgcggctcctccccgccccgtggcccggccgcggctctcagccccgccccctcgacccagctcggagcacgtgcgtcctccggcctagcctggcaggcgattcccaggcccgcgtggtcctcgaaggcccccgtcctcctgcgccatggagaccccggcctcgcgacctacccccccggcgcccgcgtcatcccaccccgtcctcccgggtgcgcctgggcggggcctggcagtcagggcgagccccttcacccactggcccgcagcctctcgtcaagcctgggagcgggcagtgcaccagggctggcctgaggccaaggatggggtttggggtaccccccgaagggaacctaggctcctgtcccggatgggcctaggggatggaaccgcccccacaaccagctcctggggcacgggggagggatgagaggatgacctgaggggaagctcctgcagcctccttccagcctgggggctgcatcaatgtggctggtgagccgcgaactgagacgagggaagaaccgaaccgaggccacccagtaattcccattgtatcccaaaagaatcttgccaaagatggcgatccggtgcccgtagctttgagaagcagtaataacacaggctttgggaagccagcaatctgcctgagctcaatttaatcaacagaaccgggggttcaccgggagccataagacccccacccccaaatctagctggggaattcaaaggcaggcttcagtgtgaaggggctttaaagcttgttattcctggggaatgcgagaggcatcttagctaaaaagggttgagaggtaatttcagttagaggcgagagcaggatgccaaggctcctaggcctggaaacgggaaggaatataaatactgccccgagattgaccagactggtgagcagccaaagacctcttcaaagggtgtgtgtgggtcagggaggaagctcctcggtatcacccccacccggggttccttggcgtgtgtcctaacgagtccttggaagctcacagcaggcatgtggggaggcctttgttctgggtgagcgttcagcctcccagggcaaacacgcaaacaccggttgcagagctgggtgttcacagcaagacagtctgctgggcagatgcctctggaatccacagaatcctgaacaatagccgtggtggagggggggtcagaatccctgtcatgctgggacctctagctgcagccaggaatgtccaggccccaccccggggaggaggcggctgaggaatgccacggcttgtcattctggaccttgctcgccccccggtatggcgggcattcctctgcagtgataaaaccaagcgaaatctcagcagcccaggcagccaccggcaggggagtgcggaggtcacacagatactaacttgtaatctgccgtccacgctgctggctgtggaaggtgcagagagccctccatccgccctattcttcccgctgtgcctgcagagggaaggagacagtaccaccatggctgggcaaactcaccgagtgctcactgagtcctcccctagatagcttcttgtgcaatagggtaggtgccagttaggagcaaggttagagattgtagggccagattttttgcttaggttcaactacgcaaaataaaaatagactttgcatgcatttcaggcactgggctgacgaccggccaccagggaggctccgccccacttcttagctttggccccaacgttagtcttgttgctgctctcaggcgtgctctgcgtgtgaaagatgacttggaggctgggcgcggtggctcacgcctgtaatgccagccctttgggagaccaaggtgggaaaatctcttgagcccaggagttcaagaccagcctgggcaacatagggagaccccgtctctacaaaaaatacaaaaactagcccagcgtggtggtggtgcacc

SEQ ID NO: 1886733 - DNA, 4001 bp, Homo sapiens
ccacacagagccctgctgagtcttgccctcggggcattctcacatttatgaagaaatgcctccccctcccccttctccccaaagtacggtgtggcagaaaacagcgccaacaggtcctgccagtcagaagccactcccctgatttcatggctcaagaccccaactataaattaacccttcccaccttgaatgtgtacacacactactgagatccaggccgatccttgccatgggatgaacctgagaattgccaagacccgccttcccacgccacccaaccaaatcatgtggtatctggtacaagtcattttccccctgaaatcccacaagaaaactattttgaggccgggcacggcggctcacgcctgtaatcccagcactttgggaggccgaggcgggcggatcacaaggtcaggagatcgagaccatcctggctaacacggtgaaaccccgtctctactaaaaatacaaaaaaaattagccgggcgtagtggcgggcgcctgtagccccagctactcggaaggctgaggcaggagaatggcgtgaacccgggaggcggggcttgcagtgagccgagatcgcgccactgcactccagccagggcgacagagtgagactccatctcaaaaaaaaaaagaaaagaaaagaaaactattttgaaaagcagttctctctggcctggtgaagaacacaccagcaccatgcccaccaaaataggagccccatggctgtttcccagagtaacctgggacccgaacctccattcactgtaacacagactgaatctgcagccaagctccgctctctcactactgggcaaccctcaggggggatcccttagcctaaaccagcaccagtcactacccgcacacgattttattactactgttttcttatgagtcagcccgtgtcactgattcctgacgagctggtgtggagagcagaaatgaataattttctttttaactgcaatttcgttttcaccaaccagtcagcaatcggagctttaacaataaaccggttgctcagttactccacgtgggtgccacgcaagaggctgggagtattgctcagcggggccaacgggaggctggcacttgcctgaaccgcttaagtgggggaatgaaatgcccaccgaagggcagggcagggaccctgctgtcccgtcactgaagatattcccagcctgtggggagaagtgtaaaagaatgaatgaaagaaacgcacttggtttctgggaccaatgaccttagcctagaactgccgggacggtccaggaacgcaaaaatgtagagatgtgggagccaggggcgtagtgatgcaaggatgcagggacccagggactacgacctcccaacccccggcccgcgccccgtactcacgcacggagtggcaggctacgagcttggctgcctcctcgggcaccgggcaggtggggaagagcggcttgagcaggtaggtggcgaagaccagggccacgatgtactgcgatgaaggccggatgatgagcagctcgatccagagcttgaggaaggcgggcagcgagccgtagacgtccagcatgtaggcgtagtcgccgcccgatttggagatggtggtgcccagctccgcgtagcagagcgcgcccacgatggagaagacgccgcacgcggcccacaccaccagcgccagccccggcgagcctgcctccttgagcacgcccgtgggcgtcacgaagatgcccgagctcatgatggcgaccacgatgacggccacgcccttgagtagcgtgatgttcccctgcagggtcacgccctcgccctcgcctgccggcgccgcgccgtccgcgcgcttggcggccatcatcttctcccgcgcctcttccttctcctcggccaccggggccgctagcgcgcgccgcttcgggcccgcacccgccatgctctgcttaccggccgggcctgggacacccgggagccgcagccgagcgaggattgtgcgcgccgctcgccgcccgccgcccgcagctgcgtcaggaaccccgcccgcgccgccttttaggccccggcccactggccccgcccaccgtccgcggctcctccccgacccgtggcccggccgcggccctcagccccgccccctcgacccagctcggagcacgtgcgtcgtccggcctagcctggcaggcgattcccaggcccgcgtggtcctcgaaggcccccgtactcctgcgccatggagaccccggcctcgcgacctacccccccggcgcccgcgtcatcccagcccgtcctcccgggtgcgcctgggcggggcctggcagtcagggcgagccccttcacccactggcccgcagcctctcgtcaagcctgggagcgggcagtgcaccagggctggcctgaggccaaggatggggtttggggtaccccccgaagggaacctaggctcctgtcccggatgggccgaggggatggaaccgcccccacaaccagctcctggggcacgggggagggatgagaagatgacctgaggggaagctcctgcagcctccttccagcctgggggctgcatcaatgtggctggtgagccgcgaactgagacgagggaagaaccgaaccgaggccacccagtaattcccattgtatcccaaaagaatcttgccaaagatggcgatccggtgcccgtagctttgagaagcagtaataacacaggctttgggaagccagcactctgcctgagctcaatttaatcaacagaaccgggggttcaccgggagccataagacccccacccccaaatctagctgggaaattcaaaggcaggcttcagtgtgaaggggctttaaagcttgttattcctggggaatgcgagaggcatcttagctaaaaagggttgagaggtaatttcagttagaggcgagagcaggatgccaaggctcctaggcctggaaacgggaaggaatataaatactgccccgagattgaccagactggtgagcagccaaagacctgttcaaagggtgtgtgtgggtcagggaggaagctcctcggtatccccccaacccggggttccttggcgtgtgtcctaacgagtacttggaagctcacagcaggcatgtggggaggcctttgttctgggtgagcgttcagcctcccagggcaaacacgcaaacaccggttgcagagctgggtgttcacagcaagacagtctgctgggcagatgcctctggaatccacagaattctgaacaatagccgtggtggagggggggtcagaatccctgtcgtgctgggacctctagctgcagccaggaatgtccaggccccaccccggggaggaggcggctgaggaatgccacggcttgtcattctggaccttgctcgccccccggtatggcaggcattcctctgcagtgataaaaccaagcgaaatctcagcagcccaggcagccaccggcaggggagtgcggaggtcgcacagatactaacttgtaatctgccgtccacgctgcgggctgtggaaggtgcagagagccctccatccaccctattcttcccgctgtgcctgcagagggaaggagacagtaccaccatggctggacaaactcaccgagtgctcactgagtcctcccctagatagcttcttgtgcaatagggtaggtgccagttaggagcaaggttagagattatagggccagattttttgcttaggttcaactacgcaaaataaaaatagactttgcatgcatttcaggcactgggctgacgaccggccaccagggaggctccgccccacttcttagctttggccccaacgttagtcttgttgctgctctcaggcgtgctctgcgtgtgaaagatgacttggaggctgggcgcggtggctcacgcctgtaatgccagccctttgggagaccaaggtgggaaaatctcttgagcccaggagttcaagaccagcctgggcaacatagggagaccccgtctctacaaaaaatacaaaaactagcccagcgtggtggtggt

SEQ ID NO: 1886734 - DNA, 4001 bp, Homo sapiens
cgtgtaatcccagctactctggaggctgaggaaggagaattgcttgaaaccaggaggcagaggttgcagtgagctgagatcgcgccactacactccagcctgagcgacagagtaagactctgtctcaaaaaaaaaataaataaataaataaaaagaaaatttctgggccatcggctcagtgcaggactttgttctacagcagtgataagtgctgccctctgatagtgcagtgtggcagttggggtgggagaggctaatgagatcaagaaaacacgtagcatgccagacaatagtaagtgttaagggaaagggggtgcagaaaagtgcacacaagaatgagctgcagttcattacattgttttagagacagggtcatgtccaggcatggtggctcacgcctataatcccagcactctgggaggccgaggcgggcagatcacttgaggtcaggagtttgagaccagcctgcccaacatggcgaaccccatccctactaaaaacacaaacattcggcaggtgtggtggcacacttgggaggttgagataggagaatcgcttgaacccaggaggcggagcttccagtgagctgagatcactgcactccagcctccgcaacagagcaagactctgtctaaaaaaaaaaaaagggccgggcgcggtggctcatgcctgtaatcccagcactttgggaggctgaggcgggcggatcacgaggctaggacatcgagaccatcctggctaacacggtgaaaccccgtctctactaaaaatacaaaaaattaaccaggcgtggtggcgggcgcctgtagtcccagctactcgggaggctgaggcaggagaatggcgtgaacccaggaggcggagcttgcagtgagcagagatcgcgccactgcactctagcctgggcgacagagctagactccatctcaaaaaaaaaaaaaaaaaaaagagggtcatgctctgtcgaccacactggagtgcagcggagtactgatggcctagggaagaaccttttctttgaaggggaaatggtgaaggccctgagcagggcctgctttgctcaggaatggccgtaagtcctatagcatcagcatcttagagatggggatagggtggccaaagcgtgtcagtgggtttccctcaagaaagagctggatccgaagtcgtctggactctagagccatccattcctcggggggacctcacctggatggtctgggcgcacagggagcagcaggcccctggatccccctggtctggctcaggctccgcgtcatcaaagggacctgcgcggcgccttggggccggggcctggggcggtggaggcccgaaggccagaggcacgtgcggcggcggcgggaggcagaggtcctggcggaggtctgggcgcacccagcgcagcgtgagcgggaggcgagcccagggcggtgcgcgcagcatgtgcgccagcacgcgcaggtggaaagcgaaggctgtctctcctcgcaggcgaggccccacgtgcgccaggcggcgcgaggcgtgcgggtgctgccaagcccactcaaactgcgggcggcgtacaggggcatcagggcggctcggagcgaggggcggaacccaagccctcacccggccgccgctgcccggtctccttccttacccgaagggcggccacggaggacgggaagccgtgcacgacgagcaccatctccctgaggaggagaaccgtgatgtccctgtcgcagcccagcgcctcagccgcgggtcccctccaatcccacccgagagcggggtcctcattcccggcttcagccgagaagtgcagccctctgcacctgcccacctcaggccctgcctccagcccaggtacccacctgtcccacctcctctctctcctgcattccacccgaccccagcgtgcccaccaagagccctatgctggaacccagcctggatcatcacccccgccccagctagctccttccctgagttccgccgcggagatgccccgggcaccgcctccccgtcacgctcctcccctgcgacaggccccgtccccaccacagacgccccgcctctgtcacagtcctggccggtccttctcaacaggcctgtgccccgcggggtccgcctcctctgggacgccttcctcccggcacagaaggcctccccctctcaccagggccctcgcccgctggtccgccaggccccgccttttttgcggcccccattgtgctgctggacccgacgagcagtgttgacagtgaaccccacgtagacgcggccccggtaccgggggttcaggcagtagagcaggtagacgccgaaaaagcgccctggcctcgccgcgacccccgcgggacccatcgggccttggggttcgggaaccacagcagggggttgattgccgtgacctagggtccaggggagggctggatcgctagggctgcagggtgcttgcttcggaacaagctctcggggactatccggaggcagcctgcaggaagccgtagcgccggtacgtgcccctctcctgtctggaggcgggtgtagaagtccgaccgcggaagccagactgctgtccagtcggcgagcgcgtaccattcagcatcggctccgcccgagtcccaccttcctcaggctctgattggctgacacatggcaagcgcgaaaagcctggaccgctggaaagcccggctgcttgagggcggaagtactgcgttgacgtacgccttagtaagggcggaagtgagttttccagcggaagtggctcctgtaaggcagcaaggtagcgtggccggcgcccgagctggggttgtgtccctgctgggctgccgttccagctggactgccgccatggaactcagcgccgaatacctccgcgagaagctgcagcgggacctggaggcggagcatgtggtgagttgagccgccggacaaggggaaaagagctcggggggcgggttcggcaccattcatattcttccgctcggtaggaggtggaggacacgaccctcaaccgttgctcctgtagcttccgagtcctggtggtgtcggccaagttcgaggggaaaccgctgcttcagagacacaggtaaggccctgggagcaccttgcctagctcctgtaccacaaccccagccactccccctacccctgcaacctgactcccgcactccccctggcgtggctcagggaccttgaggatcccgccttcgtgacccctgcttcgagtatttcgatgtagaccctctctccaagtacgtgttcccacggcctggggactacaaccttggggacaccagtctcttgggtcaccctagcctcggggtgtgcgatcaccgctggccttttcctaaccccatctctcgccccaggctggtgaacgcgtgcctagcagaagagctcccgcacatccatgcctttgaacagaaaaccctgaccccagaccagtgggcacgtgagcgacagaaatgagggactgggatctgcacagccattaaattataaatctggaccagcttctgtgtcgatgtgtgtgtgggaggggtgctgaggccgagtctaggacctggcctctccctgccctgcctccgtccattgttttaccttggacacgtctctgtccccatctaggcctctatccctgcttgtaaaatgaaagttctaccgtaaaagtcccttccagggtctaccgagaaagccttctctctgcaactccgtttagacatctaggagtctgtactgccaccacctacccacctcctagagagctcagggttcctcctctctgctagccttcaagatgcagagatgagaaagtgatcggggtttcagggccctgaccagttgaacaaacctctccctgacattaccgcagtatcagaggcaccatatagaattccacatattccttgcaggttccccccggccttctcaggcccaagagggagtggtgcccaggtaggggctcatcaactcctggaatgctgatgttttcagacccactggagaaggtt

SEQ ID NO: 1886735 - DNA, 4001 bp, Homo sapiens
cgtgtaatcccagctactctggaggctgaggaaggagaattgcttgaaaccaggaggcagaggttgcagtgagctgagatcgcgccactacactccagcctgagcgacagagtaagactctgtctcaaaaaaaaaataaataaataaataaaaagaaaatttctgggccatcggctcagtgcaggactttgttctacagcagtgataagtgctgccctctgatagtgcagtgtggcagttggggtgggagaggctaatgagatcaagaaaacacgtagcatgccagacaatagtaagtgttaagggaaagggggtgcagaaaagtgcacacaagaatgagctgcagttcattacattgttttagagacagggtcatgtccaggcatggtggctcacgcctataatcccagcactctgggaggccgaggcgggcagatcacttgaggtcaggagtttgagaccagcctgcccaacatggcgaaccccatccctactaaaaacacaaacattcggcaggtgtggtggcacacttgggaggttgagataggagaatcgcttgaacccaggaggcggagcttccagtgagctgagatcactgcactccagcctccgcaacagagcaagactctgtctaaaaaaaaaaaaagggccgggcgcggtggctcatgcctgtaatcccagcactttgggaggctgaggcgggcggatcacgaggctaggacatcgagaccatcctggctaacacggtgaaaccccgtctctactaaaaatacaaaaaattaaccaggcgtggtggcgggcgcctgtagtcccagctactcgggaggctgaggcaggagaatggcgtgaacccaggaggcggagcttgcagtgagcagagatcgcgccactgcactctagcctgggcgacagagctagactccatctcaaaaaaaaaaaaaaaaaaaagagggtcatgctctgtcgaccacactggagtgcagcggagtactgatggcctagggaagaaccttttctttgaaggggaaatggtgaaggccctgagcagggcctgctttgctcaggaatggccgtaagtcctatagcatcagcatcttagagatggggatagggtggccaaagcgtgtcagtgggtttccctcaagaaagagctggatccgaagtcgtctggactctagagccatccattcctcggggggacctcacctggatggtctgggcgcacagggagcagcaggcccctggatccccctggtctggctcaggctccgcgtcatcaaagggacctgcgcggcgccttggggccggggcctggggcggtggaggcccgaaggccagaggcacgtgcggcggcggcgggaggcagaggtcctggcggaggtctgggcgcacccagcgcagcgtgagcgggaggcgagcccagggcggtgcgcgcagcatgtgcgccagcacgcgcaggtggaaagcgaaggctgtctctcctcgcaggcgaggccccacgtgcgccaggcggcgcgaggcgtgcgggtgctgccaagcccactcaaactgcgggcggcgtacaggggcatcagggcggctcggagcgaggggcggaacccaagccctcacccggccgccgctgcccggtctccttccttacccgaagggcggccacggaggacgggaagccgtgcacgacgagcaccatctccctgaggaggagaacggtgatgtccctgtcgcagcccagcgcctcagccgcgggtcccctccaatcccacccgagagcggggtcctcattcccggcttcagccgagaagtgcagccctctgcacctgcccacctcaggccctgcctccagcccaggtacccacctgtcccacctcctctctctcctgcattccacccgaccccagcgtgcccaccaagagccctatgctggaacccagcctggatcatcacccccgccccagctagctccttccctgagttccgccgcggagatgccccgggcaccgcctccccgtcacgctcctcccctgcgacaggccccgtccccaccacagacgccccgcctctgtcacagtcctggccggtccttctcaacaggcctgtgccccgcggggtccgcctcctctgggacgccttcctcccggcacagaaggcctccccctctcaccagggccctcgcccgctggtccgccaggccccgccttttttgcggcccccattgtgctgctggacccgacgagcagtgttgacagtgaaccccacgtagacgcggccccggtaccgggggttcaggcagtagagcaggtagacgccgaaaaagcgccctggcctcgccgcgacccccgcgggacccatcgggccttggggttcgggaaccacagcagggggttgattgccgtgacctagggtccaggggagggctggatcgctagggctgcagggtgcttgcttcggaacaagctctcggggactatccggaggcagcctgcaggaagccgtagcgccggtacgtgcccctctcctgtctggaggcgggtgtagaagtccgaccgcggaagccagactgctgtccagtcggcgagcgcgtaccattcagcatcggctccgcccgagtcccaccttcctcaggctctgattggctgacacatggcaagcgcgaaaagcctggaccgctggaaagcccggctgcttgagggcggaagtactgcgttgacgtacgccttagtaagggcggaagtgagttttccagcggaagtggctcctgtaaggcagcaaggtagcgtggccggcgcccgagctggggttgtgtccctgctgggctgccgttccagctggactgccgccatggaactcagcgccgaatacctccgcgagaagctgcagcgggacctggaggcggagcatgtggtgagttgagccgccggacaaggggaaaagagctcggggggcgggttcggcaccattcatattcttccgctcggtaggaggtggaggacacgaccctcaaccgttgctcctgtagcttccgagtcctggtggtgtcggccaagttcgaggggaaaccgctgcttcagagacacaggtaaggccctgggagcaccttgcctagctcctgtaccacaaccccagccactccccctacccctgcaacctgactcccgcactccccctggcgtggctcagggaccttgaggatcccgccttcgtgacccctgcttcgagtatttcgatgtagaccctctctccaagtacgtgttcccacggcctggggactacaaccttggggacaccagtctcttgggtcaccctagcctcggggtgtgcgatcaccgctggccttttcctaaccccatctctcgccccaggctggtgaacgcgtgcctagcagaagagctcccgcacatccatgcctttgaacagaaaaccctgaccccagaccagtgggcacgtgagcgacagaaatgagggactgggatctgcacagccattaaattataaatctggaccagcttctgtgtcgatgtgtgtgtgggaggggtgctgaggccgagtctaggacctggcctctccctgccctgcctccgtccattgttttaccttggacacgtctctgtccccatctaggcctctatccctgcttgtaaaatgaaagttctaccgtaaaagtcccttccagggtctaccgagaaagccttctctctgcaactccgtttagacatctaggagtctgtactgccaccacctacccacctcctagagagctcagggttcctcctctctgctagccttcaagatgcagagatgagaaagtgatcggggtttcagggccctgaccagttgaacaaacctctccctgacattaccgcagtatcagaggcaccatatagaattccacatattccttgcaggttccccccggccttctcaggcccaagagggagtggtgcccaggtaggggctcatcaactcctggaatgctgatgttttcagacccactggagaaggtt

SEQ ID NO: 1886736 - DNA, 4001 bp, Homo sapiens; identical to SEQ ID NO: 1886734

SEQ ID NO: 1886737 - DNA, 4001 bp, Homo sapiens; identical to SEQ ID NO: 1886735

SEQ ID NO: 1886738 - DNA, 4001 bp, Homo sapiens
ttactaaattctcttatatacttatactgatcacaatactgaaaaataatagaaaatccattgtcattcatttaccacctaatttgttaagatgccagaaaaccaaattttacacatttcaataaaaaggcaaaactaagcatgtcaatcataggaaaaaaatacttaatcaactaattttatttaaagcactcacaaactcttaagtggtacaagacaagtcaacgctgtttatcgaacaatatttttttttacgactaaacatctcaattctagactcaggcactaattattaaagtcatgtagttatatacaccaattctcaacagacacagttttttttggaaaggcatattaaacagactaagatgtgtactacccattagccaaagataattttattgatttttctaacaagtcttcaaatgttacattctaacatcttagcaaattatttccaaatactgctggaattacatgtaactatcaggaaacaaaagggcttctcaacaacttgtgcgttctacattatctggccagtttccggacaattataatacaattgtgctccaaagtaggagagttccatgaatcaattacccctaaaatatatttctgtatatttaaggagttctaagcattgggttaaattccaaacagactctgaatacaagcatttatttagtaagagaggttagaataaatcaatcctaaattaggcacagctgccctccccccattgatcaaaaagacaggaaattacatttatttaaaaagttaatgttcctaatatattcaaatctaactaagccccaaaacggtctgacatcaaatcctccataaaagaggaaattctctagacttctaagtgggtgcccagagttcactcaagtgtccaggtatgaattacgattcaccagagtaaccggccttgcacttagggaaaacttccatcgcccaagaccagagtaggtcgatcccatcaacagtcacacaatctcatctcacgctccactaatgaatgttctgcctaaagtcagagcaatgccttagctggagttttgttttggttttttcaatattaccacgtgggggtcacagaaaggaacagaggttagaagagctctcacgtggcggctgaaagactggggaaccgagaaagtgaatgagtaacagggagggtcctggactctcaggatctcccaactcggggtcagggggaagcggtaagtggaatgccccccgcccccccacccccgcctctttctcacctcctggtcccgaccctaggccagtgccaccgccgggagccccgggtctcggcttcagccccgggctgaacaagcagggaggggagaggcacttaggcctcgcctccccgcggccttcctcccccagccggggcggaggagacccaggaagctgcgcccggctcccgggggtggagggcctaggcctcggcccgcccgaggcggagcccgggaggtcggggcggggtcccgggccggtcacccacctgggttgccagtcattccagctccgcgaatagttggtgccgttggtgccgccgccgccgctcagccgagaccccggggctctgcggctcattaccttccccgacacgacatggccaagcgccgccgcccagagaagcgcgagtcgccgcccgaaccggccgccgccaacaccccgctccggcccggggctgaggaggaagccgagaaggaggagaaggaggaggcggcggcgggcgggggaagaggacgaccgttccgggttccgcctgagcccgcagcacaggacgaggaggcgggagcggcgcggtgagagagaggtggatgaaggggaggcgacgtctcttccagggccgtgcgcggcccacgtcgccggggccgcggaggacgaggacgacgaggagcaggcggtggcggcagctcctcacgctcacaaggccactgctaacccgcctcccggctccgctggccgcgccgccgctatcgcacggtatgctgggagcgagaagcggggtcggccccgccgggcctggggagagaggcgggtcctgtcggcggggatctccactagtgcggccacacacttttctcccgaacgcttcccggaaagcaccgggattttaaaaactttaggctttgtcttttcttcttcttcttcttcttcttttttttttttttttttggtgggggaaacaatatagaaggcttttccttctctgcaacgattttgtggcttcctagaggtcaggagagtgttggtcatgggaaagaaggttgaattcagtctgcccacatgggcgtgcctagctttagaacagcgctatttaggagaagttggaagttacaccctttggtgagaagctgtgtctgtttttttccatgattggcataattaactcaaataccagctgtacgttagtccgtatttctgttcatggttgagttcagtgtgtccagagaccggaaggtgctttgcactcacaggagtgcccatgtggagctccatgggatgtgaattattgttggtcaccagttctggctgacattggaatcacttgaagagtttttataatatgtggattccaaagccctgtcacaaacctattgaatttgtacctcccaggttgaattttttgttgttttttgtttgtttgttttttgagatggagtctcactctgtcacccaggctggagtgtagtggcatgatctcagctcactgcaacctctgcctcctgggttcaagcgattctcctgcctcaacctcccaagtagctgggattacaggcacctgccaccacgcctggctaatttttgtatttttagtagagagagggtttctccatgttggccagtctggtctcgagctcctgaccttgggtgatccacccgcctcggcctcccaaagtgctgggattacatttacaggcgtgagccactgtgcctggccctgggttgattttgatgcttagctaggtttgggatccattggattatttaacacccgaggtgccttttgtttctaatgatattctctcaacgtgttttaaaaatgaagcgcatgagatagttatgagatagtagaacttttccctacattggtgaagtaaaaatcttgggattttgatagtcagattatcttaggcattaaaaaatatcacaccgacgccctctctttttatagggattcgcagaggcatttttggaacatctttggaaaaaattgcaggatccaagtaatcctgccatcatcaggcaggctgctggaaattatattggaagctttttggcaagagctaaatttattcctcttatgtaagtagcctaattttccgagtactttttaatatcatgctttaaaaagagtatagcattgtctcaagtcagaaatatctcccatatgtttttggcatgtttttaaagtgaataaaattcctactctgtgtaagatgtttatatttctaagtggtgattttagaataaagtgtctccttttttatatataaaaccctgtatgtaaggcttttgtcatctcttttgtgtggttgcacttaaagatccatttgttttgtggatagaggacagtgttgtatactgttttgattctttttgtaggtttgtcattttttcatttgcattccaaatctattgtatctgttaaagctgaagaaaaacccttttaaaggtaatagacctatctaggaggccagtttctttcagtggcccatgaagatatctttggacaaggatgctgttgaatcccttccccaagaacaaaattattcaccataggacttgactggatgcatcagggaatactgaagtccaccagactgtctttctcttgagacgtgttggtgaacatgtcctatttggccaatcaccctaagaggggtgcctttgagatggttaggagaacctgctttccatcccttgggacgttcttaggggctcacctgttcctagaaggtcagagctactctgccttg

SEQ ID NO: 1886739 - DNA, 4001 bp, Homo sapiens
tcccgggtagctgggactacaggcgcccaccaccgcgcccagctaattttttgtattttcagtagagacagggtttcaccgtgttagccaggatggtctcgatctcctgacctcgtgatctgcccgtctcagcctcccaaagtgctgggattacaggcgtgagccactgcacccggccaatcctctgaacttccaaggcactcacctatacagtgaggctacgccataaggcagaaatgctatcagtgtatttaactttagaaaagtgcccactctaggcagggcccagtggctcacgcctgtaatgagcacatgtgatcacttaaggtcaggagttcgagaccagcctggccaacatggtgaaaccctgtctccactaaaaatgcaaaaatcagctgggtgtggtggcatgtacctgtactcccagctacttgggaggctgaggcacgagaatcacttgaacctgggaggcggaggttgcagtgaggagagattgcagcactgcgctccagcctgggtgacagagcaagactctgtctcaaaaaaatatattgaaaacaacaacaaaaaaaccagaaaagtacccactctagggggcggggggaaggagagcatcagcaagaatagcttaatggatgctgggtttaatacctagatgatgggatgatctgtgcagcaaactatcatggcacacgtttacctacataacaaacctgtacatcctgcacatgtaccctgaacttaaaagagaaaaaaaaaaaaaagacagaaaagtaccccctctatatatatatctatatcctccacaggcccaagagttcaaggacttgctgtagtaagagcctactatgcactatacattcaatatccacgataattgggtaaaccttttctgtaagatcttatccagtcttctaatcttgttttaagagaattctcttttaaaatgtactataacctttctagtgggaaattaacaattcacaggaaaagaatgtaaacaatttttacctgcacagtagactaatcaacttatgcctgtgcaaggcgttagtaagaggcatccagaataagaggagatacaagtctttggaaggtgtatgtgattggtccccattttcccagacttaccctgtgatttcctcatgtctttggtggctaaagcacgactgccatgctgaacactggtgaactcagggctggtcacattgttaaccctcagctcttgccccaacgacttccgaccataagtattttccccagatcctccattgacactgtagccacctacaaacagcaatgtgtacgttatttaaatatgattgttcgtttcattcagtcaatttcctgatagctcaggatcttactactcaatctgcagctcaaccagcctttgcttctcctacctttttcctgtactgtctgccttgaaaatcattttcatttcttttaatacacctttgaagttaaattaattttattttgatcccttcattggaaaataagcaaagaaatgaaaactaaattaaatcaaattttgcaccttaaaactttcttgaagtttagagacagtagccaagaggaacttcaaccttagctaaatatttttgaaaataaaaacaaaaatagtattgtatcttttttgtaagaaaactgcattgatgaattatgtacggaaaaattttaaattttaaaaataataaagtggataaacgtcctatgaagttttcagaaataacactgcatttgttattcgtattttaaatatattagaagaaagcgagaaagttgggggtgtaagaaggcaagaaggtgggataggtaggttcaaaaaacatgcttgtagcaataagaaaatatatatacccttttcgtcattctgtatgtcagcgtggactctggtatcatcgtgcctttgccgagacaccacagctgaatttgaaggttgcagtccgtaagaggaagaaccacctctatctctggatgaagaatattttaaattacctgggtcagctgatgcactatcagttctataaaaagagaaaagtttaagattagaactttaaataacataaataaatctttctttaaacaagcctctcttctcccaaattttacatttaaccattactattgtatttaatgtaatatgtactatatattatatgtaagcactcagccgtctaataagaagtctttcactgggaagagattctcaatggatgaaatgccaacttttcagtctcttctactgttctaaagacccattcagaaatacgaataactactgggattagggtgactttgctggttttagcattgaaagcctcctgtcccaggcaaaacaggacaattggttactctggtccagtgttctcctcacatgacttgataataagaataattctttctaaattctcccccatggagagggttaatcagtcaaaacatttcagcctttcctatcataaaaataaaaaacactggcagcatgtcagggacaggcaatgtcttaccaagttattttctaagtactgattaggtactgtagtattgaagaccccattgaagatgccttaattgtaaaggtagcaatcaaaattttaaaaagtaaaaaagaagacattttaagaaaataaaaggtatcagaaatgcaataacgttatatcggaaagttgtagttcataatctatttaaaatttaggtactgtttagaataatacctgatgcttattagtaaacaagtagggtacagccaagggtaaaagtttgtcctcatctaagtatctgctctacgcttcaactgcctcataagtaaaacagagctgagttacaagacttctcacgagtgttactctttcagccatcaatcataaactattaagaaagaagacaacaaaataatctgttatagcatatgaaaaatccaagtaagttcttcccctactgattttctcctgagaggaacaactttgaggaaaaaaaaaaagaaaatcacttctatgatatttactaaaaatgctttctcaaccttttagaacctgaatcttttagaaaagtttaggacactggcaaggccagaaactaacctattcctctacgctttgcccctctatggtgtaaaagtgacagcagtgtttgtatactgtatatatttcatttagagtttattagtctttccttgctcccaaaaatactaaacataaaactttgcatgagctcaatcagttggacaccttgatctgcacttactgcaatcactgttaatacagaatgcagacaataggtccaattaaacttggatatctaactggtacaagtcattacttacaaaggatctcaatctgaaacttcatgaaattcaaaacctagcatactaaaatgactacggctccataaggagtaccttctaatattcagagttcgcttattcataaagctaagtacttcgaacataagggaaaattaaatctatggaatttcaagaaaaatgtatgagaatattttctgagtatactaagtctataagcattaaaatattaactcaatggaccataacttttttaaactaatgaaaagacattccttatgtacctaaaaatagcacatttaacatgcgtctatataaatcatagcataccattactttctgaaaggagactgaaatgtaagagagcttataatcttttctgacagggtgtgaactttatatgtacgccacagtaagctcttattagatgagcaaataaaataagcacttgactaattcagaaacacaaagataactgaagtctgccaatatttaaacatatcttcacttcctgttttcatcatgtttacttatctcctatactacctttactattaagagttaaatgtttgtatcattttctggtgacacagtagtaccataaggcagcagagaatacaagttaaaaaaagatctgggctcaaatcccagctccagcactgaaaagtatgtgtgcctttgcacaaattac

SEQ ID NO: 1886740 - DNA, 4001 bp, Homo sapiens
tcccgggtagctgggactacaggcgcccaccaccgcgcccagctaattttttgtattttcagtagagacagggtttcaccgtgttagccaggatggtctcgatctcctgacctcgtgatctgcccgtctcagcctctcaaagtgctgggattacaggcgtgagccactgcacccggccaatcctctgaacttccaaggcactcacctatacagtgaggctacgccataaggcagaaatgctatcagtgtatttaactttagaaaagtgcccactctaggcagggcccagtggctcacgcctgtaatgagcacatgtgatcacttaaggtcaggagttcgagaccagcctggccaacatggtgaaaccctgtctccactaaaaatgcaaaaatcagctgggtgtggtggcatgtacctgtactcccagctacttgggaggctgaggcacgagaatcacttgaacctgggaggcggaggttgcagtgaggagagattgcagcactgcgctccagcctgggtgacagagcaagactctgtctcaaaaaaatatattgaaaacaacaacaaaaaaaccagaaaagtacccactctagggggcggggggaaggagagcatcagcaagaatagcttaatggatgctgggtttaatacctagatgatgggatgatctgtgcagcaaactaccatggcacacgtttacctacataacaaacctgtacatcctgcacatgtaccctgaacttaaaagagaaaaaaaaaaaaaagacagaaaagtaccccctctatatatatatctatatcctccacaggcccaagagttcaaggacttgctgtagtaagagcctactatgcactatacattcaatatccacgataattgggtaaaccttttctgtaagatcttatccagtcttctaatcttgttttaagagaattctcttttaaaatgtactataacctttctagtgggaaattaacaattcacaggaaaagaatgtaaacaatttttacctgcacagtagactaatcaacttatgcctgtgcaaggcgttagtaagaggcatccagaataagaggagatacaagtctttggaaggtgtatgtgattggtccccattttcccagccttaccctgtgatttcctcatgtctttggtggctaaagcacgactgccatgctgaacactggtgaactcagggctggtcacattgttaaccctcagctcttgccccaacgacttccgaccataagtattttccccagatcctccattgacactgtagccacctacaaacagcaatgtgtacgttatttaaatatgattgttcgtttcattcagtcaatttcctgatagctcaggatcttactactcaatctgcagctcaaccagcctttgcttctcctacctttttcctgtactgtctgccttgaaaatcattttcatttcttttaatacacctttgaagttaaattaattttattttgatcccttcattggaaaataagcaaagaaatgaaaactaaattaaatcaaattttgcaccttaaaactttcttgaagtttagagacagtagccaagaggaacttcaaccttagctaaatatttttgaaaataaaaacaaaaatagtattgtatcttttttgtaagaaaactgcattgatgaattatgtacggaaaaattttaaattttaaaaataataaagtggataaacgtcctatgaagttttcagaaataacactgcatttgttattcgtattttaaatatattagaagaaagcgagaaagttgggggtgtaagaaggcaagaaggtgggataggtaggttcaaaaaacatgcttgtagcaataagaaaatatatatacccttttcgtcattctgtatgtcagcgtggactctggtatcatcgtgcctttgccgagacaccacagctgaatttgaaggttgcagtccgtaagaggaagaaccacctctatctctggatgaagaatattttaaattacctgggtcagctgatgcactatcagttctataaaaagagaaaagtttaagattagaactttaaataacataaataaatctttctttaaacaagcctctcttctcccaaattttacatttaaccattactattgtatttaatgtaatatgtactatatattatatgtaagcactcagccgtctaataagaagtctttcactgggaagagattctcaatggatgaaatgccaacttttcagtctcttctactgttctaaagacccattcagaaatacgaataactactgggattagggtgactttgctggttttagcattgaaagcctcctgtcccaggcaaaacaggacaattggttactctggtccagtgttctcctcacatgacttgataataagaataattctttctaaattctcccccatggagagggttaatcagtcaaaacatttcagcctttcctatcataaaaataaaaaacactggcagcatgtcagggacaggcaatgtcttaccaagttattttctaagtactgattaggtactgtagtattgaagaccccattgaagatgccttaattgtaaaggtagcaatcaaaattttaaaaagtaaaaaagaagacattttaagaaaataaaaggtatcagaaatgcaataacgttatatcggaaagttgtagttcataatctatttaaaatttaggtactgtttagaataatacctgatgcttattagtaaacaagtagggtacagccaagggtaaaagtgtgtcctcatctaagtatctgctctacgcttcaactgcctcataagtaaaacagagctgagttacaagacttctcacgagtgttactctttcagccatcaatcataaactattaagaaagaagacaacaaaataatctgttatagcatatgaaaaatccaagtaagttcttcccctactgattttctcctgagaggaacaactttgaggaaaaaaaaaaagaaaatcacttctatgatatttactaaaaatgctttctccaccttttagaacctgaatcttttagaaaagtttaggacactggcaaggccagaaactaacctattcctctacgctttgcccctctatggtgtaaaagtgacagcagtgtttgtatactgtatatatttcatttagagtttattagtctttccttgctcccaaaaatactaaacataaaactttgcatgagctcactcagttggacaccttgatctgcacttactgcaatcactgttaatacagaatgcagacaataggtccaattaaacttggatatctaactggtacaagtcattacttataaaggatctcaatctgaaacttcatgaaattcaaaacctagcatactaaaatgactacggctccataaggagtatcttctaatattcagagttcgcttattcataaagctaagtacttcgaacataagggaaaattaaatctatggaatttcaagaaaaatgtatgagaatattttctgagtatactaagtctataagcattaaaatattaactcaatggaccataacttttttaaactaatgaaaagacattccttatgtacctaaaaatagcacatttaacatgcgtctatataaatcatagcataccattactttctgaaaggagactgaaatgtaagagagcttataatcttttctgacagggtgtgaactttatatgtacgccacagtaagctcttattagatgagcaaataaaataagcacttgactaattcagaaacacaaagataactgaagtctgccaatatttaaacatatcttcacttcctgttttcatcatgtttacttatctcctatactacctttactattaagagttaaatgtttgtatcattttctggtgacacagtagtaccataaggcagcagagaatacaagttaaaaaaagatctgggctcaaatcccagctccagcactgaaaagtatgtgtgcctttgcacaaattac

SEQ ID NO: 1886741 - DNA, 4001 bp, Homo sapiens
tagaaaatccattgtcattcatttaccacctaatttgttagatgccagaaaatcaaatttcacacatttcaataaaaaggcaaaactaagcatgtcaatcataggaaaaaaaatacttaatcaactaattttatttaaagcactcacaaactcttaagtggtacaagacaagtcaacgctgtttatcgaacaatatttttttttacgactaaacatctcaattctagactcaggcactaattattaaagtcatctagttatatacaccaattctcaacagacacagttttttttggaaaggcatattaaacagactaagatgtgtactacccattagccaaagataattttattgatttttctaacgagtcttcaaatgttacattctaacatcttagcaaattatttccaaatactgctggaattacatgtaactatcaggaaacaaaagggcttctcaacaacttgtgcgttctacattatctggccagtttccggacaattataatacaattgtgctccaaagtaggagagttccatgaatcaattacccctaaaatatatttctgtatatttaaggagttctaagcattgggttaaattccaaacagactctgaatacaagcatttatttagtaagagaggttagaataaatcaatcctaaattaggcacagctgccctccccccattgatcaaaaagacaggaaattacatttatttaaaaagttaatgttcctaatatattcaaatctaactaagccccaaaacggtctgacatcaaatcctccataaaagaggaaattctctagacttctaagtgggtgcccagagttcactcaagtgtccaggtatgaattacgattcaccagagtaaccggccttgcacttagggaaaacttccatcgcccaagaccagagtaggtcgatcccatcaacagtcacacaatctcatctcacgctccactaatgaatgttctgcctaaagtcagagcaatgccttagctggagttttgttttggttttttcaatattaccacgtgggggtcacagaaaggaacagaggttagaagagctctcacgtggcggctgaaagactggggaaccgagaaagtgaatgagtaacagggagggtcctgtactctcagaatctcccaactcggggtcagggggaagcggtaagtggaatgccccccgcccccccacccccgcctctttctcacctcctggtcccgaccctaggccagtgccaccgccgggagccccgggtctcggcttcagccccgggctgaacaagcagggaggggagaggcacttaggcctcgcctccccgcggccttcctcccccagccggggcggaggagacccaggaagccgcgcccggctcccgggggtggagggcctaggccgcgcctcccagccccgcggccctaggcctccgcccgcccgaggcggagcccgggaggtcggggcggggtcccgggccggtcacccacctgggttgccagtcattccagctccgcgaatagttggtgccgttggtgccgccgccgccgccgccgccgccgccgccgctcagccgagaccccggggctctgcggctcattaccttccccgacacgatatggccaagcgccgccgcccagagaagcgcgagtcgccacccgaaccggccgccgccaacaccccgctccggcccggggctgagaaggaagccgagaaggaggaggaggaggaggcggcggcgggcgggggaagaggacgaccgtttcgggttccgcctgagcccgcagcacaggacgaggaggcgggagcggcgcggtgagagagaggcggatgaaggggaggcgacgtctcttccagggccctgcgcggcccacgtcgccggggcccccgaggaggaggacgacgaggaacaggcggtggcggcagctcctcacgctcacacggccactgcttccccgcctcccggctccgctcgccgcgccgccgctgtcgcacggcatgctgggagcgagaggcggggtcggccccgccgtgcctgcggagagaggcgggtcctgtcggcggggcggggccgatagcaggccgccccgccccccacggccccaggctcttggacggcgaagaggtctgggcgtagcggtgacgaatcctaagacgggatctccactactgcggccacacacttttctcccaaatgcttcccggaaagcaccggagggccaggcagtcaggtgtaaacaggcgtccaatcaaggacctgcggtggggggggggggggggggcgggctgttgccctggggtgcgcgcgcacacaggcgcgcccttggattcacgtgtgccagttttcccactttctacggggcggggtggaaagtgaaaatagtcagatcgacaggtggatatccaccttcccaacctccacctgaaatgtgcccatcgagtcctagcaccttttaccatttcttcccaatgaaaaaaactaaacgatggaagggaagggagtacccacgaccaccaaaccctgtcctctgcaatgtgaaatgtgctttgaagtcctctcaccctgaggcttgcccgccttctgctggtgaaagaagctgggggctaggcgcggtgggtcacgcctgtaatcccagcactttgggaggccgaggtgggcggatcatctgaggtgaggagttccagaccagcctggccaacatggagaaaccccgcctctactaaaaatacaaaaattagccgggcatggtggagggcgcctgtaatcccagctacttgggaggctgaggcaggggaatcgcttgaacccaataggccgaggttgcagtgagccaagatcagaccattgcagtccagcctggagaacaagagtgaaactctgtctcaaaaaaatataagagagagagagagagaaagcagggagggaagaaaaaggaaggaaggaaggaaacgagggagggagggaaggagggagggaggaaggaaggaaaggagggaggaaaggaaagaaaaggagaaaagaaagagagaaggccgggcgcggtggatcacacctgtaatcccagcactttgggaggccgaggcgggcagatctcgaggtcaggagatcgagaccatcctggctaacacagtgaaaccccgtctctactaaaaatacaaaaaattagccgggcgtggtggcgggcgcctgtagtcccagctactccggaggctgaggcaggagaatagcgtaaacccgggaggcggagctcccagtgagcagagatcgctccactgcactccagcctgggcgacagagcaagactccatctccaaaaaaaaagagaatcagctgggtagaggagacgtacctgactgtctaccccatgacatgccccatgccccagggaaaaaaattccctaaagcatctgatgcataacgtgaatgcatacacattttttaaaaggtgggccaggatgctccttaaacaagtgcctaaaccttatctgcataaggagtcttaacctatcattttatgttgcaaagaaaacgtctttatatatcgcttgtgcaattaaaaattgttaccaaaagtacttgaagattacgaggagttgacacctccacacacatgcatatcccctccaccttgggctccttgcttatggccaccaatccctcactaagggaggatcttgccagttctaaatgatggggactacaaaaattacaaaaattacccggcgtggtagcgcgtgcctgtggtcccaggaactcaggagggtgaggcaggaggatgacttgagtccagcgggtggaggctgcagtgacctatgatcctgccactgcactccaggctgggctgcggagggtagggagggagggagaagaagaaagagaaaacgcggggcaccatggatggctgactcctgtaatcccagcactttgggaggccgaggtgggtggatcacttgaggtcaagagaccagcctgacaaatatggtgaaaccccgtct

SEQ ID NO: 1886742 - DNA, 4001 bp, Homo sapiens
caatttacactttacaaaagctgtaggactatttgggaaggcactttattcttctaaaaggttactaaattctcttatatacttatactgatcacaatactgaaaaataatagaaaatccattgtcattcatttaccacctgatttgttagatgccagataatcaaatttcacacatttcaataaaaaggcaaaactaagcatgtcaatcataggaagaaaaatacttaactaattttatttaaagcactcacaaactcttaagtggtacaagacaagccaacgctgtttatcgaacaatatttttttttacgactaaacatctcaattctagactcaggcactaattattaaagtcatctagttatatacaccaattctcaacagacacagttttttttggaaaggcatattaaacagactaagatgtgtactacccattagccaaagataattttattgatttttctaatgagtcttcaaatgttacattctaacatcttagcaaattatttccaaatactgctggaattacatgtaactatcaggaaacaaaagggcttctcaacaacttgtgcgttctacattatctggccagtttccggacaattataatacaattgtgctccaaagcaggagagttccatgaatcaattgcccctaaaatatatttctgtatatttaaggagttctaagcattgggttaaattccaaacagactctgaatacaagcatttatttagtaagagaggttagaataaatcaatcctaaattaggcacagctaccctccccccattgatcaaaaagataggaaattacatttatttaaaaagttaatgttcctaatatattcaaatctaactaagccccaaaacggtctgagatcaaatcctccataaaagaggaaattctctagacttctaagtgggtgcccaaagagttcactcaagtgtccaggtatgaattacgattcaccagagtaaccggccttgcacttagggaaaacttccatcgcccaagaccagagtgggtcgatcccatcaacagtcacacaatctcatctcatgctccactaatgaatgttctgcctaaagtcagagcaatgccttggctggagttttgttttggttttttcaatattaacatgtgggggtcacagaaaggaacagaggctacaagagctctcacgtggcggctgaaagactggggaaccgagaaagtgaatgagtaacagggagggtcctggactctcaggatctcccaactcggggtcagggggaggcggtaagtggaatgccccccccaccacccccgcctctttctcacctcctggtcccgaccctaggtcagtgccaccgccgggagccccggggctcggcttcagccccgggctgaacaagcagggaggggagaggcacttaggcctcgcctccccgcggccttcctcccctagccggggaggaggagacccaggaagccgcgcccggctccggtgggtggagggcctaggccgcgcctcccagccccgcggccctaggcctcggcccgcccgaggcggagcccgggaggtcggggcggggtcccgggccggtcacccacctgggttgccagtcattccagctccgcgaatagttggtgccgccgctgctcagccgagaccccggggctctgcggctcattaccttccccgacacgacatggccaagcgccgccgcccgaaccggccgccgccgacaccccgctccggcccggggctgaggaggaagccgagaaggaggaggaggaggcggcggcggagggcgggggaagaggacggccgttccgggttccgcctgagcccgcagggcaggacgagggagcggcgcggtgagagaggcggatgaaggcgaggcgacgtctcttccagggccgtgcgcggcccacgacgctggggccccggaggacgaggaggacgaggagcaggcggtggcggcagctcctcacgctcacacggccactgcttccccgcctcccggctccgcccgccgcgccgccgctgtcgtacggcaagctgggagcgagaggcggggtcggccccgccgggcctggggagagaggcgggtcctgtcggcggggcggggccgatagcaggcagccccgccccccacggccccaggctcttggacggcgaagctgggcatggtggtgggcaactgtaatcccagctactcaggaggctgaggcaggagaattgcttgaacctgggaggcagaggttgcagtgagctgagatcacgccattgcactctagcccaggcaacagaagtgaaactctgcctaaaaaaaaaagaaaagaaaagaaagaaagaaaggtggccccgttaatgtttatgccaagacagccggcatgacctggaagtgtcccaagccacagggcatcttgtttccggggaggatgaatgaatcaaatcgcacctattttgaggcaagcaaggactctgtgacttcaggagccctggtgggtggacagaagctccctgctcccccagcctgtctacccagcagcgctttggccagtcccattcctgtacttctgagcctgcctgtcagtccctcctcacacgcacaccgtggctttgtgcctggtactgagtgtcccggagccccaaaccacagggtcaaccccatgaaagaaaccgggactctgctctcatccactcgcccccaccccccgcgtaatcccctggtgctcacacagccccaccgtaaagtttttgtagctccctggcagacttgtgctcctgtttgccagatcaaagcccagtgacctgagcggcctgtccccagcagaggccactagtccctgtggacccaccccattgggaaaggcatgggttgaactttaaccattaggctcagggattgggatgagtttctacaaaaagaggtgggtacacgccagtccacagtggtcctgatcaaagtgagaacagacagcagggaacatcaccctcttcagattggagtcagtgggaacagacctaagatgttggggaagaacacttggaagacctcagctttctcctgggttgagcagatgtgggcccctctctggagtcgttcgatgaggccagggtgatggtgttctcagcgttcctgtgcgcggcgaaccagcagtaacacttgtaagtagagcctcaaatttcccaaatgcaactggatccttgtcttagctgatggggtctttcaagatgagagagtagagaccatcccgagccacacgggttcagatttccactctgtttctattttttttttttttttaagatggagtctcgctctatggcccaggctggagtacagtggcgcgatctcagcggctcaccacaacctccacctcccgggttcaagcgattctcctgcctcagcttcctgactagctgggactacagacgcatgccaccactcctggctaattttttgtatttttagtagagacagggtttcaccacgttagccaggctggtctcgaactcctgacctcgcgatccgcccgtctcagcctcccaaagtgctgggattacaggcgtcagccaccacgcccggccctctttttttctttttttgatgaagttttgctcttttgcccaggctatagtgcaatggcatgatctcggctcactgcaacatctgccccccaggttcaagtgaatctcctgcctcagcctccaaagtaactgggactacaggcacccaccaccgcacccggctaattttttgtattttggtagagatggggtttcaccatgttggccaggctggtctcgaactcctgacctcaggtgatccacacacctcagcctcccaaagtgctaggattacaggcatgagccaccgtgcctggccacactccttttctcttgtatttggtgaccttgggtgaatcgtttagcctccgtttcaggggtcctggggagggcaagatgccgggagcaggcgggtagtccgtgttcgcacaggac

SEQ ID NO: 1886743 - DNA, 4001 bp, Homo sapiens
ttccttcctcttcactcactattctccagaggcttctctctggtttggttgcttacaaaggctctagagtatagagactgaaaaggaaacagggccttttctgtgtactaatgatgtgcaaatctctcaagcttagactttctccttagttcaaaatccaattttttttttttaattgatcattcttgggtgtttctcgcagagggggatttggcagggtcataggacaatagtggagggaaggtcagcagataaacaagtgaacaaaggtctctggttttcctaggcagagtgtgtgtgtccctgggtacttgagattagggaatggtgatgactcttaacgagcatgctgccttcaagcatctgtttaacaaagcacatcttgcaccgcccttaatccatttaaccctgagtggacacagcacatgtttcagagagcacagggttggggataaggtcatagatcaacaggatcccaaggcagaagaatttttcttagtacagaacaaaatgaaaagtctcccatgtctacttctttctacacagacacggcaaccatccgatttctcaatcttttccccacctttcccccttttctattccacaaaaccgccattgtcatcatggcccgttctcaatgagctgttgggtacacctcccagacggggtggtggccgggcagaggggctcctcacttcccagtaggggcggccgggcagaggcgcccctcacctcctggacggggcggctggccgggcggggggctgacccccctacctccctcccagacagggcggctggccaggcagaggggctcctcacctcccagacggggcggcggggcagaggcgctcccatctcagacgatgggcggccgggcagagacgctcctcacttcctagatgggatggcggccgggcagagacactcctcactttccagactgggcagccaggcagaggggctcctcacatcccagacgatgggcggccaggcagagacgctcctcacttcccagacggggtagcggccgggcagaggctgcaatctcggcactttggggggccaagacaggcggctgggaagtggaggttgtagccgagatcacgccactgcactccagcctgggcaccattgagcactgagttaacaagactccgtctgcaatcccggcacctcgggaggccgaggctggcggatcactcacggttaggagctggagaccagcccggccaacacagcgaaaccccgtctccaccaaaaaagtacgaaaacccatcaggtgtggcggcgcacgcctgcaatcgcaggcactcggcaggctgaggcaggagaatcaggcagggaggttgcagtgagccgagatggcagcagcacagtccagcttcggcttggcatgagagggagaccgtggaaagagagggagagggagaccgtggaaaccgtggaaagagagggagagggagaccgtggaaagagagggagagggagaggagggagagggagagggagaggagggagagggagagggagagggagaggagggagagggagagggagagccaaaatccaattcttaacagcttacccaacaatctcatctgcacatttcattagaaatcttaaaacatagcttgttctctgtgtgctcctactccagttaatagcattgtttctcttccctctaccattgcccccacaaattaatggtctccatgcttccatacttgcccctcacctccagtctcttcaccatagcagaatgaaccaccaagtcagatcacaacacatctctgttcaaatcccacctgaaattttcagtcttactagaataacagccaaagttcttttctcagttcccagctacttctctgcccttatatcctactgtttaaggtgctcctaaacacacaggcctcccagctatttccagaacactccaagcccatcattctcacatcaggtctaggcccaaagggcatcctgatgggcatgccttgaccttgtgtcttccctccaaagaaggtcagctttacctaactgctttccttatggcacagaaaaggtgagtgaggtccaattaatccttctatcaataatctttatctaatctttgctttaaaaggttggaatttgtgtctgttttatgtgctgcctgggtcatagtatatgctcagtgaagcaattacacattaacccatttagcagtagaaagcaagggtatcagacaaagtctaatgacctttatcttcccagccaagtgtctgcaacagagtgagtgctcagttttgaattacagaattaataaaagcacagaggaatgagaagaaagtttaatttacagatgttcacaaactctgtcctcattagaataaatgtttttgatatattcagacctcatttagaaacaaagccatcaaatgtgattctttctaaatcagtacaaatttttccttatattcactctggcataatcttcaaactctattaaggttttagaatgacaggttctgaaaattaataccaaatgactatctcagcagtgttttcccattatacaaataccttccctcatctctgatgtcagtttcctgttgtcattttcataatggcagtaagttagaaatataaccattttgtattactacatatgaccaattttaatatttttttgccataggaaaaacatcatagttattggaaatttgttttataactggaaacagaaagccttactttatatagttgaattcagctttcaggttgagggaagtgctactggtactctttttcaagtcatggatagcattctgccattcctgcacagcagcgcaatcggcaattgagatgtagcactcacacatgctttatttcctaaataatttataacctcaggggaagagtcagtcggtttggacagcacagtttttctggattcacctgaaagtattttataaaataagaagagattcagatcaattagaaatatttcaaagagcacagaaacctaaaaacatgataagatcatcagtacaaaatatatcactataacttttgctttatttaaaaatactgaacgctcaccattcagacaatgtttcgggctggcactgttacacccagcattggctaaggtgagcaccaatttgtcaaagctggagatgcagcaatcaacacctgtcatggcacacaggtgctcctggtactccacagaggccttttcaaacctgaaaagcaaattgaagcagtcttatttctttatttatctacttacttactttcttttttgagatgaagttttgctcttcttgcccaggctggaatgcaatggcactgtctcagctcaatgcaacctctgcctcctgggtacaagtgattctcctgcctcagcctcctgagtagctgggattacaggcactcgccaccatgcccggctaattttcttgtatttttagtagagacggggtttcaccatgttggccaggctggtcttgaactcctgacctcaggtgatccgcctgcctcggcctcccgaagtgctgggattacaggcatgagccaccgcgcctggcctttacttacttacttacttattttttgagacagtcttactgtcacccaggctggagggcagtggcatgatcatggctcgctgcagccttgccctaccaggctcatgcaatcctccaacctcagcctcccaagtagctgggactataggcacccaccaacacacctggctaaaacaaggttttgctctgttggccagggtggtctcaaactcctggactcaagcgatccgctcacctcagtctccccaagtactgggatttcaggcatgagccaccgcgcccagccccaaaggaggctgttattttaaacacacatatctcatttcccccccccacaaaaaatggtgcaagaataaactgagctaaaacagtgagttgactatggtggggggaggtttgatgtcttcctcacaactgtgaaactaaatt

SEQ ID NO: 1886744 - DNA, 4001 bp, Homo sapiens
aggcatgcaggcactctcagacttccgcagagagacctgagtaatcaattgacttccacaaagggcgacttgccaacagctatcaaaagtactcaggcacatcccacttggcccagcaattccacttccaggaatttctcctgcagaaatacatgtgcacaaacaacgtaggaaagcactgtttatagtaacaacccaactaggacagaccaggtatatttagacaacaaacaaggaagctttttactaaattgggatgatctctaagaagaaggtacgtagaaaaagcaaggtgggagaacacgctatgtgcttgtactatgcacgtcaatgaaaaaatacacaaagaattgacaggccaggtggagtggctcacacctaatcccagtactttggaagactgagatgggagggttccctgaggccaggacttcaaatcagcctgggcaacatagcaagacccccccacatctctacaaaaaaattaagaaaaaaattagccgggcatggtggtgtgtacctgtagtcccaactactgaggaaactgaggtgggaagatcccttgagccaggaggtcgaggctgcatggagctttgatcgtaccactgccctccagcctgagcaacagagtgagaaaaaaaacagactttttttctatttctggaaaaaaataaagaatttataagtatgatggttctggtaatagaagtaggtggctaggcagagtggacacttcacactgcatactcccctattttccgaaatctgagttttttttttttttttttttttttttgagatggagtcttgctctgtcaccctggctggagtacagcagcaccatctcggctcactgcaacttccgcctcctgagttcaagcaattgtcctgcctcagcctccccagtagctgggattacaggcgtgcaccacacgcccacctaattattgtatttttagtagagacagggtttcaccatgttggccaggctggtctcaaactcctgacctcgtgatccgcccacctcggcctcccaaagtgctgggattacaggtgtgagccaccatgcccagccaatctgagctatttaaaaactaaaggtaaaattttaaaaggggaaggggaaaatgggaagtcattgttttaaggggacagagtttctgtttggggtgagaaaactctagaaatagtgggggcgtggcacatgattggaatgaatggcagggaacggcacgcttaaatgttcctgtacgtttcacaggagaagtcaatgcacacacaagcgccgcaacccagtccaaggctttgctcctacagggccttacagggggtatttgagacgcccaccttaatgcaggttggacccagctccgggctgcggggcttccccgccccggggtctttcgtgtgagccccgtggcgggggatcctggcccaggacatggcgcggagaaggctgtgggcggcgggacagggtgccttcggctgccgggttaagagtggatcccgggatacatcctccagcgcctgccctcgggcctgtgtgcacccccatacccagcggggccgtccaagagcttcaaggagggcacagcgcgacccgccctcccctcagccccgcacaccgtcccacggccccgcacagcctccctcccacacagcgccccacggcacccgcacagcgccccacggccccttcatggtccccgcacagcgcctcacaacccgcacacagcgcctcacggaccctttacggcccccgcagagtctcccacacggcgccccacacagagcctcacggaccccgcacagcgcctcaaggtctccgcacagcccccagcacagcgcctcacacagcccttcgcacagccccccgcacagctcctcacgggccccacacagctgccgcacagccccgcacaagcccgcacagcaccagcagacaggtagcccccacaggcaacagcgcccacctcgccgcgcccagaccccggatcgccgacgcggacgccaggcgcctgggcacacggcgcctgcgcagacaacaccacgccccaggcctggcgagcgcaccctgcgggtggggcggacctacgtcagcaacccatcgtccgatcccgtccattggctgagaggtaatgcgtgcgcccgactcgccgctgattggtcggcgcgcgagcagccgggctcgcacgggccaatcctgtggtagcgcgtgaggaggcagaggcctctggggtgggatcgcgggccgtaagtggctgtggagctggggtcactgcgcggtgggaccatggcctcggagaagccgctggcggcagtcacttgtacagcgccggtcaacatcgcggtcatcaagtactgtgagtgccgcgggccggcctgggacggggatggccgggagcgaggccgggtacgcgggggtcgcgcgctgattcggcggcgcgctccgtcctgccctcccagggcctcgacagacggggaaactgaggctcagggaggggcgcggcggtggtcgggcggggccgcgcgctccttcgcgtgacaagctcggcgccacccgttcccccgcgacggctgccgcccctgcagggtcgcccggcgcctgcccattagcgattaccgaactatcgaaatcatcaatcatcgattcccatgaatcgtaagaatccgccgtggtggtgcgcgtttgtggctccagctactcgggaggctgaggcgggaggatggccagagcccgggaggtcgaggctgcagtgagcggaaatcgcgccactgctcccccagcccgagaccctgtgtccctccctcgccccgtttctcccagcggtaacctccaaggagcggtaatggggggcccgcaggcccacatccgtgccggggaggccggtccgcacctgtgcgttcacagccccgcccctcccctcgcgccggggttacctggccgccactgaccactcatttctgtaacgtcatttcaaaatgttctgaaactggaatcgcagttatgtggcccacccagtatcttttgagtttggcttatttcattcagcatagaatgtggacgtgccccgggattgtatcagtgctttgcccctctgttgctgagccagtccgtggaatccatggaccaccctctctctagccaaggcctcaccccgcaaagagcatctaacgttttctttctttctttcttttctttccagaagccgccaccacgactggctaatttttttgtgtttcccttaccaataaagctgccataaaatgttgtatacaggtttttgtgtgaacatacatttccattcttctgggataaatgcccaggagtgcggttgctgggtcagatggtagatatatatatatgcctctctgtctctctctctctttctatgtatatatgtatgtttgtgtgtgtgtatatatatatacacctgtatagatatatgtgtgtgtatatgtatacacctatatagatgtatgtgtgtgtatatatacatatatatattatatatatactttttttttttaaagaaactgtctaattgtttttcagagtggctgggccattttgcatccctacggtgatgcagattttccgcatcctcaccagcatttggtggagttgctgtttttcattttagccgcgtcctggtagggatgtgctggcagggtgctgtggtcctcattcgcgtttccctgttggccagtgacgtggagcatctttctttgtgcttatttgccatctgtgggttttcttggtgaaatctctcttcatattctgtgtccacgctcgaactggatggtttgcttttttactataagtttggagagttcattacacattctaggctgggcacgctggctcaagcctgtaatcccagcacttggggaggctgaggtgggcggatcacctgaggtcaggagtttgagaccagcttggccaacatggtgaaacccccgtctctactgaaaaaaaataaaatatgtattctagatat

SEQ ID NO: 1886745 - DNA, 4001 bp, Homo sapiens
acccattgcccaccctttccgagtggagtggggtcgatccctggacaactgggcaggtttctggagttgggcacacatctcagggctggaagcaagagggccccaggctcaccatgatctgcgtctagacagcagctccacaggcccccagagctcaggagcctgcatttcacagtgggtgtgggctgacatcacaatagcattgtccagctcaagccagtcacaaccctggttcaggacccagagaccccgtacagcccagcccttgcccccttctctgaaggatcacaggtagccaggcgcggtggctcacacctgtaatcccagcagtttgggaggccaaggcaggaggatcacttgagcccaggagaccagcctgggcaactcagtgagaccccacctcttaaaaaaaaaaaaagccatacggctagctgcagtggctcatgcctgtaagcctaacactttgggaggccgaggcaggcagatcacttaaggtcaggagttcgaaccagcctggccaacatggtgaaaccccatcgctactaaaaatacaagaaaattagccaagtgtggtggcagttgcttgtagtcccagctacttgggaggctgaggcagaattgcttgaacccgggaggcggaagttgtagtaagctgagatggtgtcactgcactccagcctgggtgacagcgagactccgtctcaaaaaaataaataaaataaaataaaaataaaagagagcagctcttgacctgagataggtctatgaagcgcctggggcttgagagtggctgacagcgtttccccagaagcactgggtcagaaccaagcttcatggagctgtctcccccaggccagggcttcagtgggatcacagggattgccaccctcttctctccaatactgcggcccaggtggctggagatcctaaggcttaggggttttaggcattgactcactgggggtcttcacttaggatctgatactcaggtgctagctccacggcagtgacaactaaactcccgggtaacctgccgccccagagcagggggcccagcctcccaaaccaggtgtctgatccactccagcctagcaccacgggggcgctgagttcatctaggcctagttggtcaaatcctttagaatctcacctggtctcacaaggaagccactggaagcctctgagcttcccatccttgctagtgctctgctggctccacctggagccctttggaccaaggcattttacctgccagtgtagttcacttgagatgcgcatggccacaagactgttcgtagtctggctcctccacttaagaggcgtcggaccttacacatcacctgccaacctcccatatcctacccttgtgtccaaagccaggaaagaagaggaggcatctcgctagggttctccccgccacagcgtgaacatatgcacttgccgccaggctgataggcgagtcggggccccaagaacacccgcatgcagtgagttagacaaaacagctttatttgaaagacgtgggacagccaagttcccccaaccccgcggtcctggcgacgtcggtgtcaggcgtgggaggaccagtgtcctgcggagaaagaacaaggttaggggtctgcagtcggggtcaggagtcaggggccagacctcgcgagcgaccgcacccgggggggaggcggcagcgcctgtcggggcctgggtttcaccgccgcacatggggcagcgcgcggtgagctgaggcccccgggggctctgggcgccgaatctcacccgcggccacggccaaagccgggggcgattttcaaccaacgccggtctcgaagaccaccagcgagacgccagtggtcaacgcggcaggacctacctaagtgaagaggagagcgcaatggaggcgcggacgtttatagccactcttcgggtggattcccgagccgcggctggggacggaggcgccggcgtttatagtcgcttttcgggtgacgtagattcccgggccgcggctggggccggacgggcaagagcactcagagcccggtgagggcggggcaccgcggagccaatcacaggttgtcttataggagctcggcccgctcccgcttggggcggggctgcggagatctcgcggcgcttggcgtgctataaaagctgcttcccagtaggtctcgttcttcttttccgacaaaacacgtgagtcctgttggtcgctgcagcgggcctctgcgtgggcggcgggaatccgcggacatcgggtcgggtctaggctcccgagtccgcgctcctgggcgggagcccttgtctgggtctcgcggggggctgccagatgcgtaggccacactgactagttccttcttgtcgcttttcccagcaaatggcggatgacgccggtgcagcgggggggcccgggggccctggtggccctgggatggggaaccgcggtggcttccgcggaggtttcggcagtggcatccggggccggggtcgcggccgtggacggggccggggccgaggccgcggagctcgcggaggcaaggccgaggataaggaggtaggtatcagccacgctcggggtcgggcccctgggcggcgccggagagcggtcctggtcactggcgccttttctccctttagtggatgcccgtcaccaagttgggccgcttggtcaaggacatgaagatcaagtccctggaggagatctatctcttctccctgcctattaaggtacgcgtcggtcgttggggcgttgagcaagtgcgaccccggagtcatttgggctggggttggaggattagcatctgccattgactcgcattaaagggcccagcgtctcgcgtgagaggttgaggttgtgttgcgggctggctgaggagaggattccacttagaggttggatggatacctgagcgaagccagagccacaaaaggcatttcagcgcatcttcccacattcgcagcgaattcatttcgaaagaactgaaagagaagcagcgcttggttcatgccatccgagaggatgatgaagttcaggttgtgggaggacactgtaagggttagcaaactgtcatagtccgcgtgtacgggacagctgtcatctgcatccagcgggtgcagtggggaaaggctaatggcatatttgtcatgtgagcgttcgccctagcaaggtacggtggtcatggctaggccaaagctggacaaagcaaaaggaaatctgagtggaaagccacatctcaccaaacaagagaaaaagggcaaataggaagaaacgattgagatgcagaaatagggtaaccttacatacaagcttccaaaaacgaaacgaaggggacagatcggggggaagccaggtgagggggttcatgacttcttcggttttttttgggcggggtgggcggttacacagtttcgccctatcgcctaggctggcgtgatctcggctcactgcaacctccacctcccaggttcaagcgattctcctgcctcagcctcctgaatagctggggttacaggcgcactccaccatgcccggctaattttttgtgtctttaatagaggtggggtttcaccatgtggccaggctggtatcggactcctgaccttgtgatccgcccacctcagtctcccaaagtgctgggattacaggcttgagccaccgcccccggccgtgactttggttcttgaatatcataatggtattaagtttttttttaatgctctccctacaattttcttgtttgtttcaggaatcagagatcattgatttcttcctgggggcctctctcaaggatgaggttttgaagattatgccagtgcagaagcagacccgtgccggccagcgcaccaggttcaaggtacccggctgtcctggagggggctgcgctgggcttgccgggactctctcggctctgcatagttgcacttggcttcacccgtgtgactttcgtaacggggagagagagaaaagatctcctcaggacctcggatgggccttactgtggcctctc

SEQ ID NO: 1886746 - DNA, 4001 bp, Homo sapiens
cccaccttggcccccaggtgctgggattacaggcctgagccaccgtgtccagcctggttcagttctttttgaacacttggggtgcatagcatgctctggtggttcttccgtaagagggtgaagtctccaaatcaaacccccaaagatctggaaaccgtgcaacagcggacccagctccctctcttttgtagcagttgtagagcatgtctgtcctatgtgtctggatgttcgagctctccttttagctcgttcatttcccagtgaggaagctgaggccgtaaggtggtaagttctgcttgctggaggctccctgttggagcctctttgcgcacccagcagggtccctgtgcagctgggggaggtgcactggcagagctgcgtcccagtccttgccatctgtgagaagcagctgcctgtaggcttgtgtgggggacagagtaaggtaatgcatgtggaactctgaggatgatgcctggtactcgggagctctccatcagctgtagcctaggccttcacaggcctgcctggctggccacatcccttagagagacgaattgctgttttctaaacgctggaacactcaggaagttctcctctctcccctccaaagggcttatgagaaataagaaagctaaaagcctgtccaaaccgatgaggcatttgagtctgtggctttgtctttgcagaatttatagagcggcagcacgcaaagaacaggtattactactaccaccggcagtaccgccgcgtgccagacatcactgagtgcaaggaggaggacatcatgtgcatgtatgaagccgaaatgcagtggaagagggactagtacgtgagccatgctgggagtgtggagatctgcaccgtgtgctgctgggacactagtccctgggatgccacagggtggcatgcccagattttaggggtgacatgggaggagccagaccccagggctcttgctttcaattgttctcacagggtacaggaaaaggattccttgtgattagcctctcttgctccttttctccaccagcaaagtcgaccaagaaattatcaacattatgcaggatcggctcaaagcctgtcagcagagggaaggacagaactaccagcagaactgtatcaaggaagtggagcagttcacccaggtggccaaggcctaccaggaccgctgtgcgtgccccacccacccccaaccccccaccatcctcctgaggcctgggggccagaaccattgcaaatcttccctcccctcccttgtgctcacttgactttgccccctttgcatgtagcagaggcctcggttcccagcttgtttccattgcttccccagatcaggacctgggggcctacagttctgccaggaagtgcctggccaaacagaggcagaggatgctgcaagagagaaaagctgcaaaagaggccgccgctgccacctcctgaggcagctgtgggtgcccctgctgtgtggctctgtatgactgttgctgaaatataaagccctgcaacctgcctgtgtgtctggtgtgatctattggccccacgccccagattcaaaccaccactaaccatgcaggacacgggaaaaaaacagtaacacgcttaattcactttatttttcttgtataaaaaccctatgttgtagccacagctggagcctgagtccgctgcacggagactctggtgtgggtcttgacgaggtggtcagtgaactcctgatagggagacttggtgaatacagtctccttccagaggtcgggggtcaggtagctgtaggtcttagaaatggcatcaaaggtggccttggctgcaaaacaaaagaaccccaggagggtcagtggtgtgcttgaggcaagtcccccaacccaaaaattgtcgcactcctaggaacagagaggccattctgggcgggtctgtcgtgcattaggagagcctttctctgcctccctgaaaacacgccaagcacacactggacccgtgtggttaagcggagctgagagaccatggctatgccccatgtgtggaccacctaccgaagttgcccagggtggcagtgcagccccgggctgaggtgtagcagtcatcgataccagccatcatgagcagcttcttaggcacaggtgcggagacgatgccagtgcccctgggtgcagggatgaggcgtaccagcacagagccgcagcggcctgtcacctggtgagggaaggagtcaggagacgggggcccgagggagcctgccccacggcaggcccatcacctgccaccagcctaccttgcaagggacagtgtggggcttgccgatcttgttcccccagtagcctctgcgcacggggacgatggagagcttggccaggatgatggccccacggatggcggtggccacctccttggagcacttaacacccagaccgacgtggccattgtagtccccgatagcaacaaatgcctgcgaaaagatgtgtgtgaggcagctggtggccctacacccaatcactgcccaccgcccagggcctgttgcacccctcaaggaaagagaggccacagtaaggcccatccgaggtcctgaggagatcttttctctctctccccgttacgaaagtcacacgggtgaagccaagtgcaactatgcagagccgagagagtcccggcaagcccagcgcagccccctccaggacagccgggtaccttgaacctggtgcgctggccggcacgggtctgcttctgcactggcataatcttcaaaacctcatccttgagagaggcccccaggaagaaatcaatgatctctgattcctgaaacaaacaagaaaattgtagggagagcattaaaaaaaaacttaataccattatgatattcaagaaccaaagtcacggccgggggcggtggctcaagcctgtaatcccagcactttgggagactgaggtgggcggatcacaaggtcaggagtccgataccagcctggccacatggtgaaaccccacctctattaaagacacaaaaaattagccgggcatggtggagtgcgcctgtaaccccagctattcaggaggctgaggcaggagaatcgcttgaacctgggaggtggaggttgcagtgagccgagatcacgccagcctaggcgatagggcgaaactgtgtaaccgcccaccccgcccaaaaaaaaccgaagaagtcatgaaccccctcacctggcttccccccgatctgtccccttcgtttcgtttttggaagcttgtatgtaaggttaccctatttctgcatctcaatcgtttcttcctatttgccctttttctcttgtttggtgagatgtggctttccactcagatttccttttgctttgtccagctttggcctagccatgaccaccgtaccttgctagggcgaacgctcacatgacaaatatgccattagcctttccccactgcacccgctggatgcagatgacagctgtcccgtacacgcggactatgacagtttgctaacccttacagtgtcctcccacaacctgaacttcatcatcctctcggatggcatgaaccaagcgctgcttctctttcagttctttcgaaatgaattcgctgcgaatgtgggaagatgcgctgaaatgccttttgtggctctggcttcgctcaggtatccatccaacctctaagtggaatcctctcctcagccagcccgcaacacaacctcaacctctcacgcgagacgctgggccctttaatgcgagtcaatggcagatgctaatcctccaaccccagcccaaatgactccggggtcgcacttgctcaacgccccaacgaccgacgcgtaccttaataggcagggagaagagatagatctcctccagggacttgatcttcatgtccttgaccaagcggcccaacttggtgacgggcatccactaaagggagaaaaggcgccagtgaccaggaccgctctccggcgccgcccaggggcccgaccccgagcgtggctgatacctacctccttatcctcggccttg

SEQ ID NO: 1886747 - DNA, 4001 bp, Homo sapiens
gtcaataaagcaaaagtcaatgaagctggagtcatcactgaacaagctcccagggagctagactagggggaacaaaagaaggggccttgcctacttacctttctcacaagccaagtgggcaagcagagagatggtctggatggtcttcccaagccccatctcatcagcaagaatgccattaagcttcttctcatacatggtaaccagccagtctagcccaatgtgctggtactcccggagctggccccgcagaagcaggggaatgggcgtctttacctgtcagagaggaaatataggtaacacaatggaaatgaggcatttgttgtggggacatgagaaagtcaagacatgagaaaggagaggccagaacctggggatacctgggtcgtggccagcgtgtaacccttgggctggagactttcagctgctgcagcaatgtcagtaatttctttctttggacctagagtagtgggccctggagtaggaggcccactgcctgcatctgcctcactctgctcttcatccctggcaagcaagtactccaccccaaaatcatcatcttcctcctcttcatctgcttggctctgtgattgggcatcctcagactcttcagactcagattcctctgatgctgaacttccacttgtttcttcctcctctgaatgttcatcttcctcatcctcactccggtcctccacagagtctaaagggtaagaccaaggcttactgctcatcatacctgctcttccaatggccaccctccccagctcctgcttcatgaccacatattcacctgactgactgctactatcctcctgaggaggctcttccgcttccacgggcccctctggttcacagtcagagctattagcatcaacctcatcttcatcctcatcttcactgctcccagagcctggggcataggctcctgcatactgctgcaatagctcctccatggaaagctcacctggaagagaaacaaaaagcttttggttgctctgaggggagggagaaggggaggtctgagtagtaccagttaattttacctaggtctctgtagatactgctaggcccaggtctgaggggaggcaaaagagcttactttcagcatcagctagcaaagccaagccccacaacctgggggaagtaccatgggaattgggaagaacattatcaacctggtgagcctctcaaggtccaggtcaaatgctgtcagtatcttcctacattagctcttccctccatttcactcccacatcaccatttaaacttctatcataagcactcatcactttctacttatcattactggtttacaagtctgtcttagtcattagacatggaattcctccagggtggatacaaagtgccttattcatctctttatccttggtactgcacaccgcagacaccaagtggatgcttagtaaaatgtctggtaaatgtcaccttctcgagccaactcgctcagctccatggcatgatccacctccccttccaactgttcctcagctgctatagtatcctcttcatcctccgctaggaaagagacagaagcaagattaatagggatagaggctagaggcacaggacacagtccaaatgaaacagatgagaaagcctgaaaggttaggtccagacaattcattcaaggggtaaggggcaataggacaaaccgaacagccctgaccttcctcttcgttggcagtaaactcttcatcatcttcatctggatgccaaggctgtttgttgcgctgtgtgacagcagagggtgggggctttatctgtatggcaaaagataaaaaagggaagggtctaaggttacagtagcagaagaatggcacaaacttgaaaaaggtgtcacaggagaatcactgtcccattgagtgacagttgccactggtataatcccagggcaagaatacaatcaagggttttctctcagcaccagctaccaaatcctggccccactgcctggggaaggaactgtgaaagtgccaggtaacaaataaaggcacccaacacttccccatgcacttgagacatatggagaaacagaaaagacttaagggtaccatgccagcttccaacctgtaagccaataagggaacattagggcatgttcagagaagtggcaagtaacggtcagaggaagtactttttcaagaccacacagcaatttaaagaggaaagtgcaatacgctcttccactatagcgccaaaacctgccaatcacaaaatgcaacttgccccaaacagattcttccccagtcatccccaaagagcccaaatgtccattactagcagaactcctaaaactcataaccaacctcacagcccggaactcagaccctgaacctctccctctgttccccctctgaaccctccctctgctccttctgcctatacctccaacacctgagggggctcttcttcagcaccttcttcaggcccatctcgggtgtcactatcatgagatgagggggtttgagaggggctggaaggcccttccaacagctgagggggaagggaacggagcagctcttccagtggcaattctccctcacggcgaagcagctcaatctcacgcctctgggcctctgcatcattgccttcctgttgttcttcaacttcaatcgtttcctcatcatcctcttcctcatcctcttggggttgaaagtccccatctatagcaggagaacaaggtcacaaagtccacgggccctgcaagccacagggtgggtttttcagctctggaaagggtacatgaggaagagtaacaggaccaaagagaacacacaccttcatcatccaggcgagaagcagggggtggaggactggaggcagctgaggaagagccgaggcaaggggaagagcctgctttgctggaggttaatggctggttgaggctctgagacagaaggtccgagtacttttcagtttgccccacaatgaagtccaaatgcaggtccagggcttttttgcgcttttcctcaagccgggactgttgcttgaattgcaccacctgccacagatgtgaaagggactgctcaccaagataaccattttatttatgtacttttacccgatgtttagggagaccttctttaaccagatcctgggctggcctcttaggaaagtaaaactaaataaccttaggggctcactatggtctaaaggaagcacaaagggagcatgcaggaagaagagccagcttcgcctcaggtggagggaaggtttgcaatctgaagctggatttttttttttttttaaagagatgagatctcactatgttggccagactagtgtcaaactcctgggctcaaatgatcctcctgcctcaccctcccacgtaggtggaactacaggcatgcatcaccacacccagctggaactgggtctcaaaaaataggtaggtgggccaggcacagtggctcatgcctgtattctcagcactttggaaggctgaagtgggaggatcacgtgaggtcaggagttcgagaccagcctgaccgacatggtgaaacccccatctctactaaaaataaaaaattagccaggcgtggtggcgggcacctgtaaactcagctactccggaggcagaggcaggagaatcgcttgaacctgggaggcagaggttgcagtaagcccagattgcaccactgcactccagcctgggaacaaagcgagactccgtctcaaaaacaaaaaaacaggtaggtgaagccaggcatagtggctcacactttgggaggccaaagtgagaggatcgcttgagcctaggaattcaagatcagcttggtatgtaacagcgagaccttgtctccacaaaaaaatatttttaggccaggtgcggtggctcacgtctataatcccagcactttgagaggctggggcgagtggataacctgaggtcaggagttcaagaccagcctggccaacacagcaaaaccctgtctctactaaaaatacaaaaattagccagacatagtggcacatgc

SEQ ID NO: 1886748 - DNA, 4001 bp, Homo sapiens
caaagaatgttccagaggacaaggaagcagtaaattacctttaagtcatgctcctgatgtagctcagctaatacattcataattgccattgtccaagggtttggtggcctaaaaacctaaagaaaagctattatgttaagctggcccaaaatgtgccctttaatttggattatttaaaacaattcaatacaacataagggggtaggggggagtcaaacaaataaaaaacaaaaaacaaggattaaaaaataaccaaaaacagttaaacatagttaaacacttatacctctgtagccataacaaaacccctagccttctcacctatatcacatttcaaaaacaaaacaaaacaaaaaaccaaaaaccaaagccaaccattataatctttcttatttcacccagcctctcaaattggaaatccaagtgccatagaggaaaacagacttaactagctttacctcacaagaactaagaatataatctcttgacctcatgctaaaacaaagcaatgcttagaaattagtcataaataaaatattaaaatctactcaccacactacgaatgctagattctaagactttggcaacaaagggcactacatagagcaattcttgttgtcctttaacataagcctctagcagcaatgatttcacatccaagtcctagaataagaaaaatactttcaaaagcggggaatataccccccaaaatggtataacaaaaccaaagaaaagtattttgccaagcttatccccaaaacaggaatcaacataatgtctagtccttgccttacaaaaaggggttaacaactcaaaacgtgggccaaaatcttacaaaaccccaataatcattaaatagctccaaacagccaatacttgtaatcataatgtgctgaagattctcaatttttacacatttagatgaaactcacagtgtgtaagatgggtttgtttttagctaatgtgatcattcctagccaatgtcccaagttcttcagcaaagaacgatctgagaaattggctgcagctttatcagaggtcaggagcacctgaaatagtgtaagattaagaaagatatgagaataagcttatgaaagaaaactcaactaagtatttgagaattccattatcctatcctaaagacaagtcatcatttctaagaacaggccccaaagtagaattactctgtatatcattctcaatatcattttgctgtgtttatgattcaacagtgctatttttaccttgaagaagtctttacattttattttttcaaaataggtacaaacacattgcacaaaattcaaaaagaacacaaagttatgtgccagctatcctcccctagaaaagtattttcaactctgaaaaccttagctaggtttaaagcagagacctaactacaaagctattttgaagtgctaaattaatttaaatgaggatgatagccatgcttaagtccttaaaggcagcaagcatacaaaggaatataatcaaattagcctcctattgcaatcttcagtatacccaggtcattaacaaatctctgcagccaaccaagataactttctgagatatagtataatactgtttatatacttcttttcaaatttctaaaaaacccaaaccatttaactgattctccggttactgtttttctaagggggggcagaactaacataggagagtgttttggctgcaggtatgcacacatgtatatacccatctactctgtggtacctcttgacttagggctatatttaaacttctgtttaaaaaacatggtcttgaaactttgctacagagtatgtggaaacttttatgtatcccaaccacccttgctatcagataataaaaacgaaatagagccatgttccttaactctatacagcaacagcagaatggcacaagtcagctgtgcaacagagagccaggaattcttttgcactacagcgtaaccaagaatggggaatattcccatccacaggtttaaatatagtgctggttcctaagccaatgacccaagttattgagcaaagaatgaccacagctgtatgctggttctagaagtttttcctcctaagaaataaatgatggtttagaaattaaaatacttgaattttgttgaataagcctcagctcagtagaatttgaccttaaactgcacagactcctagacaacagctattccacaaacagatttagagtctaaagatatcttgcacttgaatactacaagatacaaacgaaaacattcaggacagcattgtttataatagtttaagtgattaacaacacaaatgcccagcagcaatacaaatacatacaatggttttctacaagactatatttttctgttttttaaaaaagaggactggccgggcacagtggctcaggcctgtaatcccagaactctgggaggccgaggagggtggatcacctaaggtcaggagttcgggaccagcctggccaatatgattaaaccccgtctctactaaaaatataaaaattagctgggcatggcggtacaactataatcccagctactcgggaggctgaagtaagagaactgcttgaacctgggaggtggaggctgcagtgagccgagatcgtgccactgcactccagcctaagcaacagagtgagaccacatctcaaaaaaattgaaaaaaaaaaaaaaagggggctacagcaaagagcattatcattatcatgaataatatccaggggagaaaaaaaagtaagtgaaaaaaaaagaaaaggatgtacagagggcgacaccatacagaatatgctaaccaatactatgctgcttatgtataacagtggtaaagttctaaaatcatgcatggcatgacaaaaacaattcataatagtggttactttcaaagaaaaggcacagggtatgcctataaatttaagttctgcataaaatttagttccatataagaaacaaaatctacagcaatttccagaggtacctaatattgacaatatatatggaaaaatagcaaaaatcctacctatataatcaaatatttccaaattcaaagcaataattaaaggaaatataagaaccaactcttactttaatgtttctgtaggtctcattcagaaccatcttgttaaattcaggattcttcagcgtgtcaaggaagtttgaatacaggctatgaaagtttggctcaatactgactctcttcataaccagatactgtgaaacccaaggcataaattcttctttcaccgtttcctttagctcttcaacctagccggtcaatacgacatgggaagcacagaattacactatgataaaataacacttggtttctatgaaccatactatacagcacatggctccttgcaaaactaactagatgctaaagaatgactttccttcacaccagatagatgctatgaagaaaagtatgctcaattccatagtcaatcacaactcaacccatacgtgattgggactgaaacatctatggctattttcagctttaaaattataaaacatgtagtaccccatctccacataaattactaatctataagctgccattaacatacctacagtgtaaccaagaatggggaaaattccagaactatgttttcctaaatttccatctacaggaatccttagctaactctggcgtttccaagtacagttagttgacccttgaacaaggatttgaactacatagagtaaaattaaatgtagattttcttctattaatacctccactacctcggagacaccaagacctcctcttctcctcctcagcctattaaatataaagttaaagacctgtatgataatccatttccacttaacagatggtaaatatatcttttcttccttataattttccttcatagtttttctagtttattttattcttttttctagtttattttattctaagaatacagtattatatgcatataagataggtgttaatcaactatttgttttatcacagtaaggcttctgcatggca

SEQ ID NO: 1886749 - DNA, 4001 bp, Homo sapiens
tgtccaaaccgatgaggcatttgagtctgtggctttgtctttgcagaatttatagagcggcagcacgcaaagaacaggtattactactaccaccggcagtaccgccgcgtgccagacatcactgagtgcaaggaggaggacatcatgtgcatgtatgaagccgaaatgcagtggaagagggactagtacgtgagccatgctgggagtgtggagatctgcaccgtgtgctgctgggacactagtccctgggatgccacagggtggcatgcccagattttaggggtgacatgggaggagccagaccccagggctcttgctttcaattgttctcacagggtacaggaaaaggattccttgtgattagcctctcttgctccttttctccaccagcaaagtcgaccaagaaattatcaacattatgcaggatcggctcaaagcctgtcagcagagggaaggacagaactaccagcagaactgtatcaaggaagtggagcagttcacccaggtggccaaggcctaccaggaccgctgtgcgtgccccacccacccccaaccccccaccatcctcctgaggcctgggggccagaaccattgcaaatcttccctcccctcccttgtgctcacttgactttgccccctttgcatgtagcagaggcctcggttcccagcttgtttccattgcttccccagatcaggacctgggggcctacagttctgccaggaagtgcctggccaaacagaggcagaggatgctgcaagagagaaaagctgcaaaagaggccgccgctgccacctcctgaggcagctgtgggtgcccctgctgtgtggctctgtatgactgttgctgaaatataaagccctgcaacctgcctgtgtgtctggtgtgatctattggccccacgccccagattcaaaccaccactaaccatgcaggacacgggaaaaaaacagtaacacgcttaattcactttatttttcttgtataaaaaccctatgttgtagccacagctggagcctgagtccgctgcacggagactctggtgtgggtcttgacgaggtggtcagtgaactcctgatagggagacttggtgaatacagtctccttccagaggtcgggggtcaggtagctgtaggtcttagaaatggcatcaaaggtggccttggctgcaaaacaaaagaaccccaggagggtcagtggtgtgcttgaggcaagtcccccaacccaaaaattgtcgcactcctaggaacagagaggccattctgggcgggtctgtcgtgcattaggagagcctttctctgcctccctgaaaacacgccaagcacacactggacccgtgtggttaagcggagctgagagaccatggctatgccccatgtgtggaccacctaccgaagttgcccagggtggcagtgcagccccgggctgaggtgtagcagtcatcgataccagccatcatgagcagcttcttaggcacaggtgcggagacgatgccagtgcccctgggtgcagggatgaggcgtaccagcacagagccgcagcggcctgtcacctggtgagggaaggagtcaggagacgggggcccgagggagcctgccccacggcaggcccatcacctgccaccagcctaccttgcaagggacagtgtggggcttgccgatcttgttcccccagtagcctctgcgcacggggacgatggagagcttggccaggatgatggccccacggatggcggtggccacctccttggagcacttaacacccagaccgacgtggccattgtagtccccgatagcaacaaatgcctgcgaaaagatgtgtgtgaggcagctggtggccctacacccaatcactgcccaccgcccagggcctgttgcacccctcaaggaaagagaggccacagtaaggcccatccgaggtcctgaggagatcttttctctctctccccgttacgaaagtcacacgggtgaagccaagtgcaactatgcagagccgagagagtcccggcaagcccagcgcagccccctccaggacagccgggtaccttgaacctggtgcgctggccggcacgggtctgcttctgcactggcataatcttcaaaacctcatccttgagagaggcccccaggaagaaatcaatgatctctgattcctgaaacaaacaagaaaattgtagggagagcattaaaaaaaaacttaataccattatgatattcaagaaccaaagtcacggccgggggcggtggctcaagcctgtaatcccagcactttgggagactgaggtgggcggatcacaaggtcaggagtccgataccagcctggccacatggtgaaaccccacctctattaaagacacaaaaaattagccgggcatggtggagtgcgcctgtaaccccagctattcaggaggctgaggcaggagaatcgcttgaacctgggaggtggaggttgcagtgagccgagatcacgccagcctaggcgatagggcgaaactgtgtaaccgcccaccccgcccaaaaaaaaccgaagaagtcatgaaccccctcacctggcttccccccgatctgtccccttcgtttcgtttttggaagcttgtatgtaaggttaccctatttctgcatctcaatcgtttcttcctatttgccctttttctcttgtttggtgagatgtggctttccactcagatttccttttgctttgtccagctttggcctagccatgaccaccgtaccttgctagggcgaacgctcacatgacaaatatgccattagcctttccccactgcacccgctggatgcagatgacagctgtcccgtacacgcggactatgacagtttgctaacccttacagtgtcctcccacaacctgaacttcatcatcctctcggatggcatgaaccaagcgctgcttctctttcagttctttcgaaatgaattcgctgcgaatgtgggaagatgcgctgaaatgccttttgtggctctggcttcgctcaggtatccatccaacctctaagtggaatcctctcctcagccagcccgcaacacaacctcaacctctcacgcgagacgctgggccctttaatgcgagtcaatggcagatgctaatcctccaaccccagcccaaatgactccggggtcgcacttgctcaacgccccaacgaccgacgcgtaccttaataggcagggagaagagatagatctcctccagggacttgatcttcatgtccttgaccaagcggcccaacttggtgacgggcatccactaaagggagaaaaggcgccagtgaccaggaccgctctccggcgccgcccaggggcccgaccccgagcgtggctgatacctacctccttatcctcggccttgcctccgcgagctccgcggcctcggccccggccccgtccacggccgcgaccccggccccggatgccactgccgaaacctccgcggaagccaccgcggttccccatcccagggccaccagggcccccgggcccccccgctgcaccggcgtcatccgccatttgctgggaaaagcgacaagaaggaactagtcagtgtggcctacgcatctggcagccccccgcgagacccagacaagggctcccgcccaggagcgcggactcgggagcctagacccgacccgatgtccgcggattcccgccgcccacgcagaggcccgctgcagcgaccaacaggactcacgtgttttgtcggaaaagaagaacgagacctactgggaagcagcttttatagcacgccaagcgccgcgagatctccgcagccccgccccaagcgggagcgggccgagctcctataagacaacctgtgattggctccgcggtgccccgccctcaccgggctctgagtgctcttgcccgtccggccccagccgcggcccgggaatctacgtcacccgaaaagcgactataaacgccggcgcctccgtccccagccgcggctcgggaatccacccgaagagtggctataaacgtccgcgcctcca

SEQ ID NO: 1886750 - DNA, 4001 bp, Homo sapiens
ctcagtcactcccttgacttttataataatttccttgctctctttatatttttgccactttcgtatatatcctgtattaactatggctgtagcaaacaatataatggctcaagcaacaggaatttaattcattcaagtgagcattctgttttgccaggggttaacactgtcattcaaaaactcaggttctggccacgcacagtggctcacacctgtaatcccagcacatttgggaggccgaggtaggcggatgacttgaggtcaggaattcgagacctggccaacatggtgaaaccccatctctactaaaaatacaaaaattagccagctgtggtggtgggttcctctaatcccagtcactcaggaggctgaggaaggagaactgtttgaatctttgagaggcggaggttgcagtgagctgagatggcaccactgcactcaagcctgggcgacagagcaagactctgtctcaataaataaataaataaataaataaataaataaataaataaataaaaagaaactcagggtctgcaattttccacacttgacttcaattattgctctgattattgccatcctagcccaccagacaggaaaagagcaccacagccctgagaagcacacactgggggttttaggaaccaggtagaagtggcgcacatcaagtccactccatacaatggaagaaaattttgtcacatgtacacacctaaccgcaagaaaggctgcgaaatgggctgtagctaggcagttatatgccccactacaattttgttactatgaaagaacagattttgataaacaatagtattgccacacatttcaaaataatatggctgtgttttagcctgttttctgaactttaaatgaatggaaatatacgatgtaattcttttgcgtctggcttctgatgtttgtatttatgctcttttgacaaagctgttttaaacaatatgtgcagagaatgcagtacacagagaaacgttcaggcagggagttgtgctacctgagccatacagtcccagagctacaacttccctcacaaatcataccctctatatgccactttctccaacgcaaataagaggtttgctctttctctctctctctctctttttttttttaaggtgaacaggaagtaggatttttttttttttttttgagatggagtcttgctctgtcgcccaggctggagtgcagtggcaccatctcagctcactgcaagctctgcctcccgggttcacaccattctcccacctcagcctccagagtagctgggactacaggcacccgccaccacgtccagctaattttttgtatttttagtagagacggggtttcactgtgttagccaggatggtctcaatctcctgacctcgtgatccgcctgccacagcctcccaaagtgctgggattacaggtgtgagccaccgcgcccggcccagaaagtaggatttattggtgagcattaagagggggcagcacagtggaagccctcacaagagcagggcccgccacttgtccagagggccactactggggatgtaactgaccccgcagccatctgggatgagctgcttctcagcccccatgtcttcaaattcatctgcattgaacttggtaaagccccacttcttagagatgtgggatcttctggcaaccagggaacttcaacttggccctacatagggcctcaatcatgtgctccttgttatgcagcttggtgcagatggacatggtaacttggccaatgtgaacctcggccacagtgccctgcggctttccaaaggcacctcgcatacctgtttggagcctagactggggatagcacaaagtcagagacatgaacatccatctgaaaggcctgtctctaaggtcccttagagcaacccatacaagaaacaggctgagtacgctaccaaggaagctgctgtgggcagccattgtacactgggcctccctgaggaaaggaactcagttggcttaactgtctgcagaggatttacatgctctcttaatcccatgattaatcatgctacctactcaacttgactttagtgaaatgttatctccacagcttttatatcatgaattcgaactgagagagccattccactcacttttcccccagcactccctctccagcaagactgataactggcatttgcataatggctgactgggacactacccagtgtccttttataaccagagaacacaacattaactggttcgcactcgggcccttatgaccttggctttattaacactatattccaaataagctgatgcaccaaaaattctacacataaaatatttgaagctgattactaagctatttacttcaaagagaatacttcaactctttccttccgtaacaatagttgtgtctggtttcaggaactgggtggttggaggaaaaaggtgagagggaagcatattttctatgatagttttgatagagacaggaggcagagaaattctaggcagacagggacaggtgcccagcaaaaccccaccttcgagccaaaaagcctgaaacctgtggcccaaagtgagaatttccatccctgtttgtctgctctctcctgaatggttctttctgagtgtctttttaccaatcgaatgttgccttttccaaaactacctacagcacctcccatcctgtgcccatgaagaccccagactcagcgagcagagaagagaagcagctggacatcagggagaggcgacttgacttcagaagacagtggcagggaggcaacttgacttcaagggagagtgagctgcccttcccattccctttccagctccactcttcactgagagctgctttcatcattcaataaaattctccgcattcaccatctttcaatttgtccacatgacctcatgcctcttaggcaccagacaagaatttgggacgcaccaagtgccggtattcaaaaaggctgtcacactggccctttaccctcactggtggaaagcagccgccctacgcaacaaggcaaagggaccactgacctggtaacacattgccgtctgcagatgagagaggtaagagagcattataacatgtcctctggggccttgggatcacagacacccccacctggacgctgctgcaagcctacacagagtttgcttctgctggtgctaaagcaggcagccagttcctgcactcgctctcctatgcgctacatcccacaaagggtggagcacaacagaccccagtgaacacggtttgttcccaccagcgtccaatcagctagccagttcacgcactcattcacctgcgcattccctcccacaaggggttgagcggggtgggctgagtaaatggggtacccctgtcacaagtcccaaagaggggtcaagaaaatatcctgcatcagttttattatagatccggctgctcacagtggctcgtgcctgtaatcccagcactttaggaggccaagataggaggatcacttgagcccaggagtttgagaccagcctcgagccatgagcaacatggcgagacctcagctctacaaaaaatacaaaaattagccaggtgcagtggtgcgcacgtgtagttccagctacttgggaggctgaggtgggagaatcatttgggcccaggaggttgaggctgcagtgagccatgatggcagcattgcactacagcctaggcaactgggtgataccctgtctcaaaaaaaataaaaaattaaaaaaaaaaatagacccacaaattctttgacactcctttcaaaaactggagctaattcctctctctatagtatgggctgtgtttagtgactcatttcttttttttttttttttttttttttgagacagagtctcgctctgtcacccaggcttgagtgcaggggcacgatctcggctcactgcaagctctacctcccaggttgacgccattctcctgcctcagccttcccagtagctgggactataggtgcccgccaccaggcccagctaattttttgtat

SEQ ID NO: 1886751 - DNA, 4001 bp, Homo sapiens
gtgagccaagatcgtaccactgcactccagcctgggcaacaagagcgaaaccctgtcccccactacccaaaaaacaaacaaacgaaaaaaaaccttaaaatgtttttgggatgtcctatcattttcaaggttggtgaaatgcaataaggcaggcagaacatatgcctgaacctgataggtacaatagtttctacctttattataccaacctgaattcataaagctgtgagtttttgatctaagccctttagaatgtgatgcacatacatgttaccacttatactatcatttgttaataaaaaatccttactaaataattcaactaactttacaactacaaatatcctaattctttcctccaattagactgaattgaatataatctgtttttcttttcccaactttggatactgaagtagctttcacaatttcatttaagcagctttccttatcacagtgactccaaaccccttaccaaacactaaggcataactaaggcaaacttatgaataatccatgctctcatttgcctcccccttacctggaagctgtgatgaaagtcctccaataccactgaatgcagtggtctgattgggggttgaaaggggtggaaatgcttttgctggtgactgaggggtactgaatgcagaacccaaatttggaggaaaaccctgcatactctgggtgtgaggggcagctgaaccacctatactaagagatgtcattccagcaagagggtcaatctaaagaaaaacattataaaaatgtattaaacatacttcgaggaaaggcagacacatgtaaagcaatctttaacaacagctcttcataatcttaaaaagcaaactattacacccactcaatcacgatgatacttaaatcccagttatcaagtcaagtgtgtcagtcacttttcttactgtgtcacatacagaataggtttaaagagtttgcctttgacaaagtacaggttgagtatcccttattgaaaatacttggaaccagaaaagttttcaattttggattttagaatatttgcatatacataaccagatatcctaacaatcccatcatggggatgggacccatgtcaaaacatgaaattcacttgtttcacatatacctatatacacataaccagaatgtaattttatacagtttttttaaaagaattttttgcatgaaacataattatgactatgttttgactcaacacgtagcatcagatcaggtatggaattttctacttgtggcgtgtcatgtcagtgctccaaaagtttgattttggagcattttggatttacagattaaggatgctcaacctataacagagccataaaaagggctacaaaatctaatgaacaacacttaagatgaactgccctaaactaaacatttagtagtgacatgggacacttattatattaataaatcctcacaaattccaataagccactttaaaacaatcaagctaaatttaagtaagtttcaacataaataaaagtattagaaattagaaacgaatctcccaaaataaatttagtcgaaatttggggatttttgaggtgggggaagatcagctccaattttgaaaacaaaaacaaggtatgctattcaccaaaatatgtatttttaaaatatctaataactgcacttccaggcttaagtgtgtggcactacttcataccttcatggctatagaaaatgacaagcaaatgccttttatagggaagtagccactgaatcactaacttttagcctctttcttccttaaaacccaatctgccattcaatgcatctgaaaatagaagcgcaatatgttgctcccagagagaagggggtggttgatgtcagggagtaacttaaatgtaccttgtttttaaaagagcagttcagttgagagctgaagagccccagttataacaagtcgttatgctctagcactgttgcttggcccgtgaagctacaaacaagacacatcaggttcaaaggcagtgcttatgtctcaagagtctacgtaattcatattttaaaaagaaaccctcttcatttacctaaataaattgtctgtatatttcctcttagagtcacgttctatttgatgataaaatctattgttaactacaatgcctatttacatatctcctttaaaataagtggatgctagacatgcagttatctaaaatgtaataaattcagacaatttattaatgacataggagcttattctattccaaatctatggcaaatgaagatgtatcaaatgtagcactcatttacctgaacaggagaaatggcatctaagctgctagcactaggaggacgtccttttggcataactccaggtggtggttgtctggccttattcataacattactgcaattggctaccatggtgaggatagtttctgatagctcctgagaaacactcctaaaatagaggggaaaaggtaaaaaatatcagttcctattctctagcacatgtaagtaaaccaaccgatctgattttttttttttttaagatggagtctcactctgtcacccagactggagtgcagtagcacgatatcaattcactgcaacctctgccccccgggttcaagcgattcttctgcctcagcctcccgagtaccaatctgattttctaataaagaaactttgttgaggctgggcacggtggctcatacctgtagtctcactgctttgaaaggctgaggcggaaggattgcttgagccaggagtttgaggccaacctgggcaagatagcgagaccccatgtctacaaatattaaataagtattaaaaagtcgaggctgagcgtagtggttcatgcctgtaatcccagcactttgggaggccaaggcgggggtattgcctgaggtcaggagttcgagaccagcctggctaacatggtgaaaccccgtctctactaaaaacacaaaaattagccaggcatggtggcgcatgcctgtagtcccagctactcgggaggctgaggcaggagaatcactcgaatctgggaggcagaggttgcagtgagccgagatcgcgccactgcactccagtctgggtgacagagtaagactccgtcttcaaaaaaaaagttagctggatgtcatggcatgtgcctgtaatcccagttacttgggaggctgaggtgggaggactgatagagcccaggagttcgaggctgcaatgagctataatcgcaccacagcacttcagcctgggtaagagatgagaagggaaagcggaaggaaaacttgctggagcatgtagctaaatttctgccacatcccatccctctgcatctgtcactcatcactagaattttctgagtactggctttctcttgaaactaatttgcacctctgaaatgaactagtatatagtacaaccaaaatatattaaaattttccagaaaacattccatagcttcaaccactttgtcaaaaattatgcccaaacccagacatatcaaagcaaacaggcatgcaatttttatactagtatatcacagtctaagataatacatgtacttatagacaaaaacaccatgcatagtaattacctttaacaagcacatgaagcagtgactgacctctaaaacaaatgtcaagtagggtaaatgtttacttgacaattaaaccaattttcctatcttaggttgctattacaggttgagcatcccaaatctgagaatctgaataccaaacgctacaaaatctaaaactttttgaatgccaatgtttaaaggaaatgctcattgtagcatttcggagtttgaattttggaatttgaggtgtatattaagcaagtaagtataatgcaaatggtttttaaaaaattttttaaaccaaaatcctaaatacttctgaccccaagcatttcaaagaagggatactcaatctgtattgcctcatacaactatggggtcccttgtattcagaagctctactcgggccgggtgcggtggctcatgcctataatcctagcactct

SEQ ID NO: 1886752 - DNA, 4001 bp, Homo sapiens
agggaggtgggccacagaacttcaagtaaaggggttggctcagcgcccactttgagggggcagctgtgggggttagggccccccaccccaggactactaatctctggctggagacgggggccttagcctggaattagacctagccagagccttccagaaggtttccttgtaccatatgggggtctgcaacccattgcccaccctttccgagtggagtggggtcgatccctggacaactgggcaggtttctggagttgggcacacatctcagggctggaagcaagagggccccaggctcaccatgatctgcgtctagacagcagctccacaggcccccagagctcaggagcctgcatttcacagtgggtgtgggctgacatcacaatagcattgtccagctcaagccagtcacaaccctggttcaggacccagagaccccgtacagcccagcccttgcccccttctctgaaggatcacaggtagccaggcgcggtggctcacacctgtaatcccagcagtttgggaggccaaggcaggaggatcacttgagcccaggagaccagcctgggcaactcagtgagaccccacctcttaaaaaaaaaaaaagccatacggctagctgcagtggctcatgcctgtaagcctaacactttgggaggccgaggcaggcagatcacttaaggtcaggagttcgaaccagcctggccaacatggtgaaaccccatcgctactaaaaatacaagaaaattagccaagtgtggtggcagttgcttgtagtcccagctacttgggaggctgaggcagaattgcttgaacccgggaggcggaagttgtagtaagctgagatggtgtcactgcactccagcctgggtgacagcgagactccgtctcaaaaaaataaataaaataaaataaaaataaaagagagcagctcttgacctgagataggtctatgaagcgcctggggcttgagagtggctgacagcgtttccccagaagcactgggtcagaaccaagcttcatggagctgtctcccccaggccagggcttcagtgggatcacagggattgccaccctcttctctccaatactgcggcccaggtggctggagatcctaaggcttaggggttttaggcattgactcactgggggtcttcacttaggatctgatactcaggtgctagctccacggcagtgacaactaaactcccgggtaacctgccgccccagagcagggggcccagcctcccaaaccaggtgtctgatccactccagcctagcaccacgggggcgctgagttcatctaggcctagttggtcaaatcctttagaatctcacctggtctcacaaggaagccactggaagcctctgagcttcccatccttgctagtgctctgctggctccacctggagccctttggaccaaggcattttacctgccagtgtagttcacttgagatgcgcatggccacaagactgttcgtagtctggctcctccacttaagaggcgtcggaccttacacatcacctgccaacctcccatatcctacccttgtgtccaaagccaggaaagaagaggaggcatctcgctagggttctccccgccacagcgtgaacatatgcacttgccgccaggctgataggcgagtcggggccccaagaacacccgcatgcagtgagttagacaaaacagctttatttgaaagacgtgggacagccaagttcccccaaccccgcggtcctggcgacgtcggtgtcaggcgtgggaggaccagtgtcctgcggagaaagaacaaggttaggggtctgcagtcggggtcaggagtcaggggccagacctcgcgagcgaccgcacccgggggggaggcggcagcgcctgtcggggcctgggtttcaccgccgcacatggggcagcgcgcggtgagctgaggcccccgggggctctgggcgccgaatctcacccgcggccacggccaaagccgggggcgattttcaaccaacgccggtctcgaagaccaccagcgagacgccagtggtcaacgcggcaggacctacctaagtgaagaggagagcgcaatggaggcgcggacgtttatagccactcttcgggtggattcccgagccgcggctggggacggaggcgccggcgtttatagtcgcttttcgggtgacgtagattcccgggccgcggctggggccggacgggcaagagcactcagagcccggtgagggcggggcaccgcggagccaatcacaggttgtcttataggagctcggcccgctcccgcttggggcggggctgcggagatctcgcggcgcttggcgtgctataaaagctgcttcccagtaggtctcgttcttcttttccgacaaaacacgtgagtcctgttggtcgctgcagcgggcctctgcgtgggcggcgggaatccgcggacatcgggtcgggtctaggctcccgagtccgcgctcctgggcgggagcccttgtctgggtctcgcggggggctgccagatgcgtaggccacactgactagttccttcttgtcgcttttcccagcaaatggcggatgacgccggtgcagcgggggggcccgggggccctggtggccctgggatggggaaccgcggtggcttccgcggaggtttcggcagtggcatccggggccggggtcgcggccgtggacggggccggggccgaggccgcggagctcgcggaggcaaggccgaggataaggaggtaggtatcagccacgctcggggtcgggcccctgggcggcgccggagagcggtcctggtcactggcgccttttctccctttagtggatgcccgtcaccaagttgggccgcttggtcaaggacatgaagatcaagtccctggaggagatctatctcttctccctgcctattaaggtacgcgtcggtcgttggggcgttgagcaagtgcgaccccggagtcatttgggctggggttggaggattagcatctgccattgactcgcattaaagggcccagcgtctcgcgtgagaggttgaggttgtgttgcgggctggctgaggagaggattccacttagaggttggatggatacctgagcgaagccagagccacaaaaggcatttcagcgcatcttcccacattcgcagcgaattcatttcgaaagaactgaaagagaagcagcgcttggttcatgccatccgagaggatgatgaagttcaggttgtgggaggacactgtaagggttagcaaactgtcatagtccgcgtgtacgggacagctgtcatctgcatccagcgggtgcagtggggaaaggctaatggcatatttgtcatgtgagcgttcgccctagcaaggtacggtggtcatggctaggccaaagctggacaaagcaaaaggaaatctgagtggaaagccacatctcaccaaacaagagaaaaagggcaaataggaagaaacgattgagatgcagaaatagggtaaccttacatacaagcttccaaaaacgaaacgaaggggacagatcggggggaagccaggtgagggggttcatgacttcttcggttttttttgggcggggtgggcggttacacagtttcgccctatcgcctaggctggcgtgatctcggctcactgcaacctccacctcccaggttcaagcgattctcctgcctcagcctcctgaatagctggggttacaggcgcactccaccatgcccggctaattttttgtgtctttaatagaggtggggtttcaccatgtggccaggctggtatcggactcctgaccttgtgatccgcccacctcagtctcccaaagtgctgggattacaggcttgagccaccgcccccggccgtgactttggttcttgaatatcataatggtattaagtttttttttaatgctctccctacaattttcttgtttgtttcaggaatcagagatcattgatttcttcctgggggcctctctcaaggatgaggttttgaagattatgccagtgcaga

SEQ ID NO: 1886753 - DNA, 4001 bp, Homo sapiens
tcggaagttcgagaccagcctgactaacatggagaaaccctgtctctactaaaagtacaaaatgagctgggcatagtgacgcatgcctgcaatcccagcaactcaggagtctgaggcaggagaattgcttgaacctgggaggcagaggttgcggtgagccgagatcacaccattgcactccagtctgggcaacaagggcaaaactccacttcaaaaaaaaaaaaaaatttatttgatgaaatattcagcaaaaagctcagaagagacatcaaatctaaagatagttctggagatacctacagaggtactgcccgaagccactaaaataaaggaaggtaagaaaaagaaagactctacaaggatagaacaaacttcttttgaaagaactaacacattcttgtgaaaagctccctaagcctcaaagccgcaccttcctactgccaactattttttttttgagagagagtttcgctcttgttacccaggctggagtgcagtggcgtgatctcagctcactgcaatctccaccttccagattcaagtgattctcctgcctcagcctccccggtagctgggattacaggtgcccgccaccatgtccagctaatttttgtattttaggtagagatggggtttcaccatgttggccaggctggtctccaactccttacctcaggtgattcacccacctcagcctcccaaagtgctaggattatggccgtgagccactgcacccagcttctgctgccaacttttatcccaaccagggtgaactagggtaacagaaggattactcactggtttccaaattctgatgctacaaaaaggaaccctgttttaagcacacacatggcagcagcaacgggtacagtatcaaaatatttgagccggatctcagtaacctggtgagaaaagaaacattctggtgtacaaacaaagtgaagtgagccccgtattataagacagcacaggctgagtagcaaataaaatactgtatttcatatctgaccaggggtcaacaaactccggctcatgggccagtcatgccaatcattactggctgtggctgtcttgtactataatggcagagttgagtaattgagacggagactacgtagctcacaaaagctgcaagtatttactatgtggcctttacaaaaaaatgtttgccaattcctgatccaaacagctatctaagaaattgcccaacaactcacagagctcgtccataggataaaacaagtaacagatcatgtttattaccagttttcagcagaaacagagacctttatcttcttcacaccaaaaataatcactatcttcttcacctaaaaataatcactacaagtggcattgccgctcttatattgtatgtaagattactagaccaaaaatctgataaccagagagaaaatctatactcatataccggttccaagggcaactactttctaagttctcatttttttaacttgtaaagtattacctgtcttgcctatctcatctcatagagtagctatactggtccatccatggtctacttaccatatcttcatctgtctccaaagtgatcttaaagatatctccctgctcagtttgagccaaaaagaagaacatcgatttggttttatgggttgcagagcagacaaaaatcattcctctttcagggtcatccaggtcattctagcaaagtcaaaaacacaatcaatgtcttagaaatgggtacttcttagttctggaattcagcactttaccaatagggattacaaatgacattaaaggcctaaaggcacaagctttgatccacagtgtcctgccagccagagcactggaaccccacagctcaaaattctaatataaatatctaataaaatctgggtaaccaaaagagtcccaattccactctacagcctgatcagattcataaggcaaaaactgtgtccagagaaaaatgtcagagaagagacatgaaattttttaaagagtcatcatttcaggctgtgaaacactgctccatccaaattaccctgttctacatcaaatgcctgattcctaaaaggcacctccttaggtatgactttgaattttttttcttttaaagacaaggtctcactatgttgcccagactggtctctaactcctgggctcaagggatcctcccgcctcagcctctcaagtagctggggatcagaggcacatcactgcacctgccttgcgttttttaacgtttccaacagtttctatttctcccaccgagtaagctctgctctgcaagaagttttagactttgttattgcaaagccaaatacagtgcctggcacagttaggtgctcaatgtctaatcaacttagtgacttcctatcccttaacaagaagaatttaacttgccaaatttcttctaaggttttctaaaattgctggaatcttacgtactacatattacattaaattaaatcctaaagttcaaccccagaacagataaatatttaacagcaaataaataatccaggggattgaggggagagatggcagtaaatgattcaaagaatccacaccaaaaccaccaggtgaaaagacgccggggaagagggatattcactagtctcaggaagagggatattcattagtctcaaagatcaccatcaaattccattatcagttaccaaaaaagaaacaataccgttacaatgaagacaatgggcaggcaccaccttaacaaagtgaccaatttaatgtctcaatcagataaaccaacattatgtacacacaatgtgtgacatagtggagaatatgtatcacttatacatcactccctatgtagtaattatatcagaaatattaaactcaatataatcatgaggaaacaaactatgggacagactataagagaattagctggccaggcgcagtggctcacgcctgtaatcccaacactttgggaggctgaggcaggcagatcacaaggtcacgagttcgataccagcctggccaatatggtgagaccccatctctactaaaaatataaaaattagctgggcatggtaacaggtgcctgtagtcccagctacttgggaggctgagatggaaggatcacttgagactgggaggtcaaggatgcagtgagccaagattgcgccactgcactccagcctgggcaacagagcaagacaccatcttaaaaaaaaaaaaaaaaaaaaagaaagaaaattagcccagactggcagggcacttcatgcctgtaaccccagcaccttgggaggccaaggcaggcagatgacttgaggtcaggagtttgggacgagaatggccaacatggcaaaccccgtctctattaaaaatacaaaaaaggccgggtgcggtggctcacgcctgtaatcccagcactttgggaggccgaggcgggcagatcacgaggtcaggaaattgagatcacggtgaaacccaatctttactaaaaatacaaaaaaaaaaaaattagccgggcgtggtggtgggcgcctgtagtcccagctacccgagaggctgaggcaggagaaatggcgtgaacccgggaggcggagcttgcagtgagcccagatcgcaccactacactctagcctgggtgacagagcgagactccgtctcaaataaataaataaataaaatacaaaaaataaaaatacaaaaaaaatttagccaggtgtggcagtgcatgcctgtaatcctggctacatgggaggctgaggtgggaaaatcacttgaacccggggggcagaggtttcagtgagccaagatcacaacactgcactccagcatgggcaacagagcaagactccatctcaaaaaaaaaagaaaaaaaggtgagagggaaatatcctgaactaagggagactaaaggccaattaattacaaaggaactttttgggataatgagagaaatatgaatataaactatacataaggtaactatactacacaaaatgttacaatttcttgggtatgatattggcaatctggtaatg

SEQ ID NO: 1886754 - DNA, 4001 bp, Homo sapiens
cagaagaccagcctggccaacatagtgaaaccccatctctactaaaaatacaaaaattagctgggcgttgtggcagcacctgtagtcccagctactcaggaggctgaggcagaggttgcagcgagctgagattgtgccactgcaccccagcctgggcaacagagcaagactgtctcaaaaaaaagaaaaaaaggtatgcacaaggaagaaaacgatcttttcgtttttttttgagatggagtctcactctgtcgcccaggctggagtgcagtggcgagatctcggctcactgcaagctccacctcccgggttcacgccattctcctgcctcagcttcccgagtagctggaccacaggcgcccgccacgatgcccggctattttctttttgtatttttagtagagatggggtttcactgtgttagccagaatggtctcgatctcctgacctcatgatccgccagccttgcctcccaaagtgctgggattacaggcgtgagccaccacgcccggccggaaaacaatcttaaaaaaaaacactgaggtgactgaaagaaacgcaaagagacagggtccccattacctcataatccatttccagacaagcaaacattggattttcaaatccgacatctactccaactacatgatacactaaagtgtttgctttgtgggcttccaggggagatgaaatggtaagtcgggctgcagcatctctgttcaaaatatacaccaatttctgtttctcaatggcacctgtagttgaaggagataaaacatacaagattcccagataatgagaagagagacttatagaacagctagagtcacatcatgcttttcttttaatcattattaacagcagtaactctacaagtataaaaactcaggattctgttttctatcatcagaatagcactttgggaggctgaggtgggtggatcacctgaggtcaggagttcaagaccagcctgactaacacagtaaaaccttgtctctactaaatacaaaaaattagctaggtgtggtggtgcatgcctctaatcccagctacttgggaggctggggcaggagaattgcttgaacctgagacgcaaaggttgcagtgagctgagatcgcaccactgcactccagcctgggcaacaagtgcgaaactctgcctcatttgaaaaaaaaaaaaaaaaagaatagacaatagtggagctgggcacagtggctcaagtctgtaatcccagcactttgggaggccaagacagaaggaaggattgcttgagcccaggaattcaagaccatcctgggcagcattgtgagatccccatctctctcttatttatttatttatttatttatttatttatttatttatttatttttgagatgcagtctcactctgtcgtccgggctggagtgcagtagcgctatctcggctcactgcaacctttgcctcccgggttcaagcgattctcctgccccaagtagctgggattacaggcacccaccaccacacccagctaattttttgtatttttggtagagactgggtttcaccatgttggccaggctggtctcaaactcctgacctcaagtgatcctcccaccttggcctcccaaagtgctgggattacaggtgtgagccaccgcacctggctgagaccccatctcttttaaagataaatagccaccgtgcccggctgagacccccatctcttaaaaataaataaataaatttttttaaagacaatggcatcattgtggcccccttcttcctaatacaggtcttaaatatcccactaactagtcaaaattttttaatgagtcctacatttaaggatactgaaaaacagtaattcataaaattatcattagccttattctctgaaatagatctaacgatttatgactgccctctagaggcctgatcagacacacaaaaattttcttcaagaatttatcagagaagagacatgaatgtgaatcatcacttcaggctgatgaaagcaacgatattcactgtctaataacataagatcatttcattgtagtctttttgccaaagaaaaagaaattgaaaaacacccatttccaactagatgggaagtagaaaggtgtgttaagatttttcccattgttttaaaagaaaatgcaactcttttaaaaaggaaatgcaactttaaacctagagtaaatccaaacatgatgccaaacccacataagtaattaattggcactggcacaccaccaagagcacagcattgttatcctaaactaggcatatacagcaagtagagtaaatcacttactaatcataacggctcgccctttgggatccacagctaagaactggccaggaacgatgcgacggcatccactcttgccaaaggtttcttggtgaatcttctcaaacatattcttagatggctggtattccaaaataacaattcgaccagagtcactgccaactacaatgtagtctttggtgccacctgtcagcctaaaggccatgagtgaccggataacaccgaatacttccacagtgagtagggtatgtactttgccagtgttggggtctgggcgaagcagctccaagatcttcccacgggaaacaacaatttcttgttgtttggttcctagatcaccaaaaaataaagatcataaacaaccagaacccagcctggccaccatggtgaaaccccgtctctactaaaaatacaaaaattagccaggcgtggtggcacatgcctgtaatcccagctactcgggaggctaaggcaggagaatcgcttgaacccaggaggtagaggttgctgtgagccaagactgtgccactgcactccggcctgggcaacagagcaaaactccgtctcaaaaaaaaattagtcaggtgtgatggcctgtgcctctagtcccagctacgtgggaggacagtttgaacccaggagttcagagaatgtagtgggttataatcctgccattgcactccatcctgggaaacgcagcaagatatcgtctctaaaaaaaaaaaaaaaaaaaaaaaaggccacgcacagtggctcacacctgttatcccagcactttgggaggctgaggcaggcagatcacttgaggtcaggagtttgaaaccagcctggccaacatggtgggatcccatctctactaaaaatacaaaaattagccaggtgtggtggcacgtgcctataatcccagctactccagaggctgacacaggagaatcgcttgaacctgggagacggagtttgcagtgagccgaggtcgcactactgtactccagcctgggcaacacagcaagactacgtctcaaaaaaaaaaaaaaaaaaaagaaaacttctccatcattttagataaaaaggaagactgaattggaaaaggaatttgaaagataaaattagtattaaaaatgtgctttcagcagggcacagtagctcatgcctgtaatcccagcactttgggaggctaaggtgggtggatcacgaggtcaggaattcgagatcagcctggccaatatggtgaaacctcatctctactaaaaatatgaaaaattagccgggcatggtggtgcacgcatgtaatcccagctactcaggaggctgaggcaggagaatcgcttgaacccaggaggcggaggtggcagtgagccaagatcacaccactgcgctccagcctgggtgacagagcaggactctgtttcaaggaaaaaacaaaaacaaaaacaaaacaaacaaaaaacaaaaacaaaacaaacaaaaaacaaaaacgtgctttcaaaaattctatccaaactccagctgagattcattgcattacatagtgaagtcagtcacaaatctccaaattcccatatacgtatttccttaatcaaatgcagcaaagaataactaaattacccaaatgaagactcaaacccgcaggaagagccataatgaggatcagagaaaataacaacatgaaatatgaatgctgtgtggtcagttaggctgcctctc

SEQ ID NO: 1886755 - DNA, 4001 bp, Homo sapiens
cccgccaggccaccacctggctggcagcagctgtttacaggagtatggactgcccttcatggagaccagcgccaagacgggcctcaacgtggacttggccttcacagccatagcaaagtaagtcctgccagtcaccaggactcccccagcccagggcctgaatcctcattagagtccaggccatcgtgtccccttgtcacccccactccgcagggagttgaagcagcgctccatgaaggctcccagcgagccgcgcttccggctgcatgattacgttaagagggagggtcgaggggcctcctgctgccgcccttgaacctggctgagctcagtcctctggaggaagccgtccagtccctagaaggctggacagagggtctccaggcccttctgactttgttgcccagtggccaacgcccgagtgtctgttttcaggagccccaggtcaagccttgtcccttcctcctcccagcaacagtcccaacaagcaggcttctgagagcccgtggccgcacactggccgccacggaaaagcagtcttctgcacgggacggggagcggcaagtggacagactttgccacggtgctctgctgccccctcctgggcacgtccaggtgagggagggctggggctggcaccacgcacagtgcctaaccctagaaaagccatgtcttcagccgcacatgctcaggcagctaagggaggacgcctgcccacgcctgggacagaaggcttcactgctaatcacatcgtgcatctgtgtgtcctgggagctgcctgctcccggcccaccctctaggaggctctggctcaaacagcaatagggtcttcctcactgaccttggaggatgcctgtggccttgtgataaaatgtgggaaatcacagaaaacaccagaaacaacaactgccagcccggcctggccacaggtgaggtctgtgatttccgagcacgctccaccttgcactcaacttggccttttgattgcacaagcctttgttttcagtcctagtgaataaagttgtgttttctggagcgtctgtctcatctgttgaaaaaaatccacttctagagcaggatgctggagtttgagagactcagcaaggcccagaaccctcagcaggtgtgtggctaccattcctccatggcccatggctgcctccctaaggaggcacatgggaaccctaggtggtgtcaacttccctccacaaatctcaaaagcctttttggactcaccctggggcaaaaggcatgaaaaacagtatttgactgggcgtggtggctcacacctgtgatcccagcactttgggaggctgaggtgggcagatcacctgaggtcaggagtttgagaccagcctaacacggagaaaccccgtctctactaaaaatacaaaattagccgggcgtggtggtgggcgcctgtaattccagccatttgggaggctcaggcaggaaaatcgcttgaggtggaggttgtgccatcgcactcccgcctgggaaacgagcaaaactccgtctcaaaaaaaaaaaaaaaaaatcacgggcagaaatggagaaggcaatcccaagagatgaaaagtcactggtaacgagcttccgttttcatgtctgtacccttttccaagattgcctgtggatcagccagacctctggggtgccagaataggaaaataaagacacttgagagaaaaccgaatcaactcactacctttctttattgctaagcacttcaatagacacagcgcccaccttaccgctaggccctccggattgaggtttacttaggttcaaaacttgcagccggctcgcgacgaaacctgaaagtcagcgccaaaatacagacattaagtccccactccttcgtttcgggcaacacctgtttccactctcagctccccgtcaggagtgcgcaccctcaagcctcagtcttgctaaataatcagactgcacgtgcagttttcatacgaggtgtcagaagtcaaagcaattcatcacagactgggagaataagggaacccaagcccggcccagtcttacctgcaggtagctgagggcctgagattcgggaagaaacctttaaacgctaagggacaaagtggtgcgtaggccaggcctggacgcccagggacctggccggcctgcagcgttcggacggccctcaaagccacgctcgtggctcagttcgtcccaagatcgtagcacatggcgaacgtattaacaaacctcttccccctcggactcgaccccgaaaagacaggggcgggcgaggctcaagcttttatagaaactgtcccacctctgtcattgggctatcctggcggaagtgcccgccttcccccgccgctggtacgctccgctccctgccgcgttgtttccaccaatcgtaccgtggcatttcttttggagacggtctctcagacccagacccgaagctcctcccttatgcagagtccgtgaagcctaacggtgagtgacggatgaacaaagccaatcagacttcgatctgcaacatagagtgattctgaagctgccattcccgccccgcgacgacgaggccgccggaagtcgtagtttcggaagtgcggcgcgtgaggcagccgtccgggcccggagaggcggggaactacacgtcccggcgggcgcagcggcctggcgcttccggctcgcgcgtctagtccctttcccggccggcggccgagggggcatcatgaagcgggctggcggcgctgccgctcccgggcggccgcgggcgggtgagtgtccccgcggcgcgcccgacccggggctcgcgcctcgggaccgcgcggtggggcgggatcgggcgcgtggagatcgaggcgaggcgaggcgaggcgaggggtcgggccggggcggggaggggggggcggggctgagacggtcggggtcggggtcagggtcggggtccgcgtcgctgtccgtccgccagtcagtagtccgtccctcgctccgtcctgttctcgcgcagttctttactcattccttcttcctgcattccccgagactcccgggtgccaggcactgttctgggcgccgggagaccgcggagaacacggtcccagttctcctgtgctcggcgtctgctgcagggttccccaacctccgcaccatcgaccacgcggcccgggtcgctttttgctgcgaggagctgccctgtacattgtaggatgtggaacagcttgcctggctcctggccgctagataccagtaaacaccaccccttcctcaattgcgataacaaatgtctccatgcattggcaaatgcctcctgcggaacaactccccccatcccccatctagacagacagggtggtgggattgacaataggtagttaaaatcatggggagcagcggtatgtgctgtgaaagaaagaaagagggtgctgaaaaagtgagtactggccgggggtaggggcggcgctaccgttagccaaaggcctgttggagaagcagccagtcccaggacatgcaggaggagcattccaagtagaaagagccagatgtacataggcctggggtgagaaggggcctgacgcaccccagcaagcactggcaagtggagaggtgaagtcgatgaggccggaccaggctcacagggtgcatggtggggtggggcgggggggttattatgctggcaaatgacttggggttgaggaagcgctggagaggcggtccgatctaggtccagtaaagagctttctaactgtgtgtggaccacagacttcagagttcactggggaagcaggagagagggaggctaggccatcgtctcctagtccccactggggtcctgctgtcaagatacggttgtcttgagccaggccagagtggtcagctggggttgagtctggagtccaggggcaggggcctgctggagcccaccctgctcttgggggtgaggggctgctggcttgctcaggaatttcatgccgcccagcctgtctgcccacctttctcactacccctcagaccccttcctgggc

SEQ ID NO: 1886756 - DNA, 4001 bp, Homo sapiens
ttctttatttttagtagttctgacatgttggccaggctggtcttgaactcccagccaacctcaaagtgctgggattacagctgtgagcaccagcccaaccttgcctctttaaaaagaaaaaacacaagtccactctgaagtcagcctctgtaacctccccacaagaaaaccgttttacatcagtcactaaccaaacaaccaacagtgcttcaacacagaaagtaaagcattatccagggcttggactgtctttcaagaaagccccaaatcccctggcaggaggaagtcacagcagtgaagccccatcccaggcccagttgttcccacgaaacacaccacgtggagacccagcatgactgccgactgattccaagtccccaggagggctttattttttcttttcaacatcctgttctgcggcttccttggctctttttgcccgtatgccgaagagccgggcgttggcacgggccatacggagactagcgaaggctttgaaattcttctcttcctcagtgatgactcgagctttctccttcttatagacctagaagagaaagacaggttgttaaacccacatgcaccaaagggcaagggaacaaccaagcgtcaggagaacctggaggacctcccggggattgggggtcaggttcgctgccataagtactgctgaaaagcaaccctgagtcaatcaccttccctgggatttaaaaaaaaaaagaaaaaccctccctgagctggacatggcggctcaagcctgtaaacccagcaattcaaaaccaatgtaagcagcatagagaaactctctttccaacaacaacaaaaaaacacaaaacaaacaaaaatacttcccaatgtatggcttcatggttgcaagaagtaaaaactaagaagaaatgttcctttccgcaaacctccacacccacaactgccactattaacgttcttaagcctgacccccatcacccgcatctcagatacccacgtgttcacccactgatctcgtctgaagcctggatttgagtaagtgttcacttacgttccggacgggcatgaccggtccggtcagctgggtggccagtttcagttcttcagcctgttggtgaatgagaagagttaagtggggttggccgcactgctgcaaggactccaccctcacctggccccaaactttcccctggggattccgtgttcaggaccagtgtctgagccttttctacaacacactttgtggccccaatgttaagaacagtccttattagttaggtgactatatcttactgagttgacgcaacacgcacgagacagttatctacctgtgaaccacgggcggggcagagaaaactgttccctaatttaactacccggaaacgtatacaatggactctttatcaaccttatcctacaaggtctttctagaaatattttggaatacgaagcattttagggagagcaacgtcaatggaaaaagctgcctccaagtcacacagccttgccatgtccattaaggttatctctgcggaaacgcacaggtgaaccttagcagtcccgcttagctcatcacccacaatgttttggttcttctcaccccagcaagacccagggaccggtgtcactgataaaggagccaagcctcactgtccccgcgcaccaggacggccagagagccgtgtactcacagaactgtctcccttcttgggggccgagggcttcctggggaagaggatgagtttggagcggtactccttcagccgctgcacgttggcctgcagggactccgtggacttgttccgcctcctcggatccacagaaatgccgatggtccgggccaccttcttgtgaatgccggccacctgccccagaaccagagagagatggagacaggcccgggctttctccagccccgaggcctggatgaaaagcctcagcaatcagatggaaaagggttcaaatgtgctttcatcaaggccgtacagcgattccggagaatgtcatcacgcgactgaggccaacagaggggacttcggggccttcctgacaccgcagcgctgccagtactcaccctgagctcctccaggctgaagccgcggccggcgcgcaccttcgtgtggtaccgaaccgtggggcagcgcacgatgggccggatgggacccgacgcggggcgcggggcgatgcggcgcgccttggcttgccgggccttacgtctggtggagagaagcgcagcggcggtcacccttgcctaaggccgccaggccagcgctccgcgacggttgcagacagcgccccccgccctggcatcggccacccgcaagccaaggcgcagccgcgggcacgagccccaggggcagccccgagcgcagggctcacctgcggatcttacgggccggctggttgaaccacgtggccacgcgccgctgccagtccttgtggaagtggggcttcaagaccatgccattccggctgggcgccatggctgcctacggccctgcggctgcggacgagaggggagcgagtgagaggccggaccccgggcgcgcgcacccccccgggcctccgccccgaaccctccagactgggccgtccggccgcgcctagagcccgggcagcggccgaacgctgtctgcgaagaagaaggggcccatccactcccgcgttggctgaagcgccaggccgatggcgctggatgatgcccaaaggccaggacccagtctccctcacctcctgcgcaggaaaacagccgagcggaaaggaagcggccccgcaatgcactctgggatgatagcagggccggccaaccagaagcgccgggcgctctgaccaatcagagccccgaaaggaggaactgacgtcgccgcggctctcccggcagccctagggccgccgtcgcagacatgttgccgctgagaatgcggcggggcggccgtgattcctgggccctgagtaaccgacggccggacttgcttgacgtccgccgttactgccccggcgcttcagccgctgcgcgggccgcggccgagtcctgtcttgcgggctaacgcgcgcgagtccggtatctgggccgacggcgaacgggcgacgcccgaggaattctgtttgttcacatttgtgagacacgtttgcagcgcaaaggcagaaaaacttcagtgacatccgagtttgcgcaacctaaggccttcgtccttgtcgttccagcgtttattctcctcccatccatttagaacatttgtggtttttttttttgttttttttttttggagacggagtctcgctccgtcgcccaggctggagtgcaatggcgcgatctcggctcactgcagcctccgcgtcccaggttcaagcaattctgcctcagcctcccgagtagctgggattacaggcgcccgccgccacaccctgctaatttttggtattttagtagacggagttactgttggcctctgtcgctttcccttggcccaggattaggtgacttctctaaggtcaggggtacccgactgaaaatgtcacactctgacctgctgtgcctactgccttccttcacaaagaaaagcatcaacaaaaagccatctcttctctagtataagtctgtgaaggcaccatccatcttactgctacctggaaacctttaaatcccaataaccctctttcttccctaccctcacccaatcaccacgcttcctcctggtaaaacttattattattttttttttttgagacggagtctccctctgttgcccaggctggagttcagtggtgcgatctctgttcactgcaagttctgcctcccgggttcacgccattctcctgcctctgcctcccaagtagctgggactacaggcgcccaccatcacgcccagctgattttttgtatttttagtacagacggggtttcactgtgttagccaggatggtctcgatctcctgacctcgcgatccgcccgcctgggcctcccaaagtgctgggattacaggcgtgagccaccgtgcctggccaacgtaat

SEQ ID NO: 1886757 - DNA, 4001 bp, Homo sapiens
gcaacaaataaatgtattacccaataataatacctatctgcctcattccttaaaaatgtgacatgttaagtcaccatattctacttttattacaccccactctgtccaaacatgatgtaatatagtttatgtcaaaaggtatgcagaaaattcaaattaaaaacaaattcaaggccgagcgtggtggctcacacctgttttctcaccactttgggaggccaaggcaggcgaatcacctgaggtcaggagtttgagaccagcatggccaacatggtgaaagcacttctgtactaaaaatacaaaaattagccgggcatggtggtgggcgcctgtagtcccaggtactagggaggctgaggtaggagaattgcttgaacccaggagacagagattgcagtgaagtgaggcactccagcctcggaaacagagtgagactctgtctcaaaaaaaaaaaaaaaaaattcaaagggaaaatgagggccatgagaaggaaaaaaaaaatggcatgtcctaggaggacaaataagagtttctataactgcctattcaaagttggcaatgaagttaaaaataggaatgtttaacatgtaaaagctgtaaggttgctatatgcatctttccatacttggtcaataatatcaaacactatatgtacactgactttcaaaagtaacaatttaggctgggcacaagtggctcacgcctgtaatcccagcactttgggaggccaaggcaggcagatcacctgaggtcaggagttcgagaccaacctagccaatacggcaaaaccctgtctctactaaaaatataaaaattagccgggtgtggtggcaggcgcctgtaatcccaggtacttgagaggctgagacaggagaatcgcttgaactcaggagacggaagttgcagtgagccgaggtcgcaccaccacactccagcctgagcgacacaagactccgtctccaaaaaaaaaaaaaaattaacgagtggggatactttcatcttagctaacatgtaagtagcaaaaaattcaatccttagatataataacttttatagggtgcttatgtaatttacatatattaattcaatttatcctgcataaccctatgaagtggttgcccttctatctgtattttacttatgaggcaattgaggcactgaaagtttaagtaatttgacccagtctattaaaggcagagtcagaaaatgaaatgaggcagtctggctccagagtctaagctcttactgttatatatcctttcaaagagacacaagtttcactttttttgaaattcacagcccagtaatgagctagagagaaacaacacaaaaagagtcagaaggctaatatctattcccaggactgccccttacaaggattaaggtttaggttaagtcatttgatccccatgggactgaattgtaactaatctgttaattagggatagaagtagttgcttaggctctctcattggcctgctctgagaacccactgagagggtacttataaaatcttttgcaaagcactatataaaagttggtgttattaagtttaggtcttatctttagattgctcaagcacttagcaccttttatttgtacctgttctgtgcaaatcaaaggaactcaccatcaataaatgtttgttaactgaatggtttcagagatcactttaaatatactttgttctagatttgaacatacaaccaaaagttcagaggccaactttagctaagttctacatattctacaaacatctagagttctaagaagacatccagtagaattactccactgagggaagagatttatgctttttgagagtgctacctgctgcctaacagtcatttcaggatacactgttctaagcaatatgctgccttcaggatcctggggcgtaagtactgtgaaaaacgtgtgctgtcagcagtttgagtgtcagcattgtgacaagacacttagccgatggatcactccgtactttcatcctccaacacacaaagcacagtacctccactaggtaaacttttgcctagcttatctgtgcctgttgtatttatcaaagagccaaggacaacttcagtgtgcacttaagtattcttattggcctccttaacaacctaaacttctccctgccaatcctttctaaaaaaaggattcactgagcagagtccatctgtgaacacaatgactaaatacataaatgtcaacactcttgctctgaaaacaaagtatcacatggcagcggcatagagctatcaataatctgtcactcaatttaccaaaaacactagactgagaaaggctctcagtttgttaccgttttattgagacatccaaatctttaagacagtccacaattgtgcttctgtgcctctgtactgcattatgatctgtctgtacagtcttcaacaaagatgtcagagccacatatctggatgaaacagttgcaaaataacagagttaaaatgtaaaattcaggatagtttttctccgtttaaataataaaaagaaagacgtctaatggataagagaaagcatacatttttatttaaaagaaagttagtgaacataaaagtaacatttcaaaggtataagcgataccataatctaaaatagtggcaaccaggaggtgctttggattttagatttgtattcatggtcaagtccttttaaacttctaaaagtaggccgggcatggtggctcacacctgtaatcccagcactgtgggaggccgaggcaggtggatacctgaggtcaggagttcaagaccagcctggccaacatggtgaaaccctatctctaataaaaatataaaaagtagctgggcacatgggtgttaggtgcctgtagtcccagctactcgaggggctgaggcatgagaattgctggaacctgggaggctgcggttgcagtgggctgagatcatgccactgcactccagcctgggtgacagagcgagactctgtctcaaaaaaaaataaaattgggactgggcgcggtggctcatgcctataatcccagcactttgggaggcccaggtgggcggatcaagaggtcaggagattaagaccaccctggctaccatggtgaaaccacgtctctactaaaaatacaaaaaactagctgggcgtggtggcaggcacctgtagtcccagctactcaggaggctgaggcaggagaatggcgtgaacccaggaggtggagcttgcagtcagcggagatcgtgccactgcactccagcctaggcgacagagcgagactctgtctcaaaaaaaaaaaaaattaattaaattaaattaaatataaaatataaaataaatagaagtgactgactcaattctttaaaagttttccaaatagtaaaacaaaaagagcatataatatgtcttttaaggctgcctttcccccaaaatgcaattttacttttaacatgtgagttttctctgcttttatttgatctagtaccaaaactgtatctataaaaatttgagtttaaaatccaagtatttaacttagtatgttagtgttttaacattttatttatgtatttattttttaatagagatggggtcccccactatgttgcccaggctggtctcaaactcttgggctcaagcgttcctcccaccttagcctgccaaagtgctggattacaggtgtgagccaccacgcccggcaatccaagtgttctttagaaggagaagataactcagggtgccacaataattatttccacatctttttttttttttttttgaaacagggtctcggccaggtgtggtggctcacgcctgtaatcccagcacttcaggaggacaaggtgggctgattacctaaggttaggagttaaagaccagcccagccaacatggtgaaaccccgtctctactaaaaatacaaaaaaattagctgggcgtggtggcgttcgcctgtaaacccagctactcgggagggtgaggcaagagaatcgcttgaactcgggaggcggaggttgcagt

SEQ ID NO: 1886758 - DNA, 4001 bp, Homo sapiens
ctaacttactgcattcaattcctaatgaaaatgaaagacaatcacctatacaagatggattcagttttgaaaactgaaggataaaactaataataaaaaattgaaattccagtagtcaagattttttagcataaactataaaaagcaaatgtgtgttgatttttttcttttgctgccgtttcaattttcctgcattttcaatgactctaaggaaattaagcattccgacgaacttcataggcttccaggtattcaagaactctggctgaggtctctggcagtgagcttagcctcccagcccccacctgtctgtgccttgagaagccaaccttcccctgcccctcaaaggcagctcctgcactggaaggtgctgctgggatcctgcacctcgcagccactcaggcccccaactcctgcacctgaccttgctgagctgacaggcgcatctcccgacatctccagggagatggtccctggcccacccacagacacagaaccaggccctgccccttcctggacactctggcctcctgggaccgtcccctacctgctccccgccctggtgcttccttccatccatccatctgaccatatgtttcttagtgacctggtcatgtcgctgtgtggatgagcccactcattcccagtcgctcatggcccccatatgaattcattcctcccctttcacctcttcctcattccgccccggaacccttatgcatgtgctcccctctcagaataacccactgggaactgctggtgtccaaattaaagccactgccagcagacacgcccaagtccctggtgctccacgtgccacggcatgcatgtgtccacagtcttgctcatgggcacttgggcaggaggctctgcgcccgctatgagtccccgatggcagggcttctctctcctctgctcccccacagcacctgcacccagcatgagctcccgggagccctcgcacgccaacatctccatgagtccccttgacctcagcacccgggcttcctagtctctgctgctggtgtgtgtggggaagcctgagatcttcgtagcgatacactactatacaccaaacacaaagctggtgccattggcacgacctagaaacagccatgttcctcatcccccagagcgcaccacggtcactcagtacagcacgtgtgcgctgcttactgccctgtgcctgctgctgcctgtgctgcaggaaacagcccagagtcgaaggatggtcaccagccacccggaagacagtcctgctctggcacgcaaacacggagcatcgcaaccggccggcctcggctttccaagaactcagactgtcactcccgccttcacattccagaccccaacagcagctgagcccgcacttctgagcgcgtggctgggtagagctccagaaactgagacaatcacagacatggcaggtgcgtcagggctatgaccagctctcaggactggcagcatcaccttgtgggattccccaccatcctatgaaatcggcactaatcccgtagaggccaccaggaagctggggccacatggcaggtgagggggtatgtcaggtcacctgtgcaggggcagaccccatctcggccacactggggccctcccctggcaggaagggcagggccagacagggagagaagggtactcagagggcacttcgagccagaagcagaaacatctacccaggagatctttgccaagacagaccagaagctgtggagaccaacggacaggagggggaggcagtgaggccacagagactgcaggcctgctatgtgcaccctggaagcggagtcctgcagccctcgcccatgttccccatcctgggggctccctgctgccctcgcactgtgacaccgatgaaggtcaggagcatgcgggcacagtgcctgcagggacagggctgcagcgagagatgactcacctcgctgtcctgcgtgatctggacttgctccccctgcggcaccttggcgatgtggaggtgtccctgtgggatccgcagcaagaaaagacaccaagaagcatcagaagaaaataaaaagcaaaggaaacaagaaacatcttccggaatgtttgttcttgattatctgtttacaattcaaaaagataactaaatcctgaatagtgcaatatagtctgtggtcacctctttaaattaagcttttggttcacagtagtccccctcatccatgagggtttcaagaagcgccccctccccccaccacgtggacgtcagaaaccgtggatggtgcggaaccccgtatatgctatgctttttcctgcccatacgtgccacacagcttggacatgctggacaaaggaatgactcacgtcccaggctggacacagcaggacgatcagacttcatcatgctactacccagaagagtatgcaatctgaaacttacaaattgtttatttctggagtttctcatctaatattttcagatcacagttgactatgggtaattaaaacctaggaaagtggaagcatgggtaagggggggtactgtgtaacacagaacatgttccagtacttcacaaaggagcaataggtcccaggaaagatatatacatctttaaatgttactaaacaagtaaattttaaaatgtgcatgacacacagaaaagaggggaaatagaaaatcacaatgacacctcttttcaaatgatacgttcagctctctggggatgctgggaggctacgcaagcagtgtatggctgaagcaggggagctgtttgcgtgcctacactcacaacagggcaggcaacatttttcaaatcaaagaaacactcatatgactatttaaacagtttgaggaaacactaacaaatgtgattcaaaaaaaatcaaagaatccactgtttatacatatgggcagacaaatatttcctataaacctgtaaatgaaatgaatacttatcttatttgaaattctctcttagtcgaaatggatcttaaactcctgtagaatgttctatgtaagccttatgacaaagttatctactctggaacgctttcaaagaacttcttactaacaagatgagaggaactgccattgtgaatgtcaaataaattaataagcttattaaataagattcactattcataactgtctcatctcctttggaagaggaagggtaatgccccctctaaaagccccagaattttctggaagccttccctcttccagacagcacgctgaagccacactgagatgagagccacgacccactctcaacagtggaggaccttgtttccaggagaaagccctggtaacacggaggcacacgatgacctgtcttcagagggcccaagggggctggtgccactaaaaacataggcgatgtctagtggtgcatgtaaaatttctagtcactcagcaaagcttccagaaaagtcttcttctcagccgccccctactctcgtgccacagaatccaggaggtgtttgtagagggacttcacccgggagcgagcccctaggcgcatcagactgaccacagcttgggtcacaaaaccccaacagagaactccgcatgggcaaggcaggacattgacttgctgctgggacagtgcccgcccaacctgggtgtgctgagtaactccaagggaaacgctgcatgggaacaatgacctcaagcttttgccactgatcctagaaggaaattactctttccctcagtaagaggacgcctgcacttctgagctgagaaatatttccgatgcttcccaggagcacgagctggggcagggaccactgcacagcctgacccttggagctgactgcccgcctgcctgctggcaggactgaggtgagctgactgaacgccccaccccaccatgtgcttcaatccctaggctctgcagcagccgcccccacctgtgaaatgttaagagctcatggccatgatgacctctactttaaatgggaaccttgtgcctcctcccaagctatcactgtgctcccgaaacacagcggaactggtggaa

SEQ ID NO: 1886759 - DNA, 4001 bp, Homo sapiens
acgacaatccttcccccactgaaatgaagtacctaacattttatgtgtaggatcagtcacattttgtaagaattatcaaatgcatacacagcagaaatttaaactcttgattaagaatctaactaaatcccttaatggacaaacagatcccatgctaggtccattttcgctcaacttgtttctctgacccagctggcagcttagtcattgaatgatgaggccccacacactttaaagtacaaatcaaagccatgagcacaccaagaccaaaactatggacaaaaggcaagaacaagaatgaagacacagtctactattccctgcttccaacagtcaggagctactgtccttcttattccaatgagacacagcactaacctgtgcaccgacatcagcacagtactgaccaagcatcagtgtggcacagcattaatccatgcaccaaaattgacacagtactgaccaagcatcattgtggcacagcactaactcgtgcatggtactgaccaagtgtcagcatagcacagcactaacctgtgcaccgacatcagtacagtactgaccaagcatcagtgtggtgcagcattaacccatgcaccagaattgacaaggtactgacaaagcattggtgtggcacagcactaacctgtgagccaacatcagcacagtactgaccaagcgtcagcatggcccagcactaatctgtgtgccaaaattgacacagtactgaccaagcatcggtgtggcacagcactaacccatgcatggtactgaccaagcgtcagcgtggcacaacactaacccatgcactgatatctacatggtactgactgagtgttggtgtggcacagcactaacctgtgcaccgacatcagcacagtactgaccaagcatcagggtggcacagcaccaacccgtgtgctgacatcggcatgggactgaccaagcatcagggtggcacagcaccaacacgtgcaacaaaatcaacatggtactgaccaagcattggtgtggcacagcactaacccatgcatggtactgaccaagcgtcagtgtggcacaacactaacccatgcactgatatctacatggtaccgatgaagcgttggtgtggcacagcactaacctgtgcaccaacatcagcacagtactgaccaagcgtcagggtggcacagcaccaacacgtgcacgaaaatcaacacgtgcacgaaaatcaacacggtactgaccaagcatcggtgtggtacagcactaaactgtgcaaggtactgactaagtgttggtgtggcacagcactgatctgtgcaccaacatcagcacagtactgaccaagtgtcggcatggcgcagcactaactgtgcactgatatctacacaatactgactgtcactgtggcacagcactaaccgtgcactgatatctacacggtactgaccgagtgtcagcatggcacagcactaaccgtgcactgatatctacacggtactgaccgagtgtcagcgtggcgcagcactaaccgtgcactgatatctacacggtactgaccgagtgtcagtgtgatgcagcactaatgatatctacacggtactgaccgagagtcagtgtgacgcagcactaatgatatctacatagtactgactgagcgtcagcgtggcgcagcactaaccgtgcactgatatctacatggtactgaccgagagtcagcgtggcacagcactaactgtgcatggtactgaccaagtgtcagtgtggcacagcactgacccatgcactgctgtgattccagtactaactcgtgcactgtcttcatgcgatacagcccgtgacaataaacataaggaaaaaggcaggacatgacgtgaaatcaagctttaaagagaagagaaaaccgctccttacccctgcgatgcctggcagtggcgatgtgttcactccagggtgggggccggtctgactgctgggttcctagtgcagccgtttgctctcagcctccggaggactctgcaaatcacacacaggcatttaggctgaggtgctcggtgggggtgctggggaaaccagtagggtgcagccccccagggtgggcagttgccaggccccgtggaggagaggggcccgcttgatggcacttgtctgaaatgcactgactttcctcccagtccccactgcttgctgcacccccactccatatccagcgagcgtgcttggatggttttctgcacactcgcttacacgcacaggggcctggccatcccaggacctgcccatctggctttctgtggccttgactcctgtgcaggggcctcgttttctcaccccatcccccacccccaggatggcatctaagtctggatcactctgtttggtcgttgcactgtgccccagaggggtgtccacttgctggcccatgtggagccggttggagggtgccaggcggcatcatgctgggggaaggactgcagcactgtggtcctgccggggtcgctgcctcggcctcccaggatggactctgcactttatgggcctgttcccgtgttttccagccccttggtctccatcttacaggactctgtgtctcacttgggctgtgtgagccaggggctggggagacaccttcccctgttcccctgtgccccgcctcctgggggggtcttatcccctccaccatgccgcaacaagagtcaggaccacgctgccagccccacacttccttccctaaccagggtcctgtgaggctttggggtttgggggaaggaggaaatcaggctcgtgacaaacaccggtttagaagctgcatgggattcagagccagcagcctggacaccagcctggtctttcagtgcctcagtgtacccactctagtcatgaggagaaagccgcgcctccctcttggggtgatgacagaggtggaaggatgctgtgagggcccgagccactccaggcaccctcccgccatcaatgccccggaaggtgggtggcggcaggagctgtggctctgaggggatctcaggagcactggattcttggtgccttcctcagcacccgtcaccccagctaactccagctaactcagcacccatgactccaactaacccaggtaatctccaaagacatgttttcttgtctctggtgatgttttacatgtaaaagtgcagagcactggaggctggggtctttgcatgatggctgtgcttgctgggatccactgttcagcctccccaggtgctcgccggcccctccccattttatgtaggatcgttcggactgtcagcaagacataaaaaagcagctgcctgcagaggccaaatgcgcggcaggctcccgtctccactgtctaattaattaatcgtttccaggtcgcagagctcgtgggagcatttgtgccctatctttccagcccacagacgtgggggtggggacacccaggcttcccgaaaaccccctcccacacactcactctgtctttaaggcaagtttgctcctttttagtttttaaatcagagtgttggcatgtgtgcgagcgagtgtccaagcgggtatacgctgtttgtaaaacagctccgctgttgcctgggggccagttctaccccataagcaatgtttgccagtgtccatctgtgaaccatgtcaggtccatgagaaggttctcaggatcctatggccatgagtgagggctaaggcaatacggcgagtcctccatgaagctatggtgaacgaagtgtcctttactctaataactgaatagcagaattggactgaattctgtagttttaaaaccttcttccaaggataacagaaacacagaaaaatgagcaagcaagcacacccccacagccttttcacacagagcacacacatgaacccagagcctgatccaggatcaggacacggcctgccctccccgggggccccgcccggacaccagcctgtcttctgaaggcagagggtggactgatctgttgtgaaacttctattggtgcagtcacaccagaagcatgtga

SEQ ID NO: 1886760 - DNA, 4001 bp, Homo sapiens; identical to SEQ ID NO: 1243380

SEQ ID NO: 1886761 - DNA, 4001 bp, Homo sapiens; identical to SEQ ID NO: 1243381

SEQ ID NO: 1886762 - DNA, 4001 bp, Homo sapiens
gagggccaggcacaccgcacggggggttctaggctctggggtacgaggtcccgtagagtcccccagcactgctcctgctgagcctgggataccagcccggggatggagcctgaggggtccacagaggcctttctcgtgggagtggaagggaggctttgcgttgtctgtgttggagatcatccctcactctagagctgtgctgcagccaatactagggtatggggtggctgtgttaggagggaggagatgatttcactgtaagtgtgcagcttatttaggaaaagtgtaaagcgtcctcgaaaacttgccagccagctggacgctgggggaggctctgcttctccaggcaaggatgtggcaatgcccgacaggacggcgggccttctcctgaggcgcgtggttctgccaccggcacatccccaggccttcgcagaatggaggcccagggtgcacagagcagggaaagtgctgctggccacacccccttggccaggatacccccaccccagccctctgtgggtgtctggaccaggatctgctcctcggaggacccccacagggctcccaccctgctagtctgaaatctgctccctcctgtacgaccctgtgaccctgtcatgggacttcatcccaagtcacctcaccctggctcctccaccattaaggtccacggtgtccccatgggcagccagaagccatccagagggtggggcatctggagagtgtttggaaagccgggccccattcctcatacctcaccaggtgccggcaatggatacagatggaagcatccacagagcggccatccagacagtggaggaaaatctggatggattcctttctggtttgggagcggggaaggcttcctgagcaccatgcaaagccaagatcattgctctcactacttacaaactgaaatcttctgcaacaaaaacaacaaacatcgttggtaaagtgtaaacggatgctgtcaactggaaagaaacatttggcaggtcacatgagaaacagacccagtttcctggatatttgcaggcgtcttggaaaaagagaagaggaaggccaaagaccccaaagaaacagagtgaagggacctgtgattcctttgtgaacaccactaccccatgatgaaggggaatcgaggtagaagggaggatgccactgctggttttcagatggagagagtgtcctgaggatctggggcccagtgtgatcacaagggtcttgaaatgtgcaaggtcaggcaggagcctcagaacatggagaggcaacaggggaaagccttgtccgccactactggctttggggatggaggcagctatgagataagggtctcaggcagcatttgaagctgaaggcaaggagatggatttctcattgagagcctccaggcagcaacacagtcctggggcacatgcgttccagccggtgagacccctgttggacttctagccgcagaaccgtcaggtccgatactggagtttatagccacttggtttgtgcgaattggctgcggcaaccacaggaacctcacgtggggtctgcacacacagttcacaggaagggaaattaaaatgacctctcatgtacagaggatcctcagtctcataacagggaaacgcaaacttcttggggagagaggcaaaaagcaacacaccctgggccaggcatggtggctcatgtctgtaatcctagcattttgggaggccgaggcaggtggatcacttgaggtcaggagtttgagaccagcctggccagtatagtgagaccccgtctctattaaaaatacaaaaattagccgggtgtggtagcatgtggctgtaatcccagctactcaggaggctgaggcatgagaattgcttgaacccgggaagcagaggttgcagtgagccaagatcacgccactgcactccagcctgggcaacagggtgagactcaatctcaaaaaaaaaaaaaaaggcaacacgctctggcggcaaagttttgttgaacaggcatctgggcactacaggcagggaacaattagtacctggctgcagagggcagagtgaccccattgaccaggtcacagatgcatttatgctgtgacagagatgtccctccgggccagggcagcgcagcatgctcctgacacagcttggcctgtgccatgaagaaggcagacagccacaggggggtttgtccaaagatacacaaggcatgggagaaaccaaccccaggctgacccactggggtgggacaggtaaggggggaagggcagcaagccagactcctcccaacacgctttgtatttttgaactatttggagtcgctctgtattggaacattttctgctcaaaacacagggactggtctgccatcaagtaacggtattggagccaaccttctctgggggcagattgggccactcaggagctcacaagccctcctcagccctgcaggtacctgcctggaggggcctctgcacagggcattcctgggtgggcaaaatcagccacactggcctggagggaagctggggaggggggaattgcggctgtgtatcacagaggaagacagcagcactgccactggggctgacctggaaggtgcgtggggctctggggtagacccagccctggcacacagggcttcaggcactggagacctcacctagcaaaccccgcacacacagatggagacggagtctttagtgtacaggggtcgatgagacccctgcaggagagggactgcatcttggccacccgttgcgtctcagccccctacttcctgcccctgcctggctgtgcaagctctcctctccctacatctgcctcccactgttcctacaccccaagtatggaaaggtcccctctccagggcccccgaggactggaatccacattcgcacctacggccttgagtggtgctgggcatacagcccactagacgatcttcctccctggtttaggcacctcgggcacccaaccctgcagagagcaacacgctcagctgggggactgaggactcccctgaggctgtgggtgcttgtcacttgcagaagggcacctggagggatgggcgtgggccctgtgcctccttgacaggcccataggtggggatttgtgtgttgggaccataagctctgactgcaaacagaattttaaaaaccccactcacagagagctaagctgacagcttcctagctcccagaaagaagagctgagctgtgtgaaggctgcaggcactgtgccgagcactgtccctgctgaggggaagtgcatcgtgtcctggcccacgagccgaacctgggtcacaaaggtttccacaggctcccggtgcagcattgaggagtgggcgcgtctggctgcggtcaccaagctggagcagggaagctgctagggctcctggatgctgcctggatttgtctgccacctacctgcccctggatctctgcacccacctactagcctgatgacaatgttgcctgacatggttggtgccttgagcaccaggagaatgcagagctccattttttttttttttggagacagagtctcactctgtcgcccaggctggagggcagtggcacgatctcggctcattgcaatctccacctcccgggttcaagagattcttctgcctcagccttcagagtagctgggattacaggtgcccaccatcacacccagataatttttgtatttttagtagagatggggtttcaccatgttgctcaggctggtctcaaactcctgacctcaggtgatccacccgccttggcctcccacagtgcttggattacaggcatgagccaccgtgccgggtcgcagagctcctctttattcagtgattcatgagttaaattaatcatgtcatcaaccaggtgggcccaatttcataattaatgaatttcaaatgaatttaactcatttcctgtagatgggcatttaggcttttttttggggggaggggacaagagtctcactctgtcacccaggctggagtggagcagcacgatc

SEQ ID NO: 1886763 - DNA, 4001 bp, Homo sapiens
tggcgtgcgcctgtaatcccagctacttgggaggctgaggtacaagaattgtagtgcgtggagatcgtgccactgcactccagcccggggttaggagtgagactctgtcccaaaaaaataaaatagacaaaagacacgaagagaaatttctccaaagatgtacaaacggccaacaagcacatcaaaagattctcagcatcatcagtcattagggtactgcaaaccatgttttgtcactattcacgggcattaaatgtgctgactcacgcacaaaacattccataaagaatatcagtgggggtacaggaaagggtctcactggaggtgctggggtctttaaccagaaaggcaaagcctttgccactttactatgccactccagagttgcggccggcttacagaagcaccgtccatagatgcagagttcagacactccaatctgcgatcagagctcctgcaggagatgggggtggtgggggggagggtctcccggctctagcatctgagataagtacatcctcccacgggcaagtgaaaaacaaatcttaaagccggatacgggccgggcgtggtggctcacgcctgtaatatcagcactttgggaggctgaggtgggcagatcacctgaggtcaggaaatcgagaccagcctgaccaatatagtgaagccccgtctttactaaaaatacaaaaattagccaggcgtggtggcacacgcctgtaatcccagctactcggaagactgagacacgagaatcacttcaacctgagagacaggttgcagtgagccgacaacacaccattgcactccagcctgggtgacaagtgcgaaaccacgtgaaaaaagaaagaacaacaacaacaacaaaaaacaagggccagatagggtgtcatgcacgggtagtcccagctacttgggaggctgaggtcggaggatcgcttgagccccaaattcgagaacagcctgggcaaaaccctgcctcttaaaaacacccccaaatcgtaataacaaatataaatccttgcactcaaatggacagttcattacgtggtaccgcgtcctgttgcggatcaaggccacctgagttggttaggacagctaagcgggacgtccagggctgctcgccagcggtgggtctagatatgaacttgtgcttgagcagcccagcgtcttacaactctgctgtgaggacggctggctgattatcaggcccagaatcacgggcttagaaacattaacaggaagtacggtaccgaaaagtggaaactttaaggtgcttattattttcctcctgccttgttcctgtatgtgccgcttcaccggtatcacgtcctgggtctggtgggaccccggcctggctgccctaccggaagctaagaaaactcctcccccaggggtggccgtcgggcctcagcccggtctacagcgggagaacgtggcccatgctacgggtaactggttgggcccctggtgcaggtctagggcctgcagccaggctcggggcctccgggggtgcccgctggctggggtctgaggcggcttctctcgggtacgggaaggcggactgctgtgcagctgcgggctcgctcgggaaacccaaagtcacacgaaagcggcagcaccaccgcggctgggatatcgtctcccaacatggggagacaaaatggccgccacgccccgagccgaaattacatccgggctccgcgacacgcccgaaccacaactcccagaatgctctgcatcgacagcgggagacgagacgcgctcgggcgtcgctttgctgccgctaggccctgtgctcctccccgcagcggaaggcctacgaatacgcggtgtcttacgtcgcttcctccgttcttcgttgcactggccaacgggacgcttagtctttcggcaacggggtgaaaccttccttgtgcctgaaaaaacggtacttcgcggtgtggcttcggcgcctgcgcaaaaggccgcggggcgcactccagttcccggcaggccccgcgacgcgcgtttgcgtgctgacgcacgcagttagtcgtgctgacgtgcagcgcggcccaggcggggtgcgagtggcgcagttggagcccgttgcggcccctgaggaagcgaggaggcgtcggcgtcggctgaggcgggcggaccggcgaggcgaggcggcggccccaggcccgagggactcgggagctcgagcagcggcggcggcaagacctctccccctcggaggcggcgggcggaggcggcgggtgagagggtgagggagccagcgagccgggtgggggaggggcggcggccccggcgcgaggccaaagcgcgcggagaactgcccaggccgccgagctcctccgcgcgcacgcgcgctcgacgcccttcgctggcgcggacgccctcgcctcccttcccccttcccgccgttcctgtcgcgcgcgggcttcacccccccccgcccctcccccatgacaacggcgttcgcagccgcctgtactcgggttcgcgagcgcccttggtgaggggggagggcgcgcgcctcggcttcactcctccccccaacatgtgccgccgaggtggccttcctgcagctgccgttttcggcccttaagtggcggggaaggggcggcggcggggggcttgctcctggacccttgcccccggttccagatctcctttcctcgggcttctcttcggcgttgggctgcccgtgtcgggggcctcccagactgcgggacgccgcgcagccccctcccccattccgcaaggccgaaaataggcccccggcgctgcggggagggccttgaacttcgtgggccggatttaaatggtttaggattcccggctatcagcctttgagttgttagtggcggggagaaaccccaaatcttaaaaactgtgaagaaagtgaacgtgttcagtttacatttgtaaggtagaccgtgcgttccctttttacactttttcaacgtctcccgagaattcgtgttcaaactaaggaggcttttggagaccttcgttgggaagaaaacgccagactcatatataagttttctggttggtttcaggcgttctttggcacacagctcttctgaagcttggtttccactcggcttcagttaggacgaatctggatcagaatttcagagtgttgtgttgtctttcatcctaagtgcgtgggcttagggctcttctaaagctactattttagctttctgggttctttgtgtccactcagccgctctggagcgccccggtgctgagctggctgtgcttgctgatgtccatttttttcgacaacccttgtctcccctttttctccccttttggtaccgttttcttttttgcatattttactgttgaattcaaatatatctttctacttcattgttagcttaccactcggataatttcccaacagaaaagggtgtttttgtcttcctttgtactttttactttctgcttttaacttgggtaacttttgcatatccactgtctatggcccccactttaagagttttgtaatatcgtttggtttggtgatttgtgtgtggtgttgatcttcctactttctgtgtcttaacacaccccttagatgccgtggggtcgtcgtctttttttgtggggtggactaggtggctcattccctaaaagttctccgaaacattgtgacctaatatcctttgcttagcacctactggtttttcttttttttttttttccgagacggagtctagctctgttggcaggccggagtgcagtggcgcgatctcggctcactgcaaccttccgcctcccgggttcaagcgattctcctgcttcagcctctggagttgctgagattacaggcaatcgccgccgcccagctaatttttgtatttttggtagagatggagtttcaccgtgttggccaggctggtgtcaatctcctgatctggtgatccgcccacctcggcctcccaaagtgcaggtgttacaggcgtgagccaccgtacccggcctggttttccttt

SEQ ID NO: 1886764 - DNA, 4001 bp, Homo sapiens
ccacttaaatgattgtattttttacatccaggatttgtaatttttaaaaatagatgcctgttcattttactccttagacagaagccaaatgtatttcctaacattttatccatgctgtctctgtggatcctgcacatatttaaacatagcctaagcgtacctgtttgctcgttatttttatctccctgagatggatccatgggtccactggccctgttgattttctgagtcgtatttcttagtgtgtttgggccatgcgagcttggggatgttgatttctaggtttgttggggacagagggctttctctttgtgctgtcagccttgtgttctgggctcccccgtccccagctctcctttccttgtctaccagatttcagtggccttggcccagccccacagcccccagccaggactgtggcctttcctggcagctgctggggtcgtcctgtgctctgaggtgcctccagggtcagggccggtcagctgagcagccccagggctccagacggcacatgctgaggtcaccacagccggctccacccctgctcaggccgaggtcccccagggaggggcttgtccctggtctggatcctaggggacactttgattctctgctggccacccccagagtcacacagctccagggtcaacccaaacatccggacttcctccgccccactcgtcaggggaggcattgatcttctttttgagacagggtcttgctcagtcacccaggctggcgtgcagtggtgtaatcacagctcactgcagcctcaacctcctgggctcaaatgatcctcctgactcagcctcctcagtggctgggactacaggcgcccgccaccacacttggctaatttttgtattttttgtagagacgggggtctcaccatgttgcccaggctggtcttgaactcctgtcctcaggtgatccacccgcctcggcctcccacagtgctgggatgacaggcttgagccactgcacccagccggagtatcatttttatgaatgatttcaaacatgcagaaaaatacaaaaacaatatacgaggtacacacgtgcccatggccttggacccacagacgtcaccattcccagcccacccttctccatggacacccctccctcccctcccccaagtctcccctgttctctctctgggccacagtggggggttccagggcctgggagggggctcaaagctccgatgggactgggcagtgtcaggtggctgcagcccccatacgctatgcctctgacccgcccacaccccccaccgcggcttctcctccgggctgcagggtgtgcagcccccgcccgcagtcccccctccttcgccctgtgtgactcctggggctccgtgtgaccactctgtgtggtttgtgtgtttgcttctctgcagccgccccgtggggagggtggtgtctctctggccctgtgctgtgcccccgcctgggtttacagatgtctgtcattgctgtgggggtgacggtccctgcgctggcctggagagaggttcggggccaacgggcagcgggcaccccggtgaaagtccctcgaggctgcggtggcgacaccacgtccagccacttctcaggtcgtcctagccaggtgccattcatcccaggcggacagggggccgaccaccggccccatctctctccactgccacctctccctgtgtgtcccgggaggggccgcccgctgggcctcggctccttacctggtagacgagggcagcagcactgcagggcaggctctgaggggcttcagggagacgcaggtgctggcctcagactccaggatgctgcggccaggccaggcgccatctgggtgcaggggcggccacagggcagctgtcgccatatcgacagcagccgtccgtctgggctcccggggccacctgcccgccgctccttcctctcctggcttattttccaaacaatttgcttaacgtgattcccggccaagctaaacatgactaatcgtgtttacccggtgatcccgcgcctcctggcaggcggggctggggcccaggaggaaggaatgcctgcatgtgctggttcagggactcaccaccctggcgtcctcccttcttctcttgcagagcctgacgcaccccagggctgccgccatggagcccctgttcccagcctccacgcccagctggaacgcctcctccccgggggctgcctctggaggcggtgacaacaggacgctggtggggccggcgccctcggcaggggcccgggcggtgctggtgcccgtgctgtacctgctggtgtgtgcggccgggctgggcgggaacacgctggtcatctacgtggtgctgcgcttcgccaagatgaagaccgtcaccaacatctacattctcaacctggcagtggccgacgtcctgtacatgctggggctgcctttcctggccacgcagaacgccgcgtccttctggcccttcggccccgtcctgtgccgcctggtcatgacgctggacggcgtcaaccagttcaccagtgtcttctgcctgacagtcatgagcgtggaccgctacctggcagtggtgcacccgctgagctcggcccgctggcgccgcccgcgtgtggccaagctggcgagcgccgcggcctgggtcctgtctctgtgcatgtcgctgccgctcctggtgttcgcggacgtgcaggagggcggtacctgcaacgccagctggccggagcccgtggggctgtggggcgccgtcttcatcatctacacggccgtgctgggcttcttcgcgccgctgctggtcatctgcctgtgctacctgctcatcgtggtgaaggtgagggcggcgggcgtgcgcgtgggctgcgtgcggcggcgctcggagcggaaggtgacgcgcatggtgttggtggtggtgctggtgtttgcgggatgttggctgcccttcttcaccgtcaacatcgtcaacctggccgtggcgctgccccaggagcccgcctccgccggcctctacttcttcgtggtcatcctctcctacgccaacagctgtgccaaccccgtcctctacggcttcctctctgacaacttccgccagagcttccagaaggttctgtgcctccgcaagggctctggtgccaaggacgctgacgccacggagccgcgtccagacaggatccggcagcagcaggaggccacgccacccgcgcaccgcgccgcagccaacgggcttatgcagaccagcaagctgtgagagtgcaggcggggggtgggcggccccgtgtcacccccaggagcggaggttgcactgcggtgacccccacccatgacctgccagtcaggatgctccccggcggtggtgtgaggacagagctggctgaagccaggctggggtagacacagggcagtaggttccccaccgtgaccgaccatcccctctaaccgtctgccacacagcgggggctcccgggaggtaggggaggtggccagaccggtggggggctccgccatgccgtgcaagtgctcagggccgcctcaccctccatctggccccagcccatgccggccttccctctggggagcgacttttccagaaggccggccaggcgagagggtcttcctgacggcggagctgacctgcccggcccaccagctgcatgtcagctccgagccaccgggtccccgtccaaggctgctctgctaagttaaagacacccgaaagcgcttgactcaggtccccggagtccctggccagggccccagcccctcgcttgccctgcactgtgtggactctggggatgcaggtgtaaggggagtgtggctgggcagcccctggtcagccagggtcacgcctgtcctgggggccccaccctgctgcccgacaccccccatgggaggctgcgggcggcagttgctgtctcagagaggggagtgtgggggcttgggcgctggcctagccaggggcgaggtggggaggcggctggtgcagaggagagctgggggctgaggttggggtgaaggct

SEQ ID NO: 1886765 - DNA, 4001 bp, Homo sapiens
ttatataatcattattacttttgctgtaatgttaatattgatttattaatatatattatcttttcatacattttctaagaaacatttatattgataagatcttttattttgccaagggcataaattattgtttttctttttttttttttaataaatttcaccaagtatggctcttctgtgatgtgtttttttctccgtttgggaatttctaatcccaggcactcctcagtctcattgtttcattacctatgaggtttcatttacttctttgtaaatgtactgacttttggagttacttaagaaccacagttcctaaaacattttatttgggagctcaacttctggcttcctacttaccaagaggcagtaagttataacctctggcctttgtctttacattttcaactttctggatccctaacctctggtcccaagttactacgcttgcctatatccactaaccactcactaggtcacaaagttgatggctctggcttgacccagtgaatgagaagtgtcctagatgtttttttttttttttttttttcgcaaatcttcataggcacagttgcctgtttaattttttcttcagcccttcccttagaggagggagccttaagttacctttcaaggttgggggttaggaatctatcataactagtctagagatttctcaccaagggaaattttccttatctaaaagaggaacttcaggtctcaaccctgccagtcacacccaattaatgtccttcacaaaaataaacagcatatgttccctttcaatttgagttcagtgagctcacagcaaaatttaccttttaattttcttcagcaaatccaagacgaatatacaaaggatgagattagataaagatttcagtttcccgtatgccaccgctgccgccaattttccaaaaaagcctggctcctcttttcctgttcctccatccaagcccccaaagatctctaaccagaaataaacaggaagactcagtgatttacaaaagacattttagttttacacgtacagaaaattctacccagcattacagaattcttagacttcttaaattcctgattttccttggtatttacattttgataagggagccaatggttcttcaaacatttgaaaagaacacatacacactggacaatttcaaacgatacaaacaaacgcaactgtccttctttctcattcctgtccttcagccacccagtttcttctcccctgagggaatcagttatcatttgctggtcatacttccagattatactgtgcctatgtaagtgtgtgtgtgtgtgtgtgtgtgtgcacttttcattttttcaaataaagtattactcaactttgtaattctgcgcgctctggaggtcaaaggagggatggcattgctggggtgtcccccacatcctgagtgtctctagataaaaaggagctaccgggcggcggctgctttccacacaagcttaaaattgccaagagtcaactgccagttgctttgggtggtggcgtcagagtgtcttcagataacacgaagaatgcgtgtaaagatcggagacggccgggcgcggtggctcacgcctgtaatcccggcactttgggaggccgaggcgggcggatcacgaggtcagaagtttgagaccatcttgaccaacttggtgaaacctcggctctactaaaaatacaaaaattagccaagcgtggtgacgcgcgcctgtaatcctagctacttagaaggctgaggcaggagaatcgcttgaacaccggaggcagagcttgcagtgagccgagatggcgccactgcactccagcctgggtgacagagcgagactccatctcaaaaaaaaaaaaaaaaggaccggaaacaagggctctcagctgcgaattcaccttttctttgtgtccgagccccgcctaccgggtaactggagagtatcaggactgggtgctaccaagcgcctcacagcagcccccagccgacaccaacatcccaaccctgggcgacccgcggctgcgcaggcgcggatgcatgtttagggggctgcgctagtcagtgcgcatgcgccgtcgctaggcaacaggacacagctccgggcgccggcgtagaatctgagctgcaggtgagggttagttcctttattcggcctctgcgttctcttaggatgttacattttgtttcctttttcagcctgtctaccctggtcacaccctgcttcgagtttctcttcctcctttgcccccggtttgggctctgactggtggaattgttccaggaagttgacaaaacatcctaggcttttgtaatcacctgttaacctttcccagctctggatcagaagcagcaacttccatgagttgtgacgcagagcagacaattctattagctggtgttagtttccaatggtatagccccttggaacttttctccaaagaatcgtggccctcaccgtccgcagtgcctgacattaggatctctactcagccagaaaaataaatccacccccgtgcctttgtcaaagacaaagcaggacagtaaagcggttgagacaggttttaaccagtaatatactaatggaataaggaggagtccagcacgaactgaactcaactttgatttgtacaaatgttactcagactttaaaggaaaaatggggaaatagggaaggggagaggaatgagggggcgctcagaagagtgagggaagtgaaagattacaaaaagtgcgaagtaggggttagtccatgtgaaacccatctgggtttgttaaagggtgtttctggaagttaggcttttatcctcctacagatgctgggagataggagccatatcttaaggtgttggctggaacagtaaattcctttggcagcctgagtttttttaggcaggccctttaaagcggggctggagtcatcctagagatgctaccttgaactgttagagactgtgttagagttttgttcaagtctgttgaggcctagtccacaaatggctcagaggaacctggctagagtttggtcaaggagagaatttttgttactccgcatattctgcacattattctgtgtgaggtgttgtattttacgtaccctgaagtttgaattattgcatatatgttggaaaagaactgaattctcagtacatattatttatatccttatttattttaaacaatttaggtttatttacaaacaagtttcatataatgttatagaacctgcaaatacagatgctctctataggccaaattgtttcacagcaccttccaaagaggcagtcagtcatttgctaaggttaaggttgaagctgtataggaggtgatgcccaattcctcaaagaaaacaataaacagaagaactagcacatgtgtgtcttaatttttgtgtgtttcaaatgtagaaaagaattattggtctttaactcatttgatagcctaaatttaatgtatttttacgttataccatatttaaaaagtaaagctgtgggagtgttccctttggcagtgcatattctaaaattggaacaatacagagaagattagcatggtactagcaaaccaaattcaacagtatgttacaaggattatacaccatgatcaagtgggatttattactgagatgcaacatataaaaatcaatcaatataatatgccacattaacagaatgaaggacaaaaaccacatgatcatctcaactgatgtagaaaagttagttgacaagatttgacaccttttcacgatagaaacactcaacaaactagaaacagaaggaacctacctcaagataataataaggaccatctatgaatagcttgtatcggccaggcaaggtggctcacgcctgtaatcctaacactttgggaggccgaggtgggtggatcacctgaggtcaggagtttgagaccagcctggacaacatggcgaaacctcatctctactaaaaatacaaaaattagccaggcgtggtggcacatgcctgtagttccagctactcaggaggc

SEQ ID NO: 1886766 - DNA, 4001 bp, Homo sapiens
agattgagagaatttgtgcccccaaccatttcctcagactctaagaaagaacacgctctctccaggcaggtctgaagctcaactctcttattgcctcacttcaggtatacctcactttacacaatagaattataactggaaagaagttggggacacatgtatttggtgattacattttaaacacattaggaaaagttgctatttgaactttttattgatttttggggggagtaaagaattattttgtgatgcaaataaatatcctttaattgatcgacttgccaaatttagatttgtgtgcatcaggctttcttttttttctttttttagagaagttcaatataagcttttcttttctttgtttctttctttctttattttgagatggagtcttgctctgtcgcccatgctggagtgcagtggcgcgatctcggctcactgcaacctccacctcctgggttcaagcgattctcttgcctcaacctcccaagcagttgggactacaggcgtgagccaccatgcccggctaatttttgtatttttagtagagacagggtttcaccatgttagccaggctggtctcaaactcctgacctcaggcaatctgcccgcctgggtctcctaaagtactgggattacaggcgtgagccacctcgcccagcggcatcaggctttcttaaagtgagagcacgcctgtactagagcaagcaggaatcagagaccttccagaaatactactgtgtaagggccagaaatatcttcacttgtcattgttatataatcattattacttttgctgtaatgttaatattgatttattaatatatattatcttttcatacattttctaagaaacatttatattgataagatcttttattttgccaagggcataaattattgtttttctttttttttttttaataaatttcaccaagtatggctcttctgtgatgtgtttttttctccgtttgggaatttctaatcccaggcactcctcagtctcattgtttcattacctatgaggtttcatttacttctttgtaaatgtactgacttttggagttacttaagaaccacagttcctaaaacattttatttgggagctcaacttctggcttcctacttaccaagaggcagtaagttataacctctggcctttgtctttacattttcaactttctggatccctaacctctggtcccaagttactacgcttgcctatatccactaaccactcactaggtcacaaagttgatggctctggcttgacccagtgaatgagaagtgtcctagatgtttttttttttttttttttttcgcaaatcttcataggcacagttgcctgtttaattttttcttcagcccttcccttagaggagggagccttaagttacctttcaaggttgggggttaggaatctatcataactagtctagagatttctcaccaagggaaattttccttatctaaaagaggaacttcaggtctcaaccctgccagtcacacccaattaatgtccttcacaaaaataaacagcatatgttccctttcaatttgagttcagtgagctcacagcaaaatttaccttttaattttcttcagcaaatccaagacgaatatacaaaggatgagattagataaagatttcagtttcccgtatgccaccgctgccgccaattttccaaaaaagcctggctcctcttttcctgttcctccatccaagcccccaaagatctctaaccagaaataaacaggaagactcagtgatttacaaaagacattttagttttacacgtacagaaaattctacccagcattacagaattcttagacttcttaaattcctgattttccttggtatttacattttgataagggagccaatggttcttcaaacatttgaaaagaacacatacacactggacaatttcaaacgatacaaacaaacgcaactgtccttctttctcattcctgtccttcagccacccagtttcttctcccctgagggaatcagttatcatttgctggtcatacttccagattatactgtgcctatgtaagtgtgtgtgtgtgtgtgtgtgtgtgcacttttcattttttcaaataaagtattactcaactttgtaattctgcgcgctctggaggtcaaaggagggatggcattgctggggtgtcccccacatcctgagtgtctctagataaaaaggagctaccgggcggcggctgctttccacacaagcttaaaattgccaagagtcaactgccagttgctttgggtggtggcgtcagagtgtcttcagataacacgaagaatgcgtgtaaagatcggagacggccgggcgcggtggctcacgcctgtaatcccggcactttgggaggccgaggcgggcggatcacgaggtcagaagtttgagaccatcttgaccaacttggtgaaacctcggctctactaaaaatacaaaaattagccaagcgtggtgacgcgcgcctgtaatcctagctacttagaaggctgaggcaggagaatcgcttgaacaccggaggcagagcttgcagtgagccgagatggcgccactgcactccagcctgggtgacagagcgagactccatctcaaaaaaaaaaaaaaaaggaccggaaacaagggctctcagctgcgaattcaccttttctttgtgtccgagccccgcctaccgggtaactggagagtatcaggactgggtgctaccaagcgcctcacagcagcccccagccgacaccaacatcccaaccctgggcgacccgcggctgcgcaggcgcggatgcatgtttagggggctgcgctagtcagtgcgcatgcgccgtcgctaggcaacaggacacagctccgggcgccggcgtagaatctgagctgcaggtgagggttagttcctttattcggcctctgcgttctcttaggatgttacattttgtttcctttttcagcctgtctaccctggtcacaccctgcttcgagtttctcttcctcctttgcccccggtttgggctctgactggtggaattgttccaggaagttgacaaaacatcctaggcttttgtaatcacctgttaacctttcccagctctggatcagaagcagcaacttccatgagttgtgacgcagagcagacaattctattagctggtgttagtttccaatggtatagccccttggaacttttctccaaagaatcgtggccctcaccgtccgcagtgcctgacattaggatctctactcagccagaaaaataaatccacccccgtgcctttgtcaaagacaaagcaggacagtaaagcggttgagacaggttttaaccagtaatatactaatggaataaggaggagtccagcacgaactgaactcaactttgatttgtacaaatgttactcagactttaaaggaaaaatggggaaatagggaaggggagaggaatgagggggcgctcagaagagtgagggaagtgaaagattacaaaaagtgcgaagtaggggttagtccatgtgaaacccatctgggtttgttaaagggtgtttctggaagttaggcttttatcctcctacagatgctgggagataggagccatatcttaaggtgttggctggaacagtaaattcctttggcagcctgagtttttttaggcaggccctttaaagcggggctggagtcatcctagagatgctaccttgaactgttagagactgtgttagagttttgttcaagtctgttgaggcctagtccacaaatggctcagaggaacctggctagagtttggtcaaggagagaatttttgttactccgcatattctgcacattattctgtgtgaggtgttgtattttacgtaccctgaagtttgaattattgcatatatgttggaaaagaactgaattctcagtacatattatttatatccttatttattttaaacaatttaggtttatttacaaacaagtttcatataatgttatagaacctgcaaatac

SEQ ID NO: 1886767 - DNA, 4001 bp, Homo sapiens; identical to SEQ ID NO: 1243435

SEQ ID NO: 1886768 - DNA, 4001 bp, Homo sapiens; identical to SEQ ID NO: 1243444

SEQ ID NO: 1886769 - DNA, 4001 bp, Homo sapiens; identical to SEQ ID NO: 1243446

SEQ ID NO: 1886770 - DNA, 4001 bp, Homo sapiens; identical to SEQ ID NO: 1243453

SEQ ID NO: 1886771 - DNA, 4001 bp, Homo sapiens; identical to SEQ ID NO: 1243461

SEQ ID NO: 1886772 - DNA, 4001 bp, Homo sapiens; identical to SEQ ID NO: 1243462

SEQ ID NO: 1886773 - DNA, 4001 bp, Homo sapiens; identical to SEQ ID NO: 1243462

SEQ ID NO: 1886774 - DNA, 4001 bp, Homo sapiens; identical to SEQ ID NO: 1243462

SEQ ID NO: 1886775 - DNA, 4001 bp, Homo sapiens; identical to SEQ ID NO: 1243462

SEQ ID NO: 1886776 - DNA, 4001 bp, Homo sapiens; identical to SEQ ID NO: 1243461

SEQ ID NO: 1886777 - DNA, 4001 bp, Homo sapiens; identical to SEQ ID NO: 1243462

SEQ ID NO: 1886778 - DNA, 4001 bp, Homo sapiens; identical to SEQ ID NO: 1243462

SEQ ID NO: 1886779 - DNA, 4001 bp, Homo sapiens; identical to SEQ ID NO: 1243462

SEQ ID NO: 1886780 - DNA, 4001 bp, Homo sapiens; identical to SEQ ID NO: 1243462

SEQ ID NO: 1886781 - DNA, 4001 bp, Homo sapiens; identical to SEQ ID NO: 1243471

SEQ ID NO: 1886782 - DNA, 4001 bp, Homo sapiens; identical to SEQ ID NO: 1243472

SEQ ID NO: 1886783 - DNA, 4001 bp, Homo sapiens; identical to SEQ ID NO: 1243472

SEQ ID NO: 1886784 - DNA, 4001 bp, Homo sapiens; identical to SEQ ID NO: 1243472

SEQ ID NO: 1886785 - DNA, 4001 bp, Homo sapiens; identical to SEQ ID NO: 1243472

SEQ ID NO: 1886786 - DNA, 4001 bp, Homo sapiens; identical to SEQ ID NO: 1243476

SEQ ID NO: 1886787 - DNA, 4001 bp, Homo sapiens
ccttatacaaagattaattcaagatgaattaaagacttacatgttagacctaaaaccatgaaaatcctagaagaaaacctaggcaataccattcaggacataggcatggtcaaggacttcatggctaaaataccaaaagcaatggcaataaaagccaaaattgacaaatgggatctaattaaactaaagagcttctgcacagcaaaagaaaccaccatcagcatgaacaggcaacctacagaatgggagaaaatttttgcaacctacttatctgacaaagggctaatatccacaatctatgatgaactcaaacaaatttacaagaaaaaaacaaacaatcccatcaaaaatgggcgaaggatatgaacagacacttctcaaaagaagacatttatgcagccaaaaaccacttgaaagaatgctcatcatccctggccatcagagaaatgcaaatcaaaaccacaatgagataccacctcacaccagttagaatggcgatcattaaaaatcaggaaacaacaggtgctggagaggatgtggagaaataggaacacttttacactgttggtgggactgtgaactagttcaaccattgtggaagtcagtgtggcaattcctcagggatctagaactagaaataccatttgacccagccatcccattactgggtatatacccaaaggattataaatcatgctgctgtaaagacacctacacacgtatatttatagcggcactattcacaatagcaaagacttggacccaacccaaatgtccaacaatgatagactggattaagaaaatgtggcacatatacaccatggaatactatgcagccataaaaaatgatgagttcatgtcctttgtagggacatggatgaaactggaaaccgtcattcccagcaaactatcacaaggacaaaaaaccaaacaccgcatttttttttttttttttgcagtaacattcccctttaatagcctggtgggacctccagaggtggaggggtggtttgtctgggcccagctacccaggccctttggctgaacaagcacccagcaggggggctagaacagccaattcatttcccatcgctgagtgggtcgggggaggcagcgctgaccttaatcacatggtgttaataaaaaataactaggggcacgtggcaggaaggggaggcaaggccaaggcaggggattcccccaccggccgccccccaaacccctaccgatggcccccaataaatatttgcaggggatgccagggcttgcggccgtggcgggggtgggtatgcgccaaccctatttcaggcagcgctcgaagtaggtggagcctatgtagccatcccgcatggatggctgcacgttctgctccaacagctgccggttgttctgcaggacctctgcggccttcttgttcagtgggtcctcggggttgggctccaagtagagatactgcaggccataaattatggagtttatcgtaaggactggcttccagttctctctgaggatgttgaggcagacgttgccctcgatttcaatgttggggtgatagaccattgtctcacacttcaccttggggggatcatgcgggtaaccctggcccaccttaaaactgaacacaaacttcccactcttgtagaagccctcatcaggacagatgaccaacttgaagttgaggaggtcgtctggatctgagaagctgatatcacacgtcttgggcaggttcagctcgtttatgtccttctggatccgcagctgcgccgccgacgccttcttgctgctgcgcttggtgcctcccgccgactactcctccttcttctgctgcttcagcgagaacagcttgatcatcctaccgctgccgccgcggggcccgggaccccggccacccggcccccagccgccgcccgcgtcgcctccgctcctgggactcgcagctgcggcctcctccgctactgccgcaacccgcccggcctgccgcgccgctccgctcctctccgcgcccaccgcgcggcccgcccgcatgttctgactcataggtgggaattgaacaatgagaacacatggacacaggaaggggaacatcacacaccggagactgttgtggggtggggggaggggggagaggggagggatagcattaggagatatacctaatgctaaatgacgcgttaatgggtgcagcacaccaacatggcacatgtatacatatgtaacaaacctgcacgttatgcacatgtaccctaaaacttgaagtataataataataataataataataaaagaaaaatttaatgtcatagtattgactttagtgcattgcaagccccttttgctcagtaacacactcactactggagaaaccaaaccctgaaaattcaagaacctgggcattaataatattgctgacaagttatttatacactgcctacatgagtattgcagatatatgttaaagacaaagatccaagtcagactgggtcagctttattcattcattcattcattcattccttcattcatttatcttttgagactgagtctcaccctgtctcccaggctggagtgcagtggcacaatcttggttcactgcaacctccgcctcccagattcaagcgattctcccgcctcagcctctcaagtagctgggattacaggcgcccaccaccatgcctggctaattttttgtatttttagtagagattgggtttcaccatattggctacgctggtcttgcctgacctcaggtgatctgcctgtctcggcctcccaacgtgctgagattacaggcatgaaccactgtgccggcccttggctcagctttatacttggtcattttagttccaattcttctctctcaaaatataagtcgcttgttgccattttgattattccacatgcattgtgatcatatggaactggtgacacgtgttcttatttccctttcaattacaaaatgagctccatgttcttagccatcaaatctcaccaacacctacttactttagtttcaactctggttcctattacaaagatcactcaaatcacagaaagacaaaaatgttttaatcaaccaaaaaaattttaacccctggtgtcatgtaatttggtttttatttgttgtattttcaggtccataaagcctacaaatattaataaaatacagttcatgatgacttaatttttattgaatagtaaaataaatacatgtcaagagtggatgtggcttcaggtataactgtcatcagggctgaagtgttataaccagtggtcaaggagaaatgtcagtgtataatctgacttcctacactggaattatgcatcaatgctttaaatgtctgaaaagaatcaaagtcacagagggaaataaatgaaatggaagaaaatagaaaagttacaaattagtttaagaaggaattaaacctggttttaaaataaagacatacaaataagaaaaatactgaagaacaattaggttaggtagagcaacactgaaagtatgataggaaataaatgtatttagaaatattagtctctgagttaagtttatagctgtagagacctgacaaagagttgctcctacattaaacaaacaaaaaagctggagaaaatgcaaatgaatgaatggcttgttccgagccctttggagaattgaggtcacagaggagacaacaaacccaacatcaaggcatgcaggagcctgcaggtcacacaggccccaggcttttatgtatacctggaagaccatggaaactagcaaaattaaagcaggacttttgaactagttcctggtggctgtgtgtgggtgggtgggtgggtgggtgaaggggaatgagaaatcctggagtctacagacatagagtttacacctttgtgtatgatttttctaggaaccctacaaggcctgtcagggagggtggggtataatcctgagaatgcttcccccatggtgctgatagggagggaccactatcccacccactgctacaactctggagaca

SEQ ID NO: 1886788 - DNA, 4001 bp, Homo sapiens
cctgtctctactaaaaatacaaaaattagccgggggtggtggcaggtgcttgtaatcccagctactcgagaggctgaggccaagaattgcttgaactgggtaggtggaggctgcagtgagccaagatcgtgccactgcactccatcctgggcaacagagagactccatctcaaaaaagaaaaagagcatagcacgctgggtgtggtggctcacgcctgtaatcccagcactttgggaggtcgaggtgggtggatcacctgaggtcgggagtttgagaccagcctgaccaacgtagagaaaccccgtctgtactacaaatacaaaattagctggcgtggtggtgcatgcctgtaatcccagctactagggaggctgaggcaggagaatcgcttgaacccaggaggcggaggttgcggtgagctgatgccacgccattgtactctagcctgggcaagaagagtgaaactctgtctcaacaacaacaacaacaacaaacatagcgtgtgtgcatgagggtaatgagtctctgtgaccctgcacgggacgcccagcccacacagtgctgtcctaattgctcaggtgggacctggacccctcgtgtctcagcttttgtgaaggaccacacgactgtaggagcggcagggtcagactctctctgatcctatgggcccagccctgtccttctggctggaagggagggggcctgcctcttacgcaggggccatgaggcctgggtgggtgacatctgcctctggaagtgccgcgcagagcctgtgcctggggcagtgggcaagaccccatggaggctgagggacacactgcccctcaggcctggctgggaatcccagcacgcacctgggcttgctacctcagtcttcccatgtgtagaagggtgaattatggtgctggcccacggggtgtatggagaatgaaaagagtggaaataatgtccagcgtactgcctggcacaaggttacccgtgatctcagtgagctcttcgatgccacctcaggcctcacctcaccaccaccccccgccctcgccctggcacagctgccagggagaggcagaaactcactcccaccccatcagggtcacaggggcctgaggctggagggagggaggaaagagctcctctcctcatccctgtattttcagaggaggaaacgggctgagagaagcagaagagagagcccctaacctcactcccaacccgggctgagaggagggtcggcagcggtgagctccgccctccagcctcactgcctggccccttagtccccgccatctgtctcagggcggcactccccctcccagggcctctctcctaccttgtcctcagctccgcccactgctggccgtggtcctccagccagcacaagcggaggcagaggcctctggctgggagccctgaggcggtgtccagcacgtgggtggtcagtaggttgtccggaggctccgtgctgctgccctgggccaggagaaggaggccagggtgagcctctggagccctgtgcccgcctacccacaccaatcctgcgtccacaccagctgtggggcttaaacagccctctggacagagttctccgagctgcccaggggacagggggcaagggtgaccggaagtgcccaggcagctgatgaggcaccaaacgtaaacagcgcagcctgtgcctgccgaccctcccccaccaatccctgtggctcccctgccccactggggacacccactgtcccgcccacggccccacgaaatggccatttccccccaggccctcagttccagcccctggggtggttctcccggaactgggctctcctccgcgccccggttcctgggccctcgacgctcagccccacgcaagcagctgaggggacaggagccctgcaggtccaggcctggccccctaacctcctgggggcctaggtgtcgctggagcctcagcagccgcgggacggcccgggggctcatcctgccctgccggactgcgacgcccgcgggcaaagggaagggcggggccggtcaccccgccccggaccacctcgtgcccaccaggagggccccagcggggctttgcccaggaaggtgcgctggtggcgaatcagggcgcacagacctggggcccagaagcggagtcgcgaggacctgctggggggtggtgggggcggggacgggggcggggccgcggtgagaaggggcgggaccgcggtgagagggggcggggggcggggccgcggtgagatggggcggggccgcggtgagggggcggggccgcggtgagagggggcgggaccgcggtgagagggggcgggaccgcggtgagagggggcgggaccgcggtgagagggggcgggaccgcggtgagagggagcggggggcgggaccgctgtgagagggggcggggggacggcgggacggggggatggggggatggaggggatgggggcgggccaggtgggtcccaagaagacctgcgcgagactggggacggcgcggggcccatctctcccctgggaggctcagaggcccgcaggtttctcatggaagcccctcacagggtaagtttcccccgacaggccatgtgaccttgcctcggttttctcatctgtaaaatgggagcagtggtgactcctcagattgttgatatggctccgtaggtgaagctctctgagctgacctcccccccgcccttcctccccgcaacgcgcggtggatgagcgcagggtggaggcccgtgccctgcagaaagtgagaaaagccatagaactgcgtgtgccggcgagtatccatcgttgtattaaccttacgtaatatacagagaacacattttgactatatgttatatatgtgaagtcctcattagggaaagggaggcaggggaaagcaaacagagaaagcagacaagctactagtctgccttcttcatgctccaggacacacagccctccagacacacggcaaataacacattcttcctgcgccccagtctcaccagacgcctgaaggttattaacgcacactctccagcaaggctttgtttctgtgcagtcagtttctcttctgctggctgcccgtcttctctctggcaacgtattttcctactttctctagtaaatctgccttctcttacatacaactgtcttggtaaattcttttatcctcaagccactggcagtcgttcacctgccacaatgtattaatgaaataacggacattctctatttaaaatctgggaaacgctgcacccgcatgatggtggactggctgtcctgctctgggatctgggaactttttttttttttgagacggagtcacactctgtcgcctaggctggagtgcagtggcacaatctcggctcactgcaacctccgcctccttggttctagcggtgagtagctgggattacaaacgcctgccaccatgcccagctaatttttgtagttttagtagagatggggtttcactgtgttggccaggctggtctcgaactactaacctcgtgatcagctcgcctcggcctcccaaagtgctgggattacaagcgtgagccaccgcgcctggccgggaacttctttcttcctgtcaagctgcatttccagttcttgggtgttcggcatgggtgatttgtagattaagaattaggccattcaaaggcaagggaggagacccctctcagcaaaggttgggagtattctggctacaactaccttgggactagttaggaaacatctatttgggatccacacacacgacatttgttgtggcttctgtttataggagataatcctaaagagaggctcacaactgttatggcaaatgcccatgggtgccagaggccagagacaaccagactggccccagtggggaaaattccataaacgccagggtactctgcagccctttaaaaagcatgaggcccatttgtgtgtaagatgagaattctcctggaaaaacaactagtgacaaaggacaaaacagtgtgtaagaggggggaagcttg

SEQ ID NO: 1886789 - DNA, 4001 bp, Homo sapiens
gagactccatctcaaaaaagaaaaagagcatagcacgctgggtgtggtggctcacgcctgtaatcccagcactttgggaggtcgaggtgggtggatcacctgaggtcgggagtttgagaccagcctgaccaacgtagagaaaccccgtctgtactacaaatacaaaattagctggcgtggtggtgcatgcctgtaatcccagctactagggaggctgaggcaggagaatcgcttgaacccaggaggcggaggttgcggtgagctgatgccacgccattgtactctagcctgggcaagaagagtgaaactctgtctcaacaacaacaacaacaacaaacatagcgtgtgtgcatgagggtaatgagtctctgtgaccctgcacgggacgcccagcccacacagtgctgtcctaattgctcaggtgggacctggacccctcgtgtctcagcttttgtgaaggaccacacgactgtaggagcggcagggtcagactctctctgatcctatgggcccagccctgtccttctggctggaagggagggggcctgcctcttacgcaggggccatgaggcctgggtgggtgacatctgcctctggaagtgccgcgcagagcctgtgcctggggcagtgggcaagaccccatggaggctgagggacacactgcccctcaggcctggctgggaatcccagcacgcacctgggcttgctacctcagtcttcccatgtgtagaagggtgaattatggtgctggcccacggggtgtatggagaatgaaaagagtggaaataatgtccagcgtactgcctggcacaaggttacccgtgatctcagtgagctcttcgatgccacctcaggcctcacctcaccaccaccccccgccctcgccctggcacagctgccagggagaggcagaaactcactcccaccccatcagggtcacaggggcctgaggctggagggagggaggaaagagctcctctcctcatccctgtattttcagaggaggaaacgggctgagagaagcagaagagagagcccctaacctcactcccaacccgggctgagaggagggtcggcagcggtgagctccgccctccagcctcactgcctggccccttagtccccgccatctgtctcagggcggcactccccctcccagggcctctctcctaccttgtcctcagctccgcccactgctggccgtggtcctccagccagcacaagcggaggcagaggcctctggctgggagccctgaggcggtgtccagcacgtgggtggtcagtaggttgtccggaggctccgtgctgctgccctgggccaggagaaggaggccagggtgagcctctggagccctgtgcccgcctacccacaccaatcctgcgtccacaccagctgtggggcttaaacagccctctggacagagttctccgagctgcccaggggacagggggcaagggtgaccggaagtgcccaggcagctgatgaggcaccaaacgtaaacagcgcagcctgtgcctgccgaccctcccccaccaatccctgtggctcccctgccccactggggacacccactgtcccgcccacggccccacgaaatggccatttccccccaggccctcagttccagcccctggggtggttctcccggaactgggctctcctccgcgccccggttcctgggccctcgacgctcagccccacgcaagcagctgaggggacaggagccctgcaggtccaggcctggccccctaacctcctgggggcctaggtgtcgctggagcctcagcagccgcgggacggcccgggggctcatcctgccctgccggactgcgacgcccgcgggcaaagggaagggcggggccggtcaccccgccccggaccacctcgtgcccaccaggagggccccagcggggctttgcccaggaaggtgcgctggtggcgaatcagggcgcacagacctggggcccagaagcggagtcgcgaggacctgctggggggtggtgggggcggggacgggggcggggccgcggtgagaaggggcgggaccgcggtgagagggggcggggggcggggccgcggtgagatggggcggggccgcggtgagggggcggggccgcggtgagagggggcgggaccgcggtgagagggggcgggaccgcggtgagagggggcgggaccgcggtgagagggggcgggaccgcggtgagagggagcggggggcgggaccgctgtgagagggggcggggggacggcgggacggggggatggggggatggaggggatgggggcgggccaggtgggtcccaagaagacctgcgcgagactggggacggcgcggggcccatctctcccctgggaggctcagaggcccgcaggtttctcatggaagcccctcacagggtaagtttcccccgacaggccatgtgaccttgcctcggttttctcatctgtaaaatgggagcagtggtgactcctcagattgttgatatggctccgtaggtgaagctctctgagctgacctcccccccgcccttcctccccgcaacgcgcggtggatgagcgcagggtggaggcccgtgccctgcagaaagtgagaaaagccatagaactgcgtgtgccggcgagtatccatcgttgtattaaccttacgtaatatacagagaacacattttgactatatgttatatatgtgaagtcctcattagggaaagggaggcaggggaaagcaaacagagaaagcagacaagctactagtctgccttcttcatgctccaggacacacagccctccagacacacggcaaataacacattcttcctgcgccccagtctcaccagacgcctgaaggttattaacgcacactctccagcaaggctttgtttctgtgcagtcagtttctcttctgctggctgcccgtcttctctctggcaacgtattttcctactttctctagtaaatctgccttctcttacatacaactgtcttggtaaattcttttatcctcaagccactggcagtcgttcacctgccacaatgtattaatgaaataacggacattctctatttaaaatctgggaaacgctgcacccgcatgatggtggactggctgtcctgctctgggatctgggaactttttttttttttgagacggagtcacactctgtcgcctaggctggagtgcagtggcacaatctcggctcactgcaacctccgcctccttggttctagcggtgagtagctgggattacaaacgcctgccaccatgcccagctaatttttgtagttttagtagagatggggtttcactgtgttggccaggctggtctcgaactactaacctcgtgatcagctcgcctcggcctcccaaagtgctgggattacaagcgtgagccaccgcgcctggccgggaacttctttcttcctgtcaagctgcatttccagttcttgggtgttcggcatgggtgatttgtagattaagaattaggccattcaaaggcaagggaggagacccctctcagcaaaggttgggagtattctggctacaactaccttgggactagttaggaaacatctatttgggatccacacacacgacatttgttgtggcttctgtttataggagataatcctaaagagaggctcacaactgttatggcaaatgcccatgggtgccagaggccagagacaaccagactggccccagtggggaaaattccataaacgccagggtactctgcagccctttaaaaagcatgaggcccatttgtgtgtaagatgagaattctcctggaaaaacaactagtgacaaaggacaaaacagtgtgtaagaggggggaagcttgtaaattcgtatctagctttcactgaattgcaaggattagctaattcaatcctcataacaacctcctggtgtattgttgtccctaccttacaaagcaggaaactgaggcacagggaggccatatattggaatatttcacaataggatacacaaaacagt

SEQ ID NO: 1886790 - DNA, 4001 bp, Homo sapiens; identical to SEQ ID NO: 1243509

SEQ ID NO: 1886791 - DNA, 4001 bp, Homo sapiens
agtaacagaaaaattgctgatgggagtttgtggcttttgtgactggtgtagatgcaaagaaaagaaatgagaaccacctttctggaaaaattggaaagtaggattccgaggacagtattcatggcagtggtaacgtttctagtttgggaacccactcactgcatgaagaacatgggccacccatcacacccactgtggcacggccatgactcaggaggaaaggatggtagggggcaaggtctagggagtggtgtaagggcatctgaaaaggagcttttgttgtaagtttcgtaaggtacaccatgggtacagcgatgtacccggtccaaggtggcccggtgcctccccaacccagtggtacctgggttgaggacaggtagcagaagtgcctgacccatggggtagaaccccaagggctgtcccagcctctgctgagtcctgaggggagaggaatggggcgccttgaggggctcttcactggtggcagatgccctatccagccctccttggtcttgggcctctcagcccctcaccagcagggtaggcgctgggaagcaccccctgccatgccctagactgtattttaaggtgcgatttgctttggtaggggaggaaggggagagttcatttgttttcatggtgcaggtcccaggagaaatggatcggaaaaactcaggaggttcagagatctgaaaggagagcactcactggggccaggccgagttgccagaaagagaagcagatcggggcttgcctaggagcccagaggaacggcccaacttgggctggcagtgccactgctgctgccacgcctgcctggagcctcagcccagcccagagcagagcagagcagagctggggtgaggctgcctggcttcctgcctcagggcagaagcagccctgtgtatcaccccagcgtgcccctttccttctccagcctcatgccatccggtccacagatgtactcccttaccttatccttcccaagcagtccttgtcaccgtggtcaggtgggttggccagctgggtcccagggctcatctgcctgctttaaagggatttaattcttgatgacacggactttggcctggggtcccacctgggggaagccccaaacccccgagctgtgctgtgaggaatggtgggaggaagcagagtgcccctaggttcccaggtggctggggctgctctctcccgtcccccaaagagaggagctgttactgccatccctcagtgtctaccccaaaatgggggcttccactaaagtagaggccccttcatttgagggcagcttagagagccaatgacggcccctccaccacccccgctgcagctttctttaggaaccgtggtgggtcatgtgtcaacccctcgtatcagtgggaggagactaggaggaggagagggccccagctgaagtctgcggggcttgtgccccattctgagtgcattgcatctgtgtcttaatgaatccacatggtggtccaggagtgatcttagttaccccgaggtgtgaggaggatcacttgcctaaggtcacactgtcagccagaattgacagtcaaatctgtctgattccagagcatctaaaacctcacacaaggtgtcacctcactgcagagcagggacccggcccagggtggaggcactgccttatccaggcccaggccctccgctgaccccatagggttttgtccttggctgaccttcagttctaaatgcaccttctccctctgtgcatttaactttgacctcattctcctgcaccttccttcccaggccccatgggctgtccctggctgctcactgacctggtggcccctagcccccctccagggctcagtccagaagccctctccatcttccacctggctgaccttctcccagaagcgctgaggccggtggccaggcctgctgcagggtggtgtagaagccgcctgggtgcagatcaggagggccagcctctgcccccacgctgcccggctctccacgggaccaggcaggtcacatgacaccgcctcacctcggttttcttcccagggtactggggttggactggatggtctgagatcccttccagccctgaatctgtgtggtcctgactccactccctggaatactaatgctgcctgctcagaagcggacagtcttccataagaacagtacttgtttttcctcctcagattcttgcctcagtgttcacttccctccaattttcattccatccactctccaaaacaaacaaaaacacccctccacccccacctcaattccacagatatctttaaaatcagatcacgcagtaagatacggcctcagcccagagaatggaggggtgccgtgtcggtgcccaaagaacttgactcctcttgcaagagcccagcctgcaggggagaggagctgggtgggcactgatggcccggggaccctcttcctgaggcaccctcccctggccctgccgtgggcaggggacactgccctctgtcccctctccccgcggctgtccctgcagcttcttttgggggcttctgagaacaagtgagagggagtcatgtgccagggagaagggccaccgccagccagcaaagcagctagactccagccacggccctgagccttcctcctcggggacagctaggtcccaggcccagcagaggtaccagcagccactgctgggggttcagagaggactgtggtcttctaaaatgaggcttggcggcaaatcgttgctagggaagagaggggaatggcaaggtaacagtcccagaactgtacccactgagagggcctctacccacccctcattcttccagatgttcccaccttgtggtgtcagtgcccacagcagccaccccagagcacagggggacccagagtaactgcggccagccttgccacctccttgcagggaagacaggactgtgtgccaggagggtttgagtatttacctctccatgttccttgccctgggcagatggaccagtgaggacccagagctgggcacagtaactggtatgaatggattgggggccaggagggtgctgcctagctcctggtgaaggcagaggttgggctgagaagcatggtggaaagggaggcggctctcccagcggcagggcctctggggtaggaggaaccccacaaagaggagccagcccagccagcctttccctgaggcaggaatgggcgctctcactcacacctcctagagccaagctgcagggcgagttgcctgcaggactgagcacactatccagccccggctcaagccacacagcagagccatctaaaccaggactgtcaccagaattccctggagcttttaaaatccagctgcttgggcctcactcccggccttcctcagtcgtccctcaagcagagcccgggtgcccaggggctggtatttttcacatgcttcccagtgggtttggtgcacatctctgggagcacagatacagaccagcgtgagatcttgcttagagactgtaggccatatacccccagctctcagccctggtgccctctccatgcagccctaggcgaggcagccaagccagggcccccggttttcaccccacttagcgttcctgcgtcctcagaagccaaaatttcttgcaagtcatgtgttgatttttcctcctctggagatggccaaggctgaatcagctggatttcccaggcacctccctgttggcaagtcacaaggcccacagactggcaggagcttgggtgagcctgggtgagcccaggtgagcccagagatgtagaggactgggaccgtccccccactgctaatgagacccaccattttcacactggcttgctctgttccacaccctgtgctctgccccttgtgagtgatcttagttcatcttcacgatcagacaaccctgtgagggtaggttctgtcattttccccatttcccctaagaggaaactggagaagttaagtaacttgggccagatctcacttatatgctccatgaagccttgtttatctg

SEQ ID NO: 1886792 - DNA, 4001 bp, Homo sapiens
ttttgtatttttaatagagacggggtttcaccatgttagccaggatggtctcaatctcctgacctcattatccgcctgcctcatcctcccaaagtgctgggattacaggcgtgagccaccgtgcccagccctcagtgatgttttaagaaagtttaggaatttgtgttgggccacattcgaagtcatacagcctcggattgttgcacaagcttgctttaacaagattcatactgttgccaaacacatataacggatctccatagaagtccagtggtccagcttctcttgaaaaaccaaaagtccggccgggcgcggtagctcacgcctgtaatcccagtactttgggaggccgaggcgggtggatcacgaggtcaggagatcaagaccatcctggttaatgcggtgaaaccccgtctctactaaaaatacaaaaaattagccgggcatagtggcgggcacctgtagtcccagctactcaggaggctgaggcaggagaatggcatgaacccgggaggcggagtttgcagtgagccgagattgcgccactgcgctccagcctgggcgacagagcgagactccgtctcaaaaaaaaaaagaaaaaaagaaaaaccaaaagtcctggcaataccaaaacctgtgttttctttctttttgttattttttgttttggttttgtttttttgagacagagtctcactctatcaccccagctggagtgcagtggccagatctcggctcactgcatcacctcccgggatcaagctattctgcctcagcctcccgagtagctgggattacaagtgtgcaccatgcccagctaatttttgtatttttagtagagacagagtttcaccatgttggccaggctggtctcgaactcctgacctcaggtgatccgcccggccttagcctcctaaagtgctggcattagaggcgggagccactgcacctggccaaaacctgtgttttggaagggcaggcaagaaggggcagatgttgcagcccaccccagatggctcccctcctctttctcctcacctcctggcctcagagcaatccgggaggatgagagagactcctctggtgtccagacaccactgggcttcctggggtctagacagcagcttgtcacatttccagagagctgacgccactggaggaggcctccctgcagaatcagaagctgaaggctgcgtatgaggcccgaatggcgcggctagaccccagccaggccatgcagaagacatccctggtgagtgggggctagggagggcctgggggtgcgtgggcgcggggcagaggggagtcggccttactccctcctccccccccagaccctctctctacagcggcagatgatggagaacctagtgattgccaaagcccgggaggagacagcagcctttctgaccgccctggtggtccccgaggggaaactcagtgtggccttgagccaagggcagagaagggggcagcgaggggagcggaggttccggggtcggggtacagggccgaggggctccccgctttgcagaggcagggtctcaggggaaggcccggccgccgtcccccatgttctctggcccggccctcctggcttgagcgcaggctgccttctgccccagaagccttacctggggacagcccctcaccgagaggaggtccctgggacgtcccggcctctccgggtgtgggacggggttgggaaccgagggcccgctcagatcccacgctcggccccttgactctgcacccagctccagagaaagatggaggagcgccggctgcggctccaggaggccgccaacaggtgggactcctgcccgcccctggggccgctgcggggagggcctggccccggcacccaccgcgtgcctttctccccaggaggttttgcagccaagtcgccctgaccccggaggaacgggagcagcgggccctttacgccgccatcctggagtacgaacaggaccatgtgcgtcccccacgggcccaggctttgtaggaggagcccagcgaggggggcggggtcagagccgcctgggtgggcccccgtggggggcggagccagaggctgtggggggcagtgagggggcggggccagaggcccgtgggagggcccggtgagggggcggggccagggctgcgtggggcggggcagagcgaggaggcgaggtcaggggtcgcgtgggagggtcccagcgaggagggagggtccctgcgaggagggagggtcccagcgagggtgcaggcccagggttcgcctaaggtttccctcgggtgtgggtgggggcgggggcgggtcgcggggcctgctggcgctgggtctcctgcaccccaggacgggctcccacagtctctaggggtcggcactggtgggagatgaggcgcgtccggtcgtggcggacccaccgtgctttccttcaaggccccctgtcccgtaggactggccgaagcactggaaggccaagctcaagaggaatccgggggacctgtcactcgtgaccagcctggtctcacacctgctcaggtagctgggccttcaggccccacagagcccctgcgcaccggccttgggcacctctgcctggtgccaggtgccggagaggggctggactgacacagggagcctgtgcccggccacgtggacactgcagctccctttgcgctgagggcgtttcctcggcttctccaacctccccagcgggggcggggggcagactttccaacattcactgtcaggaggtaatgcaagtcgcttctctgaaaccgggcatagcgcggcacctgtggatgccacggagaggccgaggctggccgcgttctcacgtcctcttctcccgcagcctccccgaccacccgatcgcgcagctcctgaggcggctgcagtgctccgtgtacagcgccctgtatcccgccgtgagcagagcagccgcgccagccccaggctgctgccccccgacccccaaccccggaagccgacggctgcggccctcgcagagcctccattgcatgctgtccccgcccgagcccagcgcagccccgcggccccaggacagtccccccacgcccccactccaacccggccccgtggggtctccctcacccctgggggacaccgcatctggattgccagacaaggacagctcgttcgaggacctggagcagttcctggggacgtctgagcggcagggccggggccgtggggtacagccggagccccagctgcagcagctgaagaccgcggtggaggagatccacaatgccgtaggtgaggccaggccctccctgggagagccgccgcagctcttcacccctgcttattggtccgtttcaagcttctgtttggggaagggtctgttgatcagagactctgatcagacttacatccacccagctcacgcctcagcccttctcattttggaaacagtgtggtagaaacggagtttcaccatgttggtcaagctgttctcaaactcctgacctcagttgatctgcccaccccggcctcccaaagtgctgggattacaagcatgagccaccgcgcccagcccagagttttctaagaaccactgagggaggcccaacagtccaggcgtcattctcactgtgctgcccacacactaaggaacttggtcagggtccccacccacagggggttggatctaaagtcttccctggttcctgcagttttgggtaaagccccttttgagaaaaggatcattctccggtttcttctcaggctgctggcccaacagggcagcagctgtaggtgaccgtttccagtcccggactccctgccctgggccgaggagggtcaggggtgggtgcaggaggcttgaaggcggtggaaagaggtttcttgggcggagaaaggccccgtggcttagagccacttgacccagcaggggaggagcctctgtggacgtccccggctctgttcctagcagacaggctgctctcgctgacccttctggccttcgaaggcctaaacacagctg

SEQ ID NO: 1886793 - DNA, 4001 bp, Homo sapiens; identical to SEQ ID NO: 1243526

SEQ ID NO: 1886794 - DNA, 4001 bp, Homo sapiens
gctgccgattacctcatggccaggaaaagcatgggggatggatttattgattggccccacgttgcatccaagcactttggccagggcccaatacattgccaaaatgacagtcaacaggcctaaagtttactctcatgatgttctccagcctgccatcaaaatacttttctttttctggccacttcttcaacctctgacacattaataatattcccatatgattcatatgcacattaataattgttaagttggggaattttattcttttttttcctttgaagggtaaaaattttatttttgaggaacttcttactgcacattttccaagagagtcacataagaaagcaaaaatgttatcctcccctcatcctagaaataaataaggacataattttttttttaatcatgacacttggaggcttagcgccagcatccaaaatgaacaaaaacggaaaaaaaagcatttattttatatttcagatttctttggttggggttctccccatgcggtattaatattacttgtttcaatatctattacccaaacagtaaaaaccaggaaaaaaatataaacctagcgcttgctgaaactggggaggctgctctcttgtcttctgtgcaggaattcccaggttctcagtttgctggaaaaatttgttgacattttctttttgtagttgtttcttaaagaataacagcaaacattccaatgtccaaatcttggttcgtcttccactttattgcttggatgtttctttggtgttggtaaggctgtggcctgctttttgctttgtttctgaacggtcattaattctttaggtcaccctgccgatggtgaaggtgcctggggagcctggtgttactcagcactgctctgctcggtggatggagcagggttctcagttggtgcttcacctgccgtggcctctttgccatcttgtgaaggagcgttaggagaacgtgggcgacgccggtaattgtagggacgccggtatccacggcgaacaggcggctggtttggaccactggaggcttgctgattttctttatcttcagcctctccaactgctggggcaggtcgtgggcgaggaggtcccctgctatggtaccttgggcggtaagttggatttcgatgaaatggtccctgaagttgtgctccttctgggactccatccttcagctctccaatctcaacagcctgtattctgttgggatggggtaagaccggtgagcgacggtcaaacgtctgtcccacgtggtaaggcgggaaccgctgctgcctgtactgggggcgatactgggggcggcgcagccgattccgggccccagagaactgcctatcagtggtaggggggtcaaatccttcactgctgccgctcccttcttcctcctcctcccagcgtaatcccggggagggccatggcgccttccatagtagccacgtctgtaacggcgccaatcagcgcgtaacgactgccctccacaggaactccaccccggccagtcacactggctgcttctgcacccttctctccttaaaccacatcaaactctacagtttctccatctcctacactgcgcagatatttctgtgggttattcttcttgatggcagtctgatgtataaatagatcttctttggtgtcatttcgatttataaatccatatccatttctgacgttgaaccatttgacagtgccaaggactttggtggcgagaacttttttctccgcgtcttcgctgtcggcggcggtggctaaagaggcggcggccgcggtgcccgtggctgcgggggccccgtccccacccgggtttcctgcgacgagggcggcgggcgccggggccgcggcttggggtgcaccgctgcccacccggctcttggtcgcggggtcctggggagccgcggcggccgccaccgcaggagcctgctggagggtggtggtgatgatggtggcctcgcccgcctcgctcatgcctcctcctcctctgctctcgctcatgcgcctcggtggcggttggtcggcggttagtgcggctggtggtcgccgcggccggggctcgctctcggggaggccggggctgatctcgcggcgcaggcggcggcggcagaggtggggtcgcgcagcggaggcagctcgagcttcgggatgcgcgctcgcttcttgggctcctcgctcgatcttactgcccccttttttctctccctccctcccttccttcctccctccctccctccctccctccctcccttccttcctttcctttcttttcgtcttttttttctttccttttctttcagagtctcgctctgtcacccaggctggagtgcagtggcacgatctcggctcactgcagcctccatctcctgggttccagcgattctcctgcctcagcctcttgggtagctgagattacaggcatgcgccaccacaccaaggctaatttttgtatttttagtggagacgcgatttcaccctgttaaccaggctaatcttgaactcctgacctcaggtgatccggccgcctcggcctcccaaagtgctgggattacaggcgtgagccactgcgcctggccaggaattttattcttagagggaggtttatataggtgtactgttttctcaaaagggtacggttaagattctatctttaatgtatgtacattttgtctcacaaaaaaaccctaaaatgtggctcacgcctgtaatcccagcactttgggaggccaaggtgggcagatcacctgaggtggagttcaagaccagcctgaccaacatggagaaacccagtctatactaaaaatacaaaattaggcgggtgtggtggcgcatgcctgcaatcccagctactcgggaggctgaggcaggaaaatcgcttgaactcgggaggtggaggttgtggtgagccgagatggcgccattgcctgggcaacaagggtgaaactctgtctcaaaaacaaacaaacaaacaacccctagaataataaaacagttgtgaggggtgaggagtgggttgaaatatagatgaaacaaaaatggcacatgattggtacctgtggaggctgggtgacaggtttattacattactttgtgtattttctatatgcttgaaacgttattagccaagaattgtgtatcctgccagaataagcttcgtaaatgaagaggaaagtttttcctagacgaggaaatgctgagtgaatttgtcaacactgtatcagtacaacaggaaatgctcaaagtggtcttaaacatggaaatgaaagctcaatattcaccatcaccaaaaacacgtgtaaatataaaactcactttgtgtgtttacacaaaacaatcacacaaaggaggaagagaaaggaatcaaatgtcaatgcaacataatttcatgaaaccacaatgacaaaacaagaagaaagaatttataaaacagcttgaaaacaatcaataatatgacagaaacaaagcctcacatatcaatattgaccttgaatgtagatggattaaaatcccccacttaaaaaatgcagattggcagaattgattaaaaacattattcaactatatgctgcctataagaaattcacctgtaaagacatatacattgaatgcagaggggtggaaaaagatattccacacaaacagaaacaaaaccaagagatgtagatatatgtatatcagataaaatatacttaaatacaaaaaggtaataaaagacaaagaagttcattatataatgataaagagatcatttgagagcaagaagatataacaattgtcagcaagagaatatagcaattctaaatatatatgtacccaactttggaacacctaaaacaaatcctaccagaccgaaagaaagaatttgacgccaatacaataatagtaggggactgtaacaccctactcacagcactagacagatcaccaagagagaacatcaatagaaacgttggacttaaattggactttagaccaaaggaaattcggagacttatagaacat

SEQ ID NO: 1886795 - DNA, 4001 bp, Homo sapiens
agatcaaagagaaggtggcatgctgggtagtaccctctgtctggaatttacagcataacagttttgctttgctggtgaattctctagccagtggccacaggagatggaagaggtctgggtggaggtcctatcagtgaggttttctttctgagcagcgctcagagcacacagggaaacctgttctccttccccgtgcttctccacctggaaccacagcttctcatctctgtgggtctgagctcccggtcctttctccttcctgtacctgctacccgtgtgtgtgtgcgtgcgtggttgagtgtgtgtgtgtaattactatttgtgggggacctgggtctccgggcttggagttggaggagtatgagtcagcgacaggccaggggccagtccctggcctctgggaaccagatgtgtcatctgtaaaatgcagaccacatgcctgccatttccacctgtctcgcagggtcactgggaggctctaaggataataggcatgagacgccatcatctatggttttcatgccatagaagcacaaagaattgttagcatggttcagtttcccatccacttcccgtgtgccttgaacaccttgggcatgtcagtagagccccacatgttggcattctctgctggcactggcttctgtctggtgcgcacggcgggggggattaatgaccagcgccaccctgtgtttatccaggactttcctgagctggcagctccttctccatcattatctgcgtgaacctcatgaccattctgtgcaggggcagagcagctgcgtcctgaaggctgcctgattggggaggggtgtcgctgggtctggcacccaggcactctgattcctggcctgaggttctttcccttcaagacccaaacacagacagggcgtggaggaaggagtgtgagaccccagcagaagtccggccagttcctgtgctgtggatgaggccccaccagggccctccctgactttcccaaagcttttgagctatgtggtcacggggcattgtctcatccccagccatggtgtgttagtctcccgtggctgctgtaacaagtttccactctctggggggctgaaaacaaccagaattggctctctcacagtcctggaggcctgcagtccaaaatctaggtgtcagcagggtcacactccttttgaaagctctagactaagaggaccctcccttacctcttccaactccttgggggctcctggtgtccttggtgtgggcatccctccagtctctgcttccttctctgtgtctctgtgtcctctcctattcttataaggacataagtcattgttagattttaggctcactctaaattcacgatgatttaatctcaagatctttaacttacctgtataaagacccttttccccaataaggtcccattctgaggtccagggaggacacggattcttagaggacactattcaagccactacacttggtttcttcatacactaatagacagcagtctacactgctgaggtcagtgtgaggctggagctgagaaggggtagctgcccttgggcaccacgcccaccggcactgtggaggcggcttggtgaatattcctcctcttgccgcccgtccttgctggggtgagctggatgaatgcagcaaggacagtccttcaagctgcgtcttgcatgttggtttccgacgctgccggagcgcactgccatgtggccctgggtgtctctcccactcatctgggtgctgatggggctgtcctttctaggttccagatcgtggacatcctcatcaggaaatgccttctaagctgggggaggcggtaccttcaggggacactcaggagtcactgcacattaagatggagcccgaagagccacactccgagggggcatcgcaggaggatggggctcaaggtgcctggggctgggcacccctaagtcacggctctaaggagaaagctctcttcctgcctggcggaggtaggagagggacggggaagaggcgctttcccagggaggcagctgtggggaggtggaggtttggcccaggtccaggtggggctgagggtctctatgccagcaggggacgctatccccccatggcccacagccccctggcagcgtcagagccatccgaccctgtccttgggtcgggccaggggtggagtttgaggcagctgaagtagcagcaggtccagcaggatgagctgatcaccgtgaggacctctctcctcccacagccctcccctccccccggatccccgtgctttcccgagaggggaggaccagagaccggcagatggctgcagcgctcctcactgcctggtcccaggtgagtggcccttccccggcccctgcatggtactcagcccttcctgcatctgctggttctgtgtgaaagccaggaccccgctggccccacttgcagccaagcctgaagcctggggctcttgctagtgttgctggaattgtccaggctcaaggcccatggtcaggcctgggccaaagctggaggagaagcagcaggaattagagacacagggcctctcgctggtagccgttgggaaccgtcctccgaggtctcagctgaggctgggggctgcatggacatcctaagtcttaactgtgatccctgaaaatacctcttggtctttgttctttctcaactccccagaaggccttgggtggctcacctgcttcccgatcagatggaagtggcaggcctcactcgacacagtgggttgggagtccggggtctcaccacacatctcatgccatggtgtccctccaccgtgtccacgtcatgtcctggagagtggatgtttcacattgtttcagatgccagtgactttcgaggatgtggccttgtacctctcccgggaggagtggggacggctggaccacacgcagcagaacttctacagggatgtcctgcagaagaaaaatgggctgtcactgggtaagcactcgcctggaggggggactggggtgttagggagaggtcctgctctgccgtctcctctttcctcccttccctccctctctctcccacccttctccttgtcccttgagacagcactgttctatggaaacttctgtaatgatggaaatgttctgtgtgtgctaggacgggagccacaagccatgtgtggctactgagcacttgaaatgtgagtagagcccttgagtttttaattttacttggttttgttttgttttgttttgagacggagtctcgctctgtcacccaggctggaacacagtggcacgatctcggctcactgcaagctccgcctcccgggttcatgccattctcctgcctcagcctcccaagtagctgggactacaggtgcccaccaccacgcccggctaattttttgtatttttagtagagatggggtttcaccgtgttagccaggatggtctcgatctcctgaactcgtgatccacctgccttggcctcccaaagtgctgggattacaggcgtgagccaccgcgcccggccaattttacttggttttaatcagctcaaatgagagtttaaatagccgcatatggctagcagctactgtactggacgctgccccaggaagtccgcttttcctgggttcatccgcagggctcactcctatagctccatcttcctttccaagccccaacttcagaggtgtctgagcagcaagcttggcttcggggcccgagggctgcttgccctggagagagatggcatgaactgaactccccaggccccgcagacccttgggtgtcccatctgctttgaggagcaggtgcttgtctccgaggggtcttggttccctttgtttcttggatgttaagtatttaagtcccagagcttttttttttttttttttttttttgaaacacagccttgctctgtcacccaggctggagtgcagtggcaccatcacgactcatgcagcctcgacttcctgggttcaagtgatcctcctgccacagcctcctgagtagctggggctacaggtaccacca

SEQ ID NO: 1886796 - DNA, 4001 bp, Homo sapiens; identical to SEQ ID NO: 1243555

SEQ ID NO: 1886797 - DNA, 4001 bp, Homo sapiens
gcggatcccttgaggtctggagttcaagaccagcctggctaacctggtgaaaccccatctctactaaaaatacaaaaattagcctggtgtggtggcgtgcacctgtaatcccagctactagggaggctgagatgggaggatcgcttgaacctgggaggtggaggttgcagtgagccatgaaattgcactaccgcaccaaaaaaaaaaaaaaaaaatttaattactgtggaccttatggggacgctacatcaagctgtttcccaattgaattggaatgccacaacaacggctgaacactgtaaatgtccaaatctggaggaacagaggaaggtaaacatttgattctcaagtggaagttcaaagcattacattctttctggaggacagtttggaaacatgtacacaaagtaatctggcaattccatttctagtttttctcagggaaatgttcaagcaaatgaataaaggtgtacgtagaagcatatctgcaaatacagaaagatggaaaaaatctaaatgtccaagggtgggggacttaaaatatgaaaattccgccaggcacggtggctcacgtctgtaatctcagcactttgggaggccgaggcgggcagatcacctgaggtcaggagttcgagaccagcctgaccaacacggagaaaccccgtctctactaaaaatacaaaattagccgggcgtggtgacacatgcctgtaatcctagctactcgggaggctgaggcagaagaatcgcttgaatccaggaggcggaggttgcagtgagccaagatcgcgccactgcagtccagcctgggtgacagagcgagactctgtctcaaaaaaaaaaaaaaaatatatatatatatatatatatatatatacacacatatataatatatattcacaggcatataactgtctgaacagtaaaactgtaagaacacactaaaacatgaatagtacttattcctggatggtcgtattagaaatgttttttaccttcattcattaaacaaatatttactaagcatctaccatgtgccaggcacaattctaggtgcttgtcatagggcattaaaaagtgtctgccctcatgaacacttatcgttgagtcgtgggaaacacgtatatgtcaggtagtgataaacattagggagaaaagttaacgccgagcacaggttgtttacagagctggggaaggcctccttgagggggtgacatatgagcagaatgagggagcaagccttgtggctatcacgagaaagctatctttatggttttccaattaattttctaaattttctcttccaagcatgcaacacctacataattaagacaaaacaaaccaaaaaaactctttccatttatgaaagagatctggagcctgaaatcatctccgggtcgaggcgtggagagagtgggagaggatccgagggtatggaaaggaccccgagcccccctgctctagatccctccgggccgtgggacccctgacgcccagcagcaactcgtggacaaagcagctggtgagagaacgcgggactccggccaggtcagtgtcccgcttgccgcgtcctgctaaggcgacccgaagacagaggatcgccgcaggaggctccgcgccccttacccgagggcacttcccagcaagctcgacgcctctccagggaattgggaggagcgggacccaagaggctagaaaagagtctccccggcccgagctccacggcccgcggcctttcggccctcacctactagttggcaaagaaagaccgtggcagaaggaagaggccgctccagcgcatcccttcgggcggagcagaagctccacttgtggctaggccatgtgccctctccgttcctcgggccagccttggcttcccctttttgtcgctcaagggccagggtcgcaaggaaatgtgaaaaaaaagcggagacaaaagagaacgaggtaaatctagatgcagagcctcgcctttcctcccgggtgcaggtgtatgacgcgtatggagtttctgtcttctaataggcagcctgagaattcttcctgttcattggccatcggtcatggagaaggcgggctcagtggacgaacggctttctgggagctggggaatgcttgcgtagcgtagtttcccagcgagccccgcgaggacttccggcgccgggagctcgcggcggaagtgggatctcctgggccgtagtgggcgttgtgtgtttcgggggcgggggcgggggcgggggccggggcggggacggggcctctggccgcctggctccaacatcaagcaccgggctccgagtggccgggatcagcgccccgaggcagaggccggagggcgcgcgcactgctaggaagtgctggtcccccgcgccgctctgccagcttggtcccccggcagacgcccctgtacgatcgccgctcgccccgcgggcgaggctgcggtggacagcgcggggctccggctggctcgccttcccgcctgccgtgtcctgctgagcgaccctggtgagtcctggccctcttcgaggaaagtcttcttcgaagtcaccagaggatgagaatggtgcgcgcacctttcaggggtcttgtgaggagcagaataaataaagtgcttaggatggactaaagaattggaaacaacccgaatgcatcactcgagtattgattaagaaactagagcatatccataccgcggaagctcatagtgccgctaatgtctgtgcagtaaggtctcatttatgtagaaacacatcaagcaccttttctccccgctatggatgacttttttagtaaaagcacaggaaaaggtctgggacgtcatttgtcagactgttaagtcggggggtacaatggtattgaggaagggagagttttacagatttctatattgtttgaatcttcccttttttattaagatggtttgtatttttttcattttctttttacttttcttttctttcttttttttttttttttgagatggtctcactctgttgcccaggctggagtacagtggtgcgatcatagctcattgcaacctcaaactcctggactcaagcaatctttcctcctcagcctccccagtagctgggactacaggagccccacctggctttttttgttttttggtacagatggcgtctcacattgtcttcccaaaggggtcttgaacccctggcctcaagcaatcatcctgtgtctgtctcccaaaatgctgggattacaggcataagccaccaagcccggccagtttgtatttttattgttgaaacaaaaaatcgattactgaaaattgcataatacacttttcagtagagagtaacaatgtaaggtataaatgtgtcatacatttatatgtacctgtggataaatggctttggatggtgtctgtaagcccttctgtgacacctcagggccagatgtgttttggaattcagaggttttcaaatttgagaaagataatatagtgcacagacgatatatcaagcacatctccagagggatctggggcaacactaaataatgaaacatatcagttaaaattttttaattaggccgggcgcagtggctcacgcctgtaatcccagcactttaggaggccgaggcgggtggatcacaaggtcaggagtttgagaccatcctggccaacatggtgaaacctcgtctctactaaaaatacaaaaaattagctggacgtggtagctggtgcctgtagtcccagctacttgggaggctgaagcaggagaatcgcttgaacctggcaggcagaggttgcagtgaactgagattgcgccactgcactccagcctgggcgacagagtgagactctctctcagtaaaaaaaaaaaaaaaagatatttaattgatgtataatgtgcaatacagaaaaacacacgagtgggtatagctcaatgaaattttataaactgaagatatatgttattaatatttccaccataattttgaacatttacatttagtggaataaattgagattataa

SEQ ID NO: 1886798 - DNA, 4001 bp, Homo sapiens; identical to SEQ ID NO: 1243558

SEQ ID NO: 1886799 - DNA, 4001 bp, Homo sapiens
tgtgggggatgtggccgctggtccaagaaatctttcaaatttcaaaggcctctaaggcctctccagcgaagcaacttcaagagtgaaacctggaactgcaccctcctcccagcgaccgcgagacccggggcaggcgctgcgccctccaggaaacgccgcggtttcctgtctgccaattgcaggtgccgcctcctttccggctccgcgagggcacgaagcaggggagggcgattcccacgcgcgggcaccccagggcgacctgcccgcggtgacagcgctcctcacgccgggtcccttctggccgagcccgcggccggggaggccgggccggcgacgccggcgtcacggagcgcgaggaaaaccgagccggccgcccagcgcctatcccgacgcagccccgagtccgctacgcccttggccgggtggaggagaggccgcgccggcttccgggcgtcagtgcggctcctcccacgagcaacccctgccgcgaccccaacccgccacgcccgggccgcggacccacctgcctcgtccgcgccgtcctcgcccgcgtccccgcaggaccccaccgggccccaggcgcgccgcgccgtcgccccgtccaccctcggcccaccgctaagggaagggcggccccgagtccggctgacgccgccgccgccgtccgaggccccgcactgtcgggacgacccaggagacaggaagcggcccagccggtcccgcttcatggcagcggaggacgccagcagaatcccgcgggtgctgcccggcccgaggttcctagaggacccggcgttaggctccgctcggcgcgctggaagcgaggcggggcgggggaggggcggagcgagaagcaaagcgaggcgggcggggcgggccaggggccaggggcgggaccccgccggccgaggttccacccgcggtgccagcgcccccgctcgtaccgctcccctctcgggcccgagggcggccgtgcccgcctctgtcgccaatggagcgctggcctggggcggggcggtgggcggaggggctcgccgacacctcacgacgagtcctccagggagaggcgacgcggccctcaccgcctcttaccgtgggagacggaggcgcggggcgggcaggcgccggcggaggccacgcggcgcgcaggtggcgggcgggctgcagaaaggggaggggggccggggtctcacgtagagaggggcctggctgccgcggttagacgcccatggcaactccgtgaggggcccttctcgccagccccgtctcaagacggcgaagaggcccggctccgtcgcgacaacccacccggactctgccgcccccgccactaacacccgtggggcccgcagtacgcgcggagggggcccgtcgccggaagtgcggccgcgtcccttcctgcggtccgctgctcgggcggctccagcaccagcgccggctgcgttccgggcctccggtcgcccgtccagcccctcggctaccgccgccgcctcccccgctcggcgccatggccgctgcggccggggacggcacggtgaagccgctgcagagcgccatgaagcttgccaacggggccatcgagctggacaccggcaaccggccccgggtgaggcggggcgggggcggggcttggccgctgagggtggcccctggagggacccccgcccggggagggcgaggacggggccggctcgggctggagacttgggagcgggcgccagccgggatcccgggccgcggttcccgggcgaggacgggggcggggcgcagccgggcgtgcagtgaccttggacagctcagatcctgcggaccttggctttccactccgctcgctgagccggtgcatcacagcctgggctccacctgtagaggagatgtagcaggagggtccgccaggccaccttccaaaatccgagtgacgggcaggtccgtgcgttcgtgcatttttctgggcagagatggtagatttaatccggttgccacaggggacggcatgcagagaaggccacatacctgctcatttgtgatgctgtttgcagtcgtcttaggaaggaaaagcaggccggaggggtgtggcccgttcctgagatggggccgaatctaaggttggcgaccaggtagagaagctggcccagccacacccggctgcccaaggagggaaggagcctgcctgtgcctaggagaagcctcgttcctgaatctgctgctttccccaagttggtttttagggcagcaggtgcccccgcaagtcagaaatcctgcctggattatatttcgtctttctctctgaggcatagacttaaagataggaaacttaacagctagggataaaacaaaaaaacatagcatattgctgggcgctgtggttcacgcctgtaatcctgacactttgggaggcccaggcggtggatcacctgaggtgaggagtttgagaccagcctggccaacgtggtgaaaccccgtctctactaaaaatacaaaaattagctgggtgtggcggtgcacacctgtaatcctagctccttgggaggctgagggatgagaatcacttgaacccaggaggcggaggttgcagtgactcgagatcctgccactgcactccagcctgggcgacagagtgagactctgtctcaacaaaacaaaacaaaccaccattctgtggttccaatgacctgtgccttgtcagaggggtcacacagccttgaaaggtaacagttctaggctcctgtgtgcactggaaatacgtaactcgcaggttctgggaaagggatttctcggaacttaaaccgggaagtgatttgaaaacttccagtatcactccctttatcctctcagaaaagtatttttttaagccactgaatgaatcacccttgagttgcacaagaaggaaacattgcatagaatgaaaaatgacagcaaactgctgaggtcacttccccaggcccactgaatgagaatatcagttcctgtgctggagagaaaggcagtcagaggagaaaatgaggtccagctcgtccctggctctctctctctctcaggtcctgatgtcttttccaagtctggagagcagcgatgctgcctgtgccctgcgcagaaaaccgtgttccggctgcagctaaccaccgcaggctcaatgtctctgggtgtatctcagagataagcaggtggtggtgttccttgcttatcccacaagggcacctggccggaataatggagtcacttccctccactggcctgaccccactctttctctttcctggacacaggaggcatacacggaatacctgaggagcatccactatatctcccaggtgttactagaagaagtggaaaccactaaaggtacggctcagccagccgggcgcggtggctcacgcctgtaatcccagcactgtgggaggcagaggcgggctatcacctgaggtcaggagatcgaaaccatcctggctaacatggtgaaaccccgtctctactaaaaatctaaaaaatcagctgggcctggtggcgggtgtctgtagtcccagctactcgggaggctgaggcaggagaattgcttgaacccgggagcagaggttgcagtgagccgagatcaccccattgtactccagcctggaacaagagcgaaactccgtctcaaaaaaaaaaaaaagaaaagaaaaagaaaaaggcatggctgagccctgctgcttcctccatgctggacaaattgtgggcatcctagcccttgatgggtgccaggcttcggcgggggtctcttgtatccttctagcctgaccatttgtagtaggtggaccagcccacactcagtgtgatatagtggcaggaagggaccagcgttgtggataagaagatggagactggggtgtggcaagacactggctccagtgagcggcacagacgtggggcagcattccagctgtggggtgtgcaaaggccctgaaataggagtgggcggggtggggctgtgtgcatgccttgggtggaactggggccgttctggt

SEQ ID NO: 1886800 - DNA, 4001 bp, Homo sapiens; identical to SEQ ID NO: 1243560

SEQ ID NO: 1886801 - DNA, 4001 bp, Homo sapiens
ccagggttccaccctcggtgctggggcagccgtggcgccgtctctttgtcccatggccacttgactgccagcgcactgtccagcaagaaggccttgcagctggagctggtatccatggtgtagtcgtggccctggtcgcagccccacacgacctggatgacgccgcagtactcggaggacagtgtcctctgaaggtggggcagggccccgcagctggccgcatgtccatgcacccaccccaccaagccgtgcaggcactgggggctggatgtgatcagatccactgcagagagtcaacagagatgtcagatccacggctggtcggcacccagcccaccctccaccgggggaggactcacccagacacgctccctcctctgcccctgttgggggctgggcaccgaccctgcaaaggatcagtgtggccatgagcaggacaagcaggcggaggttcacagcgctcgtcgtacgggaccctctcgagatctcaaacctcagcggtccccataggcaactttctcttccctcaccccagctcctcccagttcatctctccacaacagtcccagggctgttggcactgaacccgggcatggcccattccccccacccagaggctcccgcggaggcacgccctgtccctctctcaacacccgtcacactgcagtactgacagcctgaacgtgctctgaacagactagggcgtactttgcacaaggcttccggcgaccagccggggaggcgttgaccctctgcaggaaggacttgagaaggctgtggcactggtagaactgggcgtggcagctcttgcagacaaacggagacaaggtggggtcctggcggacagccacaccaagcaggcgctggaagtcccgtacgagcacgcgctcctctgcggatggcctctccatgctcgctccaggcgccctctcggagatgctgcgcaggcttctcgaggaaaacttcccgtggcagaggcgacagtgacccatggcgagagcccggcctgctcctgcacagagcggcaggaagtgttagcagctggcaaaggaggctcctgagcacagggcgtcccggactccaggtccgagggcagcgcctgcagcgcccttcgcgcggctcccggacacagcaagcggctcgggcgcgcggctctcggcgggacaagccgccctgtgggggatgtggccgctggtccaagaaatctttcaaatttcaaaggcctctaaggcctctccagcgaagcaacttcaagagtgaaacctggaactgcaccctcctcccagcgaccgcgagacccggggcaggcgctgcgccctccaggaaacgccgcggtttcctgtctgccaattgcaggtgccgcctcctttccggctccgcgagggcacgaagcaggggagggcgattcccacgcgcgggcaccccagggcgacctgcccgcggtgacagcgctcctcacgccgggtcccttctggccgagcccgcggccggggaggccgggccggcgacgccggcgtcacggagcgcgaggaaaaccgagccggccgcccagcgcctatcccgacgcagccccgagtccgctacgcccttggccgggtggaggagaggccgcgccggcttccgggcgtcagtgcggctcctcccacgagcaacccctgccgcgaccccaacccgccacgcccgggccgcggacccacctgcctcgtccgcgccgtcctcgcccgcgtccccgcaggaccccaccgggccccaggcgcgccgcgccgtcgccccgtccaccctcggcccaccgctaagggaagggcggccccgagtccggctgacgccgccgccgccgtccgaggccccgcactgtcgggacgacccaggagacaggaagcggcccagccggtcccgcttcatggcagcggaggacgccagcagaatcccgcgggtgctgcccggcccgaggttcctagaggacccggcgttaggctccgctcggcgcgctggaagcgaggcggggcgggggaggggcggagcgagaagcaaagcgaggcgggcggggcgggccaggggccaggggcgggaccccgccggccgaggttccacccgcggtgccagcgcccccgctcgtaccgctcccctctcgggcccgagggcggccgtgcccgcctctgtcgccaatggagcgctggcctggggcggggcggtgggcggaggggctcgccgacacctcacgacgagtcctccagggagaggcgacgcggccctcaccgcctcttaccgtgggagacggaggcgcggggcgggcaggcgccggcggaggccacgcggcgcgcaggtggcgggcgggctgcagaaaggggaggggggccggggtctcacgtagagaggggcctggctgccgcggttagacgcccatggcaactccgtgaggggcccttctcgccagccccgtctcaagacggcgaagaggcccggctccgtcgcgacaacccacccggactctgccgcccccgccactaacacccgtggggcccgcagtacgcgcggagggggcccgtcgccggaagtgcggccgcgtcccttcctgcggtccgctgctcgggcggctccagcaccagcgccggctgcgttccgggcctccggtcgcccgtccagcccctcggctaccgccgccgcctcccccgctcggcgccatggccgctgcggccggggacggcacggtgaagccgctgcagagcgccatgaagcttgccaacggggccatcgagctggacaccggcaaccggccccgggtgaggcggggcgggggcggggcttggccgctgagggtggcccctggagggacccccgcccggggagggcgaggacggggccggctcgggctggagacttgggagcgggcgccagccgggatcccgggccgcggttcccgggcgaggacgggggcggggcgcagccgggcgtgcagtgaccttggacagctcagatcctgcggaccttggctttccactccgctcgctgagccggtgcatcacagcctgggctccacctgtagaggagatgtagcaggagggtccgccaggccaccttccaaaatccgagtgacgggcaggtccgtgcgttcgtgcatttttctgggcagagatggtagatttaatccggttgccacaggggacggcatgcagagaaggccacatacctgctcatttgtgatgctgtttgcagtcgtcttaggaaggaaaagcaggccggaggggtgtggcccgttcctgagatggggccgaatctaaggttggcgaccaggtagagaagctggcccagccacacccggctgcccaaggagggaaggagcctgcctgtgcctaggagaagcctcgttcctgaatctgctgctttccccaagttggtttttagggcagcaggtgcccccgcaagtcagaaatcctgcctggattatatttcgtctttctctctgaggcatagacttaaagataggaaacttaacagctagggataaaacaaaaaaacatagcatattgctgggcgctgtggttcacgcctgtaatcctgacactttgggaggcccaggcggtggatcacctgaggtgaggagtttgagaccagcctggccaacgtggtgaaaccccgtctctactaaaaatacaaaaattagctgggtgtggcggtgcacacctgtaatcctagctccttgggaggctgagggatgagaatcacttgaacccaggaggcggaggttgcagtgactcgagatcctgccactgcactccagcctgggcgacagagtgagactctgtctcaacaaaacaaaacaaaccaccattctgtggttccaatgacctgtgccttgtcagaggggtcacacagccttgaaaggtaacagttctaggctcctgtgtgcactggaaatacgtaactcgcaggttctgggaaagggatttctcggaacttaaaccgggaagtgatttgaaaacttccagtatcactccctttat

SEQ ID NO: 1886802 - DNA, 4001 bp, Homo sapiens
gtgggcacctgtagtcccacctactccagaggctgagacaggagaattgcttgaaaccgggagcaagaggttacagtgagctgagatcgtgccactgcactcctgcctgggcaacagagcaagactccgtctcacacacacacaaaagagtgtaaggcaagatatggaaacctatgaggtatgagctagcagtgactgggtcaaaaggccctctaagccaatggttctcaaactccactgtgatcagaatcattgggaggatttactgaaacagaatgccaggccctagtgcccgctttggattcagcaggtctggggtagggtccaagaatgtgcatttctaacaagtttccaaataatgctgcttctggtctgagaccacgctttgagaaccactgctgttagcattgttaaagaccttggactgtattttacccaatggttttcttttctttttttttttcccccaagatggagtctcactgtggcacccaggctggagtacactggcatgatctcggctcactgtaacttccacctcccaggatcaagcaattctccctgcctcagcctcctgagtagctggaattacaggcgcccaccatagtgcccggctaatttttgtatttttttagtagagacggggtttcacgatgttggtcaggctggtcttgaactccggacctcaagtgatctacccacctcggcctcccaaagtgctgggattacaggcatgagccaccagccggccggttttcaaacctagatgcacatctgaatcagctgaggctatttaaaaaatggaagttcctaaacattcacacgagtgaatgaatagctctgggatggggtcctggaacctgcgtttttaccaagttccccaagtgatttagatataaccaatggccatttaacaaccttggcaaaaattaactgaaaagttttaagcaaggaaatatcatggtcagatctgaatcttggacagctatccctggtcttgaagaatctggctctgaaattccagcccagacagctccatcttctactatgggtggatctgggacccttctacctgaatggggttaagcagagccttgttggattctgaggagattgcagtatgtccttcgctgataagggtcatcctgccgtaagagcagaaagaggcccctgcatcccaggcagctgttccccatgagctcccttcaaccaaaacccagaaaactctgagaagtttaggatctctttggtccaactcaaaggtggctagaggcagagatcctggaaaggaggcagagggtagcacctgttaaaagctcactgattctggctggctgcaatggctcacgccagtaacccctgcattttgggaggccaaggcaggaggatcgcttgaggccagaagttcaagaccgaactgagcaagacaatgtttctacaaaaaaaaaaaaaaaaaaaaaagacgaagaataagcccactgattcattcacacagtggaaaactgcagcttgcagactgacataggaatctctgtgtggtggaccggccccacaccaccagacacaagaggctgggaagatgaatatactaaatacgcggcacccacccctagcccaaccaaaactctggacagagccgttagaggtagaacgttataggagggctgcaggctctgcgtggttatttagcactcacttctctggactgttagccctctcgggtactcctgcggatctagagcagccggttcccagtcatcggtgtttcgttccaaccaggagatgagggctggtttgggacctgcgcaccctggggaaagagaacaaatcagaaggccagctcctagatcacgccgagtagtatctccccgacggcacctcctgctaagcccctgcccacctcccctgacaacctggtcgcctgccaggaccgtggcctccctgcctacaccctctccggctcctgcatcccttcgcgccccgcggcagcggatggggccggcctcaccgagcgcgcccaggtgaccgtaggtctcccgcatcacgtcccggtacagggccctctgcgcgggccgcaggcagccccactcctccggggagaagtacacggccacgtccacgaacttcagagccctcggcctcctgccccttttccgactgggtctggcctttcctggtccctgcgcagggagcggagccgaaggtggcgccatgggacccgagaagccggcgccacggccttccgtgtccaggcctcggccctcgggcgctggcggcccctgggatcgaggagcccctgccggaccagggctgagcgtggccggggaggcccggagggaatcggaattggtcgcccgcggggctaacggaaaccttttgctgttattcaggaaactcctgcccgaacttgggtgaaaggcaccggaagatgccttcggggaaaatggcggcgctgctaccgcaccgcctttgcctggaacacaggcagcttccagctatcgattttattgaccggagcgccatgccggcttcctaacctctttgccctcaagtgtaatggcgctgcgattgggcttcacgccgtcttttttcccctccccaatacgcgcgttcattggacgagagccgaagatcgagcgttctgattgggtgctagcaaaggcggtccgtttgaacgaagccaagagctgcataagggcaggaagctggactgctaggatcaggcgactacaaggagttgtgaagcgacttgcaccgacctgggggcagcaagaggccccggggctgctttccgctgttcgactctggcaggctcagccaatcactgaaggagggaacgatttgagcgatggagccactctggccgagttagagctgagattatcctgagttccttttactggtgttctcagagcatccttgactttggagaatggttatcttctttgtttgccctttaggggagggaattatggttagcatttcctgggggcaggcgccatgcccagcatattacatatttcatctttattattttttatttttattttatttatttatttttgagacagagtcgtgctctgtcgcccaggctggagtgcagtggcgaaatctcggctcactgcagcttccacctcccacgttcaagcgattctcctgcctcagcctcccgagtaagtgagattacaggcgcgtgccaccactcctgactaatattcatatttattagcagagatggggtttcaccatgttagccaggctggtctcgaacttctgacctcaagtgattcacccacctcggccccacgaagtgctaggattacaggcgtgagccactatgcccggccttatttttatttttttgagacagggtctcactctgttacccgggcgggatggaatgcagtagtgcaatctcagctcactgcagcctctaactcctgggctcaagcaatcgtcctgcctcagccttcagagtaactgggactactggtgtgcactaccacgcctggctaattttttatgttatttgttgagtcagggtttccctgtgttgcccaggctggtctcgaacccttaggctaagtgatcctcctgcctcgtcctcccaaagggctgggattactggcataagccacagcaccggagccattagttattcgctttttttttttgagactgggtctcattccgttgcccaggctggagtgaaggcatgcacccacagtgctctgctaattttttgtatttttggtagagacggtgtttcgccatgtttcccaggctggtctcgaactcctgagctcaagcaatccgcccacctcggtctcccaaagtgctgggattacaggagtgagccaccacacccagcccgttattaattctttactagcattttgtgaaccaatggttatcatcctggttctactaatgaagaaacgatctcagagggattccatgagtttccagggccatactgctagtaaggagtggggaataaa

SEQ ID NO: 1886803 - DNA, 4001 bp, Homo sapiens; identical to SEQ ID NO: 1243578

SEQ ID NO: 1886804 - DNA, 4001 bp, Homo sapiens
agtgcccggctaatttttgtatttttttagtagagacggggtttcacgatgttggtcaggctggtcttgaactccggacctcaagtgatctacccacctcggcctcccaaagtgctgggattacaggcatgagccaccagccggccggttttcaaacctagatgcacatctgaatcagctgaggctatttaaaaaatggaagttcctaaacattcacacgagtgaatgaatagctctgggatggggtcctggaacctgcgtttttaccaagttccccaagtgatttagatataaccaatggccatttaacaaccttggcaaaaattaactgaaaagttttaagcaaggaaatatcatggtcagatctgaatcttggacagctatccctggtcttgaagaatctggctctgaaattccagcccagacagctccatcttctactatgggtggatctgggacccttctacctgaatggggttaagcagagccttgttggattctgaggagattgcagtatgtccttcgctgataagggtcatcctgccgtaagagcagaaagaggcccctgcatcccaggcagctgttccccatgagctcccttcaaccaaaacccagaaaactctgagaagtttaggatctctttggtccaactcaaaggtggctagaggcagagatcctggaaaggaggcagagggtagcacctgttaaaagctcactgattctggctggctgcaatggctcacgccagtaacccctgcattttgggaggccaaggcaggaggatcgcttgaggccagaagttcaagaccgaactgagcaagacaatgtttctacaaaaaaaaaaaaaaaaaaaaaagacgaagaataagcccactgattcattcacacagtggaaaactgcagcttgcagactgacataggaatctctgtgtggtggaccggccccacaccaccagacacaagaggctgggaagatgaatatactaaatacgcggcacccacccctagcccaaccaaaactctggacagagccgttagaggtagaacgttataggagggctgcaggctctgcgtggttatttagcactcacttctctggactgttagccctctcgggtactcctgcggatctagagcagccggttcccagtcatcggtgtttcgttccaaccaggagatgagggctggtttgggacctgcgcaccctggggaaagagaacaaatcagaaggccagctcctagatcacgccgagtagtatctccccgacggcacctcctgctaagcccctgcccacctcccctgacaacctggtcgcctgccaggaccgtggcctccctgcctacaccctctccggctcctgcatcccttcgcgccccgcggcagcggatggggccggcctcaccgagcgcgcccaggtgaccgtaggtctcccgcatcacgtcccggtacagggccctctgcgcgggccgcaggcagccccactcctccggggagaagtacacggccacgtccacgaacttcagagccctcggcctcctgccccttttccgactgggtctggcctttcctggtccctgcgcagggagcggagccgaaggtggcgccatgggacccgagaagccggcgccacggccttccgtgtccaggcctcggccctcgggcgctggcggcccctgggatcgaggagcccctgccggaccagggctgagcgtggccggggaggcccggagggaatcggaattggtcgcccgcggggctaacggaaaccttttgctgttattcaggaaactcctgcccgaacttgggtgaaaggcaccggaagatgccttcggggaaaatggcggcgctgctaccgcaccgcctttgcctggaacacaggcagcttccagctatcgattttattgaccggagcgccatgccggcttcctaacctctttgccctcaagtgtaatggcgctgcgattgggcttcacgccgtcttttttcccctccccaatacgcgcgttcattggacgagagccgaagatcgagcgttctgattgggtgctagcaaaggcggtccgtttgaacgaagccaagagctgcataagggcaggaagctggactgctaggatcaggcgactacaaggagttgtgaagcgacttgcaccgacctgggggcagcaagaggccccggggctgctttccgctgttcgactctggcaggctcagccaatcactgaaggagggaacgatttgagcgatggagccactctggccgagttagagctgagattatcctgagttccttttactggtgttctcagagcatccttgactttggagaatggttatcttctttgtttgccctttaggggagggaattatggttagcatttcctgggggcaggcgccatgcccagcatattacatatttcatctttattattttttatttttattttatttatttatttttgagacagagtcgtgctctgtcgcccaggctggagtgcagtggcgaaatctcggctcactgcagcttccacctcccacgttcaagcgattctcctgcctcagcctcccgagtaagtgagattacaggcgcgtgccaccactcctgactaatattcatatttattagcagagatggggtttcaccatgttagccaggctggtctcgaacttctgacctcaagtgattcacccacctcggccccacgaagtgctaggattacaggcgtgagccactatgcccggccttatttttatttttttgagacagggtctcactctgttacccgggcgggatggaatgcagtagtgcaatctcagctcactgcagcctctaactcctgggctcaagcaatcgtcctgcctcagccttcagagtaactgggactactggtgtgcactaccacgcctggctaattttttatgttatttgttgagtcagggtttccctgtgttgcccaggctggtctcgaacccttaggctaagtgatcctcctgcctcgtcctcccaaagggctgggattactggcataagccacagcaccggagccattagttattcgctttttttttttgagactgggtctcattccgttgcccaggctggagtgaaggcatgcacccacagtgctctgctaattttttgtatttttggtagagacggtgtttcgccatgtttcccaggctggtctcgaactcctgagctcaagcaatccgcccacctcggtctcccaaagtgctgggattacaggagtgagccaccacacccagcccgttattaattctttactagcattttgtgaaccaatggttatcatcctggttctactaatgaagaaacgatctcagagggattccatgagtttccagggccatactgctagtaaggagtggggaataaagatttaaacctggggcagacagagcctttattcataccactgataggcatccttccttcacagtatcctaatttgcttgctaaaccaggaatccacctgagctcttgttttcttctcaagttcaatattctgcataatctccctacattattttcacgtgacatttgttcaacgtacaaagcatagtgctaggcaattgggagagcgtacataaataagtcataggccatgctttgaatggagcttacagtctagtaaagcatataaattcacaatgaatcataacagaatgatacaagcatgtatgtgaaaggcactgaactgaaaattgctgatggaacaagccagcacccaccccattagcctccacattttttttttttttttttttttgagacggagtctcgctctgtcacccaggctggagggcagtggcgccatctcggctcactgcaagctccgcctcccgggctcacgccattctcctgcctcagcctcccgggtagctgggactacaggcgcccgccaccacgcccagctaattttttgtatttttagtagagacggggtttcaccatgttagccaggatggtcttgatctcctg

SEQ ID NO: 1886805 - DNA, 4001 bp, Homo sapiens
gcaaggaaatatcatggtcagatctgaatcttggacagctatccctggtcttgaagaatctggctctgaaattccagcccagacagctccatcttctactatgggtggatctgggacccttctacctgaatggggttaagcagagccttgttggattctgaggagattgcagtatgtccttcgctgataagggtcatcctgccgtaagagcagaaagaggcccctgcatcccaggcagctgttccccatgagctcccttcaaccaaaacccagaaaactctgagaagtttaggatctctttggtccaactcaaaggtggctagaggcagagatcctggaaaggaggcagagggtagcacctgttaaaagctcactgattctggctggctgcaatggctcacgccagtaacccctgcattttgggaggccaaggcaggaggatcgcttgaggccagaagttcaagaccgaactgagcaagacaatgtttctacaaaaaaaaaaaaaaaaaaaaaagacgaagaataagcccactgattcattcacacagtggaaaactgcagcttgcagactgacataggaatctctgtgtggtggaccggccccacaccaccagacacaagaggctgggaagatgaatatactaaatacgcggcacccacccctagcccaaccaaaactctggacagagccgttagaggtagaacgttataggagggctgcaggctctgcgtggttatttagcactcacttctctggactgttagccctctcgggtactcctgcggatctagagcagccggttcccagtcatcggtgtttcgttccaaccaggagatgagggctggtttgggacctgcgcaccctggggaaagagaacaaatcagaaggccagctcctagatcacgccgagtagtatctccccgacggcacctcctgctaagcccctgcccacctcccctgacaacctggtcgcctgccaggaccgtggcctccctgcctacaccctctccggctcctgcatcccttcgcgccccgcggcagcggatggggccggcctcaccgagcgcgcccaggtgaccgtaggtctcccgcatcacgtcccggtacagggccctctgcgcgggccgcaggcagccccactcctccggggagaagtacacggccacgtccacgaacttcagagccctcggcctcctgccccttttccgactgggtctggcctttcctggtccctgcgcagggagcggagccgaaggtggcgccatgggacccgagaagccggcgccacggccttccgtgtccaggcctcggccctcgggcgctggcggcccctgggatcgaggagcccctgccggaccagggctgagcgtggccggggaggcccggagggaatcggaattggtcgcccgcggggctaacggaaaccttttgctgttattcaggaaactcctgcccgaacttgggtgaaaggcaccggaagatgccttcggggaaaatggcggcgctgctaccgcaccgcctttgcctggaacacaggcagcttccagctatcgattttattgaccggagcgccatgccggcttcctaacctctttgccctcaagtgtaatggcgctgcgattgggcttcacgccgtcttttttcccctccccaatacgcgcgttcattggacgagagccgaagatcgagcgttctgattgggtgctagcaaaggcggtccgtttgaacgaagccaagagctgcataagggcaggaagctggactgctaggatcaggcgactacaaggagttgtgaagcgacttgcaccgacctgggggcagcaagaggccccggggctgctttccgctgttcgactctggcaggctcagccaatcactgaaggagggaacgatttgagcgatggagccactctggccgagttagagctgagattatcctgagttccttttactggtgttctcagagcatccttgactttggagaatggttatcttctttgtttgccctttaggggagggaattatggttagcatttcctgggggcaggcgccatgcccagcatattacatatttcatctttattattttttatttttattttatttatttatttttgagacagagtcgtgctctgtcgcccaggctggagtgcagtggcgaaatctcggctcactgcagcttccacctcccacgttcaagcgattctcctgcctcagcctcccgagtaagtgagattacaggcgcgtgccaccactcctgactaatattcatatttattagcagagatggggtttcaccatgttagccaggctggtctcgaacttctgacctcaagtgattcacccacctcggccccacgaagtgctaggattacaggcgtgagccactatgcccggccttatttttatttttttgagacagggtctcactctgttacccgggcgggatggaatgcagtagtgcaatctcagctcactgcagcctctaactcctgggctcaagcaatcgtcctgcctcagccttcagagtaactgggactactggtgtgcactaccacgcctggctaattttttatgttatttgttgagtcagggtttccctgtgttgcccaggctggtctcgaacccttaggctaagtgatcctcctgcctcgtcctcccaaagggctgggattactggcataagccacagcaccggagccattagttattcgctttttttttttgagactgggtctcattccgttgcccaggctggagtgaaggcatgcacccacagtgctctgctaattttttgtatttttggtagagacggtgtttcgccatgtttcccaggctggtctcgaactcctgagctcaagcaatccgcccacctcggtctcccaaagtgctgggattacaggagtgagccaccacacccagcccgttattaattctttactagcattttgtgaaccaatggttatcatcctggttctactaatgaagaaacgatctcagagggattccatgagtttccagggccatactgctagtaaggagtggggaataaagatttaaacctggggcagacagagcctttattcataccactgataggcatccttccttcacagtatcctaatttgcttgctaaaccaggaatccacctgagctcttgttttcttctcaagttcaatattctgcataatctccctacattattttcacgtgacatttgttcaacgtacaaagcatagtgctaggcaattgggagagcgtacataaataagtcataggccatgctttgaatggagcttacagtctagtaaagcatataaattcacaatgaatcataacagaatgatacaagcatgtatgtgaaaggcactgaactgaaaattgctgatggaacaagccagcacccaccccattagcctccacattttttttttttttttttttttgagacggagtctcgctctgtcacccaggctggagggcagtggcgccatctcggctcactgcaagctccgcctcccgggctcacgccattctcctgcctcagcctcccgggtagctgggactacaggcgcccgccaccacgcccagctaattttttgtatttttagtagagacggggtttcaccatgttagccaggatggtcttgatctcctgacctcgtgatccacccgtctcagcctcccaaagtgctgggattacaggcgtgagccactgtgcccagccctttttttttttttttttagacggagtcttgctctgttgcccaggctagagtgcagtggtgcaaactcggctcactgcaaccttggcctcccgggttcaagtgattctcctgcctcagcctcccgagtagctgagattacaggcacccgccactttgctcggctaatttttgtatttttagtagagacgggatttcaccatcttggccaggctggtctcgaactcctgacctcatgatccaaccacctctgcctcccaaagtgctgggattac

SEQ ID NO: 1886806 - DNA, 4001 bp, Homo sapiens
caagccattctcctgcctcagccttctgagtagctgggattacgggcacacgccaccatgctcagctagtttatgtatttttagtagagacagggtttcagcatgttggtcaggctggttttgaactcctgaccttgtgatccgcccgcctcagcctcccaaagtgctgagatcacagatgtgagccaccacgcctggcctaaaacatttttttttttaagagacaaggtctcactctgttgcccaggccagagtacaatgctgcaataataactcactgtagcctcaaacttctgggtcaagcaattctctcacctcaacctcttgtgaagctgggactagaggcatgtgccatcagcctggcttattttctttttttttttcatagcaacaaggtcacactatgttccccaggctggtctcaagcagtcctcccaccgcgaccccctaaagtgttcgaaatataggcatgagccaccgaacctggccaatttctccttttctttaagtgtccttgttttcctgtgttctccttgtggatctgccttttttttttttttttgacaggttctcactctgtcacccaagggagtgcaatggtgccatctcagctcactgcaacctccacctcctgggctcaggtgattctcctgactcagcctcccaagtaactgggaccacaggtgtgtgccaccatgcctggctaattttcatgttttttgtagagacggggtttcaccatgttgcccaggctgggctcaggggatctgtctgccttggcctctcaaagtgctggaattacaggtgtgagtcactgcacccggcccgttttttttttgttttttttgttttttttttttttgtgagatggagtcttgctgtgttgcccaggctggagtgcaatggtgcgatctcggctcactgcaacctcccaggttcaaatgattctccctcctcagcctcgaggatagccgggattacaggcaccggtcatcatgcccagctaatttgtttatttttgtagagagagggttccaccatgctgtccaggctggtcttgaactcctgacctcaggtgatctacccgcctcagcctcctaaagtgctgagattacaggtgtgagccactgcatccagcctccctgactctttattaccttttattctgtttctaagtacttaagtcctgtctccttggccaagccagactaggcccaacaccctcaattcaccctggctccaaagagggcaaaagcaactctctttctctaaggccagggaagtatctaccacaatctctgaaacctgtgaacttttctgtgggcctgtagtttcaagtcccaccttaactgtccttaaaaaaaaaaccaaacaatgacctacctaatccatctaatttctcaactaactgccaccatctctactatatccacctgcatcctatttcactgtacatgtcaggaatctttcttctcaccccattccatgtttgaccagattccctctgcaagtgttctaccagagccacagcctcctcaatgctctgtggatggtgcttctgcatctgggtctgtgtctccctgggcagaatagtcaggaactgctccagcaccagcagttccagtatctgctcttttgagtggatctctggcttcagccatagatgacataattcttgaagtttgctgacagcctcacggggtccacctgcttcatcataggtgaaattccggaagtgccagcaagagctcttaggatcgagacagtccatttgaggagattttttactctgaccggagctctctcttgcaggccccttggtctcccacaaagccctgatctgagggtccaagtacgcagccactttcagatctaccatcatcattctgctctaggaagttctgctcctgtgttaagacacccaattggtaccacgtttaacaaatgagatcctgtctggtcttgtacaaaagcaataaaaggatcttcttcctaaaagcactgaggacaagaaaaagaaaagtatgtatcaataagaaactcacatgaacctcatcacttgcgacttatgagagaaagaagaacagaaaaggtgtcctgtcttcccttcaaaatcaactagcaggccctttgtttttctccttttctattattcagctgaagcacagcacaaaacacacaaatgtcagtggacaactgtcttttttataaaaaagaaaacaatttaggaaagattggtgggtaagaaaattggcacccactggctgaaaggtattttgggattttccaaggatttaactggtgtgcctcctatcccatcttccccataagaaaagaataggagaaaataagattaggaaaacattctgagattctcttaaatttcaacagatcatcccagtctgtctctagtaaggggagtacaacttttatgacccttcatcctcttgtgaagatggaagccttcactttaaaaatattttaggccaggtgcagtggctcatgcctgcattcccagcacttttggagaccgaggtgggaggatcacttgagccaggagtttcagaccagcctgagcaacatagcgagaccccgtctctacaaaacacaaaatttgaagaaaaaaaaaaaaaatagccaggatggtagagcacaccagtagttctagctcaggaggctgaggtgggagagtcgcctgagcccaggaattcaaggttgcagtgagccatgacctcatcactgcactccagcctgggagttagagcaagactttgtctctaatttaaaaactaaaaataaaggcaccttaaaaaacaacattttagattttccattgtaggaatactggcaaaagagctgagacggtgagatcaaaatacagtagtatcccttctccaaggggggtaagttccagtacattctgtgaatacctaaaacccccaacagcatctaactgcattatactattttctctatgtatacatagctatgataccttaatttataaattaggtacaataagagattaacaataaaacactgtagtaagagttatttaaaactggcggtgcgccgtggctcatgcctgtaatcccagcactttgggaggcctgacgtgggtggatcacctgagaccaggacttcaagaccagcctggccaacatggtgaaaccttctttattgtaaacacaaaaattagccaggtgtggtagtgcgcgcctgtagtcccagctacccaggaggctgaggcaggaaaattgtttgaacccgggaggtgaaggctgcagtgagctcagactgtgccacggcactccagccagggcagcaaaacgagattccatctccaaaaaaaaaaaaaaaagttatttaaaacttatgaactgtttatttctggagttttccatttaatattttttggatggcagttgacagcgggtaagtgaaacccagatacagtggggggagggggtactacagaaagtaaaaaagtagcctattttcagacaatgtctcccaagtaagcaacaagatgctcatcattctttgcaacacacataaagggtgccatgcagatgatttatacgaattttgtttttttttttgagatggagtctcgccctgtcacccaggctggagtgcagtggcgtgatctcagctcactgcaacttccacctccccggttgaagccattctcctgcctcagcctcccgactagctgggattacaggcgcgtgccaccatgcccggctaatttttgtgtttttagtagagacagggtttcaccatcttggccagggtggtctcgatctcctgacctcgtgatccacccatcttggcctcccaaagtgctgggattacaggcgtcaaacaccgcgccaggcctatatgaatttttaactgtgcttacttgatctggagaaaattacagctgacctctgtttacaaaatatcaacttgtaaaaaaggatattttatttacaaaatatcaagtcgtattttct

SEQ ID NO: 1886807 - DNA, 4001 bp, Homo sapiens; identical to SEQ ID NO: 1243585

SEQ ID NO: 1886808 - DNA, 4001 bp, Homo sapiens
cacctggggggtgcccataatctgtctcaagtttctgatggtgaggtgctcgaggttgggaagcgtttccctgactgtctcgtgagcagaaatgatcacactgtgttcccagccctttgttctccccttagcctcccactcggttttccaggtgaggtcaagggccacatggaaagggaaaaggtattataatggaagggatgcccaagaggagtgtgtatgggaagggttgagcgatcatactggacactttcaggtcttttttattggccatctgtcctccactttcttcttgcttccagggaggtgggtctgtgtctgtggctggatgcagtgagaggagccagaaccaacacccagtctgttcttcagccagaggggtgaggctgagtccactaagctggcacctccacggtttgccctcggcaagcgcctgatgcctaaccaacctcacccatgaagtcaagggtcattcatcaaacccattttcctaagcatctcctacatatcaggcactgtgccaggctgtgggaatgcatgatccacatggtccctgctcacagaatttacaatcttgtgctagaaactattaaactaataatgacacaaataattataaaataaaattgcaggaagtctgcatgtgtcagctcctgaccttccttctacttccaggactgggtttgattaaaagtgaggctactatgatgggccactagaagatctgggaggtgaaatccagtcccaaatctcctctcacccactgactcttgggacagcagagcaagtgaataggaaagaaaaagaaagaagatgctgtaaaaaggtggcttggagctggcaggtgctagtgcaatggatgggggaaaccatataatctgtcatttccatctcttccacgtcactgacattggtcctcttgaccctgtctcagctcagacctgcatcatcttttcacgagatgattgtggcagccttctgccgccagtcttgcctctcacccagcccaagatagcctcgatagaatcgatacaagtctgcagagaacctctcctctttctgcctagagcagtatttctcagccttgggactggtggcaatttggggctagataactctttgttggctggggctctcctgtgcattgtaggatgtttaacaacatccttattagtagtgacaaccaaaaatacgtccaaagattgccatatgccatatgatttgggaaccactggctcagagatattatgcccttgaacttgatattcaaagctctccatgatctgattctaagctgtatttcaggccgagtgcagtggctcatgccttaatcccagcactttgggaggctgaggcaggcagattgcctgaggtcaggagttcaagaccagcctggccaacatggtgaaaccccatctctactaaaaatacaaaaattagcctggtgtggtgccacatgcctgtaatcccagctactagggaggctgaggcaggagaatcgcttgaactcaggaggcagaggtggcagtgagccaaaaagagtaaagaaagaaagagcgaaagaaagaaagaaagaaagaaagaaagaaaaaataagctttgtttcagtatgctcttcctctgtcctgtctctcacattctattatgtagccataatcaagtatatgaaattttcttaaagtgccctacctttttcttcttgcctttggccatcctgttctcttgacttacagggccatgacatcttctctatctattaaaagaaatctacttgtgtcacaagattcaaataaaaggccttgtctgagaagcttttccagatttctggcatttagttatcttacctgtcaaataaggataaaaagtctgccccatggattgcctggaatcaaaatttcagagttgtaggagacctggggaatcaccaatgtcttctttcagggagatagacagaaatgcaaagaagtggattgtcttgcggaagtcatagccggatggaagataagctgcacctagaacttggtgttctaaattccgagatcaatattctaaacccacttgtcagcttttgcaagatgaagacactatctaatcaacaggaaagttaactttgtggccacaaggtcacaaaaactctctgcacctcaatgtttctctgtaaggtgaagggctaaaccagctgttccccaaaaatcattccaggatgctttgtgctactatgcttctaattttcttttgagaagattgtcatttaatcataagctattcttacggggaggtattcataatacttcccagtccatctcattgtgggggctggaaatttctgcccttgctacgatgctgtcaaaattgaaccccagagctcagctcccaagaaggttaacataatggttttgctactcatcgtaacaacacctcacatcatgccttcagatcactccccagcatcattcttcaaattcaaacgcgaaccagaagtgacaaatgattcttgtaatgcgctctttgacacaaatcatttctgattgctcgggaccccagacaaccttgagcatgcagaatcaagctgagagggagaagtcttagaaaatgaacagcttcaacttcttgccgatgagaaccctctctctgctcacgaggcaggagcagtatgtgctgattgccaaacagatcatttttaaaatgatgcagatctgtgggggattggtccgtgtggtgatgtgtctcatcttacaatgtcctatgcagccttcaaagcgtttttagatcctggcaaggaaacagacattcatgtgcgtagggtttgcaaggcctctgcatatgatgttgctcttcatcctcccagcaagcttgggtatgtattgttatccatcaccccataaaggaggaaagggagcctcaaagaattcctagaacattgccaaatgacctaacgtgttgctgttagatcttagactagaattcaggtcctgtggctccaaagccagtgctctataccgaggggcacctctaagctataaatccctttcaaagtgctcttactatttggcctcattctctgtgtatgaatgcttagaattgagagaagaagtgcacattgatgtgaggggggcttatctggaaaatcaggaggttggaatggatcacaaataatactcctggttcaaatgcattggcagaccagtctaagtgccttatgagtatcatttcctttgctttccttagcagcgcagaaatcctgtggggtaagtattaggattgttcccatttttcagagatggaactgagactcacagtagttaagcaacttgctcaaggcagagctggggtggggccagaggcagagatgaatggccatccatcaaggattcctgctcccttgcaaagactgaatctgtgtagggaagtggttgcctggccaaaacctgcatttctcaggttgcctgcattagaagaggccatgttgaccagttcttagcaatggatatggtgggaataaaaatgtcgcttcttttttttttttttttgagatggagtatcactcagtcgcccaggccggagtgcagtggtgcgatctcggctcactgcaagctctgcctcccaggttcatgccattctcctgcctcagcctcccgagtagctgggactacaggcgcctgccaccatgcccggctaaggtttttttttgtatttttagtagagacgggtttcatcgtgttagccaggatggtctcaatctcctgccctcatgatctgcccgtctcggcctcccagagtgctgggattacaggcgtgagccactgtgcctggccccaaaaatgtcacttcttagtggaagtggttatgaagctgatgtgccttctcctctctctatcgcctcctgccaatagacattaatcccttgactgacttcagaagccatgtgtggtgttgaaatcttacaaacttattctgaaatgcttccaaaaagcagaacaaagaaagataaaattgaaatt

SEQ ID NO: 1886809 - DNA, 4001 bp, Homo sapiens; identical to SEQ ID NO: 1243595

SEQ ID NO: 1886810 - DNA, 4001 bp, Homo sapiens
tcctttctctccctaaagtcctaagagccctgttggagtgggcgcctctcacctgctccacagcccccaaccccaactgggccttgccaaggggcttagccatctggtcccagaatgagtgagtgaatgaatgagtgagtgaatgaatgagtgagtgaatgaatgagtggatgagggtgcatcaaactcaactgcaagtctccaggacactttttttgagacaagatcttgttgtcacccgggctggagtgcagtggtgccatcttggctcactgcggcctctaactcccaggctcaagtgatcctcccacctcagcctcccaagtagctgagactacaggtgagcgccaccatgcctggctcatttttctaatttttgtagagaaagtgtcttgctatgttgcccaggctggtctggaacccctgagcacaagccacccgcctgccctggcctcccaaagtgctgggattacaggcatgagccactgggaccagcttccactgaactttaactctcccgactcccacgggggcaggctggggggaccctgccccgccccaaccctgcaaggtggcactttgggcggggatgggggatcctgggagaaacataggggaagggatggcccctcagcgcccaggccaacctgctgccctaagcacctggtacagtccacggcaggtggagactcagccaggttcttccttcatggctgtcgcagcacggtacaggagcaggcctgtgtgcaaagccagccacccccactccaccagcacaggtgccacccaaagggcatggggtgggggggcggctgccagccgcctcgaaacctgcaagtgaggcgagggcccctgagcaccaagacccgccctgggtgtgctcccgggttcccccacctgtctccctgaacctttccacctaggagtaccccctcccccaccccggcgttccctccgtacccactcacgacttaccattcacgacttccgtttcccccccccccgccagcctccgtgcccccctcagccccaggccgccgtgcttcccgctccggaccatccccccactccgtgccatccccgctccgtgcacggccccccgtcccccctcctccatgcctcccctccgtgtcccccctccaagcccccttctgtgtcccccactccgtgctcccctctgtctccccctccgtgtccccctctccgtgctccccccatgccaccccggccgcggagggcccccccctcccccgcgccgctccgcgcgcgctcccgcccgcgttttcggactgcaccagcggagccccgcggcgccagggccgggcggagcgcctcgtctgtcgccgccgcccccaccggtgcgggctctgcggctgcggcggggggcgcggggcgcgggggccggcgcgctccgcacctgcggcggccgctgggtgatgcggcggctcgggccggggccgcgggcgtcctgagcgcagcgccctcccgggatgcccgccggccgctggcccggccatgtcgtcgtccttcttcaaccccagcttcgccttcagctcgcacttcgaccccggtgagtccctggcggcccggcctgcgcgccgctgcctccctccgctgcggacgtgatgcccctgggccccacggctcccggtttgcatggaaattaaccctttccccgccccgagcccagcagcagaagcagccggaccccctggcggccccagatctcggaggggcaggccctgggccccagcacaaaccggcctccgcctgtgggctggcgtcccccgcgtggtcgtgactccgtggctgcctccagggcacaggtaactggggcacggagggcctgcgtgggcccctggtgtccaggagagttggtctcagactaagggcccttgggggtgtggggggtgtcagccagctggggttcaggctttccatggcctctcctgggtccggggccctggcgtgggaggcttcttcccaggctgggagcgattctcagagccctgcccagccaccagcagccggcgggggatgtggggggagcaggggccagtccacattacagagcccagtgggcagaggctcagaagagaggggccttggtgggtgcccagatcccctgacagtgggggcccgaggtgacgctgtcaagctggctgcaggggacctgaggccaggcctcttaccccgtatggccagtgcaccgggcagggcgagattacccatggctgcctggcctcctggctgtggtggacagctgggataggcagagggggctggggacagctggaagccccatctgtcaccaggaagcagtgggctttctaaaacctctgcttctccagatccggcccctgcttggcctgagtgggagataatccccctgccctgtgccatccatggccccagggccaagtcccacccacacgtcactggggctctggcaccaggctgagccagcccaaacaaagcctgtttgcatgtgacgtgatctcctgtgtctccttccctggagcagggcccagtgcacgcagcctggcagggaggcacgggggtccccggggcagatctcggtctgaaggcatttgctccctggaggaagggagctggtgggaggtctgtctgctgggcttagggctgtgggtgtcacttgctcagaaatgacttcctgtagtgacccctggggctcggaagtccctgtggggtgggcaggtgaaggctcagagcccaacagccacggcaacagctgtaatgtctccccggcccaagggcagggggtggaggaggcttggggcaggtcctcatcacatctccatgccaggcgtggcccacggtgcttggtcctttctgcccccagaacagagaggaccctcggcccataccctgcctcggggcccagccttgtccttggccatgagaggccctttcccccgccttcgagcagcaccggctctgcccttctctgggtaaacagctgtgatctgaataattctaatgtgtccgtttaatgacttagaggaaaagaagttgttggaggcaaggggcgtctctcctctgcaagatgctgggccagagctgcaggcacctgctgggctctggggcccacctaccaggaggggctgcccaaggtgctggtgctggtgaggaaggagaccctccttcggattaaggggctgggtctaggctctgcaccagcccccatgagagggttagggaggagagaggggtctcctgccctcccgctaaacttagcccagccttccaagcctggctgtcctgtgctgcagtccctctgcctggccttgcctctgtgaacctcggttttcccatctatgacatgggccgacagtacctgtggcaggcccgggtgggctcagtgcttggtgagcacttggctgtctgtgctggagtggtggtgctgggacagagacccccagggcccaagcttcctacagcatgtggctggctccttgccatccccgaattggagcgagctggttccttctgaggctgcttgtgtctgtgggggggcacccagaggggaggggcccacgcttgtggctctggcagttggcttgtgtgtcactcagcatctggggcagtgctagcacctgacatgggggtctcacctcagttgccaggccctgccccgctgccgggccggctccttgttcatcgcaggaactggtgccagtctccatagaggtgacggcagttgtggtggtacagggggcagagacgcccgatagtgcagggcctgagagtggaggctgtgggcacagactgtgggctgcctgggcccctgaccttccgcaccaggcagatgcgggcagggcagggggcacccggcccaggagcctgcttgagtgccaggaagagccgcctcctctggagcccagctcttcccccatctccctgacactcgggagcgtggctgggggatttcttggcagctgcagccttccagcctctgtgctgtgtggcctcggactact

SEQ ID NO: 1886811 - DNA, 4001 bp, Homo sapiens
cccaaaactaccaggtacatcaataaatagaacaatactagaaccctagaagcccccttccatcccatttccaatttccctcctccttgtaaaaatcattactcctattatattaacataggtaatgtagccagtttctgaacttaataaaaatggaatcatgtagaaggcataattatatatctgtatataatcgacaataggttatttagaatcatccatgctgttgcatttgataacaaccagaatagtttattccttttcattgctgtaatagtctactgatgaatgtgctataatttatttattcattgttgatggacattcaagtggcttcttgttttgaactgctataaataacactgccatgaactttcttgttcttgtatgtcttttgttgcatgtgtgtgtatatcttgagatgtaaacctagcagtggaattactaggtcacaatgtattcaactttatgttcaactttagttgatcttgccaaacagtttttcaaagaggtggaaccacccacagagtatgagaattccaggggatgatatgggggatgcctcacatttgaaagaaactaaaataaaataccatgagtaaatacaaattagaaaataagaagaaaagacaatgacttccagactgggttaaaaaaattagctatatgtttgttaaaataaacacatctaagtcatgggcaatgacttaacaggcatttttaaaatgaggaaattagaaatggctgcccaaatagcagatgaagtcaagttctagacctaaagtcttaaataaggaaagaaatatgttgacaaaatgcaaaatccatgcagaaaatggaagtctccttatttgtttagcaaataatacacaacagcaaaatacatcacacaatcctctccaaagatccaagtggaacttaaatcacctgtttcagaactagaagattagttggaaaaaaaaataagccagcatgtagaaatttaaattaaacatcatacaagttatatttgattaggtatgtagacagagaacctctttgttcgtagagcagggtagaacgaaacaaagaaaaccgaagtggaaatgtggtggccaaggaacgaagtccctgatacggagcttttcctaagtctacttccatcctcaacaagcaattttgatgaggaaaacttagttgataaaatgctaataattggctctaaaaaggtatacatgagtgactgagttaacatcctagcacaggtaaataaaaacccttgagagaagaatgcttcacctggagaggtgggatgctgaggtttgctattttacagggctctggactgaattggactgtggcccaacgtctaatagggtgcccaccccttgacaatgagattcactgcctactaggtagggtgaaaactggtgcagaacactggacatgacctaaaggagaaagcaataaggctacacacagcctaagctgaggacgctgtatgcatctaggcctccaggcttcaaaggtactgatagaaagcaaggccctacatcaaaatattactcagagaaaaagataagccaggagggacgagccaagatggccgaataggaacagctccggtctacagctcccagcctgagcgacgcagaagacgggtgatttctgcatttccatctgaggtagcgggttcatctcactagggagtgccagacagtgggcgcaggtcagtgggtgcgcgcaccatgcacgagccgaagcagggcgaggcattgcctcactcgggaagcgcaaggggtcagggagttccctttcttaatcaaagaaaggggtgacagacggcacctggaaaatcgggaaaatcgggtcactcccacccgaatactgcacttttccgacgggcttaaaaaacggcgcaccacgagattatatcccccacctggctcagagggtcctacgcccacggagtctcgctgattgctagcacagcagtctgagatcaaactgcaaggcggcagcgaggctgggggaggggcgcctgccattgcccaggcttgcttaggtaaacaaagcagctgggaagctcgaactgggtggagcccaccacagctcaaggaggcctacctgcctctgtaggctccacctctgggggcagggcacagacaaacaaaaagacagcagtaacctctgcagacttaaatgtccctgtctgacagctttgaagaaagcagtggttctcccagtacgcagctggagatctgagaacgggcagactgcctcctcaagtgggtccctgacccctgagcagcctaactgggaggcaccctccagcaggggcacactgacacctcacactgcagggtactccaacagacctgcagctcagggtcctgtccgttagaaggaaaactaacaaacagaaaggacatccacaccaaaaaccccatctgtacatcaccatcatcaaagaccaaaagtagataaaaccacaaagatggggaaaaaacagaacagaaaaactggaaactctaaaaatcagagcgcctctcctcctccaaaggagtgcagctcctcaccagcaacggaacaaagctggatggagaatgactttgacaagctgagagaagaaggcttcagacgatcaaattactctgagctacgggaagacatgcaaaccaaaggcaaagaagttgaaaactttgaaaaaaatttagaagaaagtataactagaataacgaatacagagaagtgcttaaaggagctgatagagctgaaaaccaaggctcgagaactacgtgaagaatgcagaagcctcaggagcccacgtgatcaactggaagaaagggtatcagcgatggaagatgaaatgaatgaaatgaagcgagaagggaagtttagagaaaaaagaataaaaagaaatcagcaaaacctccaagaaatatgggactatgtgaaaagaccaaatctacgtctgattggtgtacctgaaagtgatggggagaatggaaccaagttggaaaacactctgcaggatagtatccaggagaatttccccaatctagcaaggcaggccaacgttcagattcaggaaatacagagaacgccacaaagatactcctcgagaagagcaactccaagacacataattgtcagattcaccaaagttgaaatgaaggaaaaaatgttaagggcagccagagagaaaggtcgggttaccctcaaagggaagcccatcagactaacagtggatctctcggcagaaaccctacaagccagaagagagtgggggccaatattcaacattcttaaagaaaagaattttcaacccagaatttcatatccagccaaactaagcttcataagtgaaggagaaataaaatcctttacagacaagcaaatgctgagagattttgtcaccaccaggcctgccctaaaagagctcctgaaggaagtgctaaatatggaaaggaacaactggtaccagcctctgcaaaatcatgccaaaatgtaaagaccatcgagactaggaagaaactgcatcaactaacgagcaaaataaccagctaacatcataatgacaggaccaaattcacacataacactattaactttaaatgtaaatggactaaatgctccaattaaaagacacagactggcaaactggataaagagtcaagacccatcagtgtgctgtattcaggaaacctatctcacatgcagagacccacataggctcaaaataaaaggatggaggaagatctaccaagcaaatggaaaacaaaaaaaggcaggggttgcaatcctagtctctgataaaacagactttaaaccaacaaagatcaaaagagacaaagaaggccattacataatggtaaagggatcaattcaacaagaagagctaactatcctaaatatatatgcacccaatacaggagcacccagattcataaagcaagtcctgagtgacctacaaagagacttagactcccacacaataataatgggagactttaacaccc

SEQ ID NO: 1886812 - DNA, 4001 bp, Homo sapiens
aaataccatcaaggaatggtctaggccaagtatgaccctcctatcctagaggcaaggggcagagaggtttgggaaaagggcaggccctggaaaccaggccccaacacgagggtactgggtaagggaagagaggctagttaccccgtatcctaggtcccctttaatcaacggataccagatctcatccatcctcctccctgcaccaagcttcccccatatcagctgctctggctctggcacggctggggtttggttcaatgtgggttctggtttctccttccacccctcatcacagacaatatcctgtgccaggcagcttggagctcaccctgaggccagagctgtgaccctgcctgctcaccctcccctttccacaggaatccggacatcgtggctggcaagtgggcacacagaaatctggcgggctggggcgggactgcccacagaacttagggtctggcagccagagccgtccagggctggtccctcgacctgccccaccccctcccgcacccctcctcacagtcctggggccaccgcccgaatgtggcatctgccaagtacacctcggcgccactcagccgccaccctgagacccctcaggggcgggtcctgaccactagggttggggatgagggatggagatatttcggggcgatgaaggaggggggatggtgcgactgtgcttgtggcctgtggtttccaggtgtgtttgccattcctgtgggccactctcccccacttcccacttctctgcttagccttcagcggtggaaaaaggggatgagggcgccggcgacagaaacgcaagcggggttggaagagaggggtgggggcgcgcccgagggtggggaaggagctcgggtctacccagggccagcttcggcgcgtcgagtctgaagtgggagaccgacgccggggcggctctcacgctcggcaggcgccgcacaagcgcccctttaaagcgcaggcagctggcccaccgcagggagacgcatccagctgtccggccccgcttcctcccgcctcgcatccagggcacccggccgagcgtgtgtggatggcgcggcgtggaggctcaaacctgagcaaacaaataagttgagggaacgcctccctctctccgatgtaaactcggggctccagacataactattcccccttcccagaaaagccccgggaaaggcggtaggcagaggagcaccataggagagcggggggctacagccggggctcagggctcggggctcgggggccacggtcccaccccctcatgcacggtagccggctgggggaacggccccgcccccttccccgtggagggcgggggcgcatctctgggcgcgagcgagttaagcccagtggcctcgatgctccacgtaggagctggctcggctgccggctgcggtcagggccaccgtataaagagggcggcagacccgagcgcctaggactcgccgctgcccgcgccccgccgccgctgctgcccccagccccggccccaggcgtcccagccatggtccgcccaatgctcttgctcagcctcggcctcctggctggtctgctgccggcgctggccgcctgcccccagaactgccactgccacagcgacctgcagcacgtcatctgcgacaaggtggggctgcagaagatccccaaggtgtcagagaagaccaagctgctcaacctacagcgcaacaacttcccggtgctggctgccaattcgttccgggccatgccgaacctcgtgtcattgcacctgcagcactgccagatccgcgaggtggccgccggtgccttccgcggcctcaagcaacttatctacttgtacctgtcccataacgacatccgcgtgctgcgcgcaggtgccttcgacgacctgaccgagctgacctacctctacctggaccacaacaaggtcactgagctgccccgggggttgctctccccgctggtcaacctcttcatcttgcagctcaacaacaacaagatccgtgagctgcgcgcaggcgccttccagggagccaaggacctgcgctggctctacctgtcggaaaacgcgttgagctccctgcagcccggggccctggacgacgtggagaacctcgccaaattccacgtggacaggaaccagctgtccagctacccctcagctgccctgagcaagctacgggtggtggaggagctgaagctgtcccacaaccccctgaaaagcatcccggacaatgccttccagtcctttggcagatacctggagaccctctggctggacaacaccaacctggagaaggtgagctcctggctgtgggctctgccctggttccttcttcccttcctggaggccccaggagccagggccacagctggcaccatcccccgtccccaggttccctgtccctctggctatctccaaggtgagcagctctgccacctcccttcctcgccttgtcacatccctaccctaatccctgtctgctgccagtctcgaccactgccctcctaggattcttacatataaaaggagtgggactgccctggccccacaaaaggccccctagggccatctccagtgcttccaaacccccaactgtgagcagcagccacctcttcctgttgggccttccacccctcctctgctgtttttcccgtctccagtaaacctaccaccccataaaggaaggtttgtttattgaggagccttccagaggagctgggcagatcaggcccacaaagagaccctgttcctggtgggggctgtgcatgtgtgctaagggggagtgggggactggggagtgaggggaagcaaatgcctgaggaagacattctccatgccccatagaggccctggtggatggccctgcccaatccacacagacacaattcactgcattctcaagtccattgcagctcagtaggcgtgggaccaagggctcccccaggatgcaagcatcgtgcccatgggctccgtgaaggggcaaaggcaagaccactattgtcaatccttggcccaagaccccaggtgtctctccacagagaagactggcgtgactcactgtctccagactgctaactgccctttgccctcctccgtcactagacccatctcctgtctgcatcctcactcattcctttctcccctggggtgcccagtgtctggccaggtggggctaccttggatcagagcagaatcccttctctgggactggaaaaatcaccctggtacaggggcttcagccaggaggtttgggtggggaaccaacaaggtagaggagagtctggttactggagaccttcatacctcaatgtgggccacaggaaagggtgcgggtgtggagatgtgggcagaatctcacttgggcagcagccaacctttgtctgggtggaaggagcctgctcaagcctgcccttcttcagccctgcctctccccagctgaagttggagtcccctgtggcccaccagtgccagagtggtctttcagtgggcagcagagcagcgaattaggggctggtttggggcaggggaggccagacaggaattgtggcgcctgggcaaaggtgtgggcaccaatagaacatttcctctggagccgtccaacctggccaaaggctccaccaaggtggcttcacaaatagcgtctggctggcagtgggggagcagtgaggacagagctgagggaagtcctgggaccctgggactgtggggagcctgggcccactgcccactccaccaagcacagaccaagttcaccgtgtaccagtttggattgctggggccaaactctggcagccccacagtcccagtgtttgtgcagggattgtggtgccaggggaagaggagctgggtgtggtcctgtggctactgtttacccactgctgtgacccagggcaaaggactgcgctttttccgtttccccatttgcatattgaaaataacaccacctggctgggcgtggtggctcacgcctgtaatcccagcactttgggaggctgaggcgggtaga

SEQ ID NO: 1886813 - DNA, 4001 bp, Homo sapiens; identical to SEQ ID NO: 1243628

SEQ ID NO: 1886814 - DNA, 4001 bp, Homo sapiens; identical to SEQ ID NO: 1243633

SEQ ID NO: 1886815 - DNA, 4001 bp, Homo sapiens
aaaaggagattacagcccggaatgagcaacttgactggccctatgaatatctgaagcccagctgcatagagaacagtgtcaccatctgagccctagagtgactctacctgcaagatttcacatcagctttaggactgacatttctatcttgaatttcatgctttcctaaagtctctgctgctaaggctctatttcctcccccagttaaaccccctacattagtatcccactagcccaggggagcagtaaactttctctgcaaagactagatccttttttacgctttgcagaccgcatagtcactgtctcaactactcagctctcctgctgcagcatgaaggcagccacagacaacatggaaatgagtgtgactatgttccaataaaactttatggacactgagatatgaatgttacatcacaaagtagtcttcttttggtttattcaaccatttaaaatgcaaaaaaaatccacaaacaaatgtgctttgtttgagacatgcacagccaggctacagactggatttggcccttgaaccctgcactagcctgaggccctgaccctacttccaaaacatccaagatcatggagcagggggatttcttagaaaaatcagcttacctcagctaactctccattcccaggaactaaccttcatgcctggtggccaatgtacaaattcctgactcagttctttggcaaattccttccacccatatttctcctattcacccatgtaccccaaaagtccctgaataagaatcatgtttttggggcagaatacaaaccactgccccaaaatggcttctttctccaaacagtcccagatgaaaggcacataattcatgtcttaaggctacttttccagcccctttaatactctgggatctatgtgtttcccacattccaagttatctttcacaagccttttaagaacaacatgcacaaaataaatggacaagaactacaaagttattctagccaatgatagtgtttatttgttaggtcctggggtctcaaggtcaaatgatccctctcaattattctgaggtcactgtcctcactagagtgggtacaacttgctcactgcaaaactgtgttcttcaaacatccctacttcttttcttttctttttttttttttttttagaagtagtctctatcgcccaggcgggaatgcagtggcgccatctcagctcactgcaaccttcgcctcccgggttcaagggattatcccgcctcaccatcccgagtggctgggatcacaagctcatgccaccacatccagctaatttttgtaatttttagtagagacagggtttcgccatgttgacctggctggtctcgaactcccgacctcaggtgatccgcccgcctcgacattcctatttctaaataattattacagatctgtcactcaccagttaaacatacaaacggcttttttggaggggatgacctatttatatttttaaatcttatatcctaccttattcaaaagtcctatcagttttcctagtttagagaagcaaagtgacatttttgtgtacatttaacaggactgcttaccttcacaacctgctcagtcggctttccctggacttctcctaaccgcccatttttcctggatttggcaccgagagttacagtatttcacgtgcgatgataaaatgttacttaggagaaacagttccaataccaagaaacttcagcaattttaaagcattttaaagccacaaaaccatgcccgatccccaaaagggggtcctaactcctttacactgtcagaatctcaattttaaaagggaggagtagagaagagatagaaacgctctctgttggtgaaaatctgtcttacttaccatttccccaacacaggagagactaaggaatttcaggtaaaaatcagatggctccaatcctccgatactaagagcccatcgccccagttcccaggagttccgccagttagactttttcccccatggcctcgctaaggctagttcctcgtcacgtgacgtgacaggcttggtcacgtgacataccagctccttccattcccgtgtgcggggggagggggaccaacaaaccggaggccctcgctcttccaatactcacgccctagctacagaggtcaaggaaggtttccccaggagcagttttggtttcagacggcgccgtctcccgcgaaagtcctgagaggagcccagccttttccgcctgccgcccccggatgggatggttgaggccggggccacgccccctctgcccccctgcgagggcatcctgggctttctcccaccgctttccgagcccgcttgcacctcggcgatccccgactcccttctttatggcgtcgctcctgtgctgtgggccgaagctggccgcctgcggcatcgtcctcagcgcctggggagtgatcatgttggtgaggggactccccggcaaggatcggagagggcctgaggggctccgggctgggagggctgggaggcgaggaaactctgggccgcaggcaggccggaggggccggggatctacaggccccggagaaggagacagactgaaattgaaaaatgggaactgttcgagaccagcctgaccaacatggtgaaaccccgtctccaataaaaatacaaaaattagccgggcgtggtggcgcccgcctgtaatcccagctactcaggaggctgaggcaggagaatcgcttgaatccgggaggcggagggtgcagtgagccgagatcgcgccactgcactccagcctgggtgacagagcgagactccgtccccaaagaaaaagaaaaaagggaactggagcggagggccctggagtgggaggagccagggctggtaaaggtggagacccctcaaggtaggagaaacaagagcggggtgcctgagaggtgcttgagttgaatggaggacatgggaggaaaagagagtgcttgttccagaaatgtgtagctgggccttgttttcccagtaatccacccaccgccacttcaagaagaaatgatatgaagaagtgccggttctccctcccctcttccgcactgtcccgtgatgatgacgcctccagagaggacgataatctgggttcctgggagagatggcttggtcactattcccacccttgcctcgaccacttgtctcaatgtcaccacctcacgccctgttccaggtggctgagtccgaatccagtaaccaccacctcgttttggttaatctcaggctcgggtgttgtagcaacattggaaatgggaggggtttacgaagtgaacatgaggtcaggtgcctgaattcaacagtctacccattccccttttccagataatgctcggaatatttttcaatgtccattccgctgtgttgattgaggacgttcccttcacggagaaagattttgagtaagtattcgggtgggggaggcgggctgggagcaggtgggaggtggcgaggcctagggtcagaattacgtctgggaggcccggtgcttagggcccctaggttagaggacttggagaggagagcggctttcttgagaatgtggttaggagccagggagtcagacctcagcggccatcccaaacccaccaccttaggtgtgacctctttaggtattttacttttctgtgcttctcagtccacctctgcaaaatggctatgacagatctcaccccataggatggtcaagaagattgaataaagtaatacacgtaacagcgcctaaacaggtgtcgggcacatagtgctcagaaaatgttggctcctattaaagtttgacccctttgcttcattcccacccccaggaatggcccccagaacatatacaacctttacgagcaagtcagctacaactgtttcatcgctgcaggcctttacctcctcctcggaggcttctctttctgccaagttcggctcaataagcgcaaggaatacatggtgcgctagggccccggcgcgtttccccgctccagcccctcctctatttaaagactcc

SEQ ID NO: 1886816 - DNA, 4001 bp, Homo sapiens
tgataagtatgctaagtagcagtttataaatctgtcccagtcccactgtaatcagaccagatattaaacctactcagtttgccaatttatcctctatttgaggacattaaaatatctcagttaaaggcccctgaagatgaaaaggctaattgaaaacaaggtggatgttttacccaccaaaaagtccaaagataggctttgaagacactgagaaggctacttgggctctccttcgtccctgacctgaagttcagtcttcacaaaatttttcatcatgggaaaatactgactcaatgccttcatcatcatttgtggggaaacttcactccttacttggaatatctgccaacaacagaatcctggaaaagttataaaggtagaacgaggaagagagccacctctagcaggactctttctctattggcaaagatattttattcaacttcctaagtcagtgttattaatatgccctggccattgtttttatgttcacttattgactagaagcttttccacgtaagaagcccacagctgcaactgtttgttctcttagaacaaattttcccctcctgaggaattctacttgccctgtcaagtgaccagggaactcatcgcaccagtaaagtcatccaaaaaaatccaagagttcttcctctgtcccccaaattacatgatcctcaccatatccagtcatgcagaatgattgaacaagcaaacagacaaaactaaaattttcaaaacgttctgaggtgaggccaggtgtggtggctcattcctgtaatcccagaactttgggaggctaaggcaggaggattacttgagaccagcctggacaacttagtgagaccgcatctctagagtaaaaatacatatttatatttttaaaactttcagagaactcaaccttccatggcccaaggtctttcccttggtcctaattgctctctagcctttccttgttagaccacacctgccccctcaaaaaacaattactagcagaactatgagaattccctactctataagggcaacagaagactccagtgaagttaattcagacatgatttcagaattcaaccttgaatgcatgtctcacaacttaaaaagtacaggagttacttacaataaaaatctacttcacctggagatcttaaaccggggctctccaggattatggctgcctctgctgagtcatgcaggttgtcagagaagcaggggaaagccggcagtcacaggcctcccccagatcccacgcacaccgaagggctggtctcactcccaccgtgtcccctgcaacacctctgagtctgtttccagacagaggacgggcttgaaaacttgcccgaggctttccgcctcccacctgtgaaagaaaagggctttagttcttcccccacctgtgaagtctgcaagccagatccgcatcctcccccaagttccggccaggaggcttctcgccccactcaaattgttacaaaattcagctagggaagtccttctcccggtagggttttacctcctgctcctctggcctccctcctgatgaatcccagtggtgccaggcaggaataggctacctggggattcaaagagctcccagggcctccctgctgcctcctctgcccctgtatttcgcttggtccggttctctaacttgactcagctccaggtgaagtcgggagcatctcccggaagcagaccttcagcttctccagtagggggtgtgtgttccggaaaggagggtctccctttcccacttccgcagttggggcactcacagtatttggggtgtcccccgggtcctgcaggagcagtctgcttctttcagagggtctgtgggccctctctcaaaatatttttttaaatattaaaagcagctgctgatagggtttgtccccaccaaataccatgttaaaatttgatctccagcgttcaaggtgaggcccggtgggaagtgtttgggtaatgaggacaaatccctcctcaatggtttggtgccttcccgttggtaattagtgagttcttgttctattacgtcacgtgagagctgggctggttgtttaaaagagcctggcatctctctagctcactttctcaccgtgtgacatgcctgcttccccttcacccttcaacatgagtagaaccttcctgagtcccctatcagacatagatactagtgacatgcttcttgtacagtctgcagaatcatgagccaaacaaacctctcttctttttttctttttttttttgagatggagtctcgctcggtagccaggctgcagtgcagtgatgcgatctgggctcactgcaacctccgcctcccaggtccaagtgattctcctgcctcggcctccggagtagctgggactacaggcacgtgccaccacgcccagctaatttttttatttttagtagagacgagtttcaccatgttggccaggatggtctcagtctcttgacctcatgatccgcccgcctcagcctcccaaagtgggaggcccctcttttctttataaattacccagcctcaggtattcctttatattaatagtaatgcaaaacagactaacacagatggagaaatggattccagctttacttattagaagctataccctaaaatgcgttgagggggaataccagtaagtaccaagacaaagagctctcagagaaccccccaaagatccaagccttggagttacccgtttcctagaatacatgaaagtgagaaataccaggactggctaaaagtctatatatggaacaatgcccaacccacataccccaccttgcacggaagatacacctttgtcaagaccctagagttttattctctggagaaactgaaatgaagagggtctgaacttagagcattaggtacagagatcagttcgattgggggataacgtaaaatggggataacgtcaaagtctgcaaaatgaacagtgaagccccatcctttttcccgctccctgcccctagaacatcaggagccaggtgttgttctgaattcaggcaattggaagaataatctattaaaaaaaaattctgggccgggcatggtggcgtaatcccagcactttgggaggctgaggtgggcggatcacaaggtcaggagatcgagaccatcccggctaacatggtgaaaccccgcctctactaaaaatacaaaaaaattagccgggcgtggtggcgggcgcgcctgtaatcccagccacctgggaggctgaggcaggagaatggcgtgaacccgggaggcggagcttgtggtgagtagagatctcgcagctgcactccagcctgggcgacagatcgagactccaactcgaaaaaaaaaaaaaaaaaaattctgaattgccccagagaaaatatctccaaatatcaatatctggggatgccccaataatcaccaccagactactcagaaaaatttacaagcaccacttgtacacatagagcttcaggtctttctttttatagccagtattttcctgaggatagttcttgctcttggtcctttactagttgttaacttgaaacactgtgaacattttcaatgagcaaaggcaatctttatttcaggaatagtgtttctaagttttctgtggatatatagtgccatttgttctatctttcctggagtatactttgcagatgactctcaaatctgtgtgtctagcatggacctttccctcagccctgcacattcacacacaacatctttttcttgaggtacctccagctagtgaaatgcaaattaaaaaaaaaaaattagtcactgctctccctctgacccctcattattactgtcaccatatcattttcctcatctacactggtgttttgggtaatattattcccctagacattcatcctacaaattttcagtcaattctgattcttctaactcttcttcatccttccctcaccaccaagccactgattcagcgtttattgaattccccacagctgtcttttccttgcccttcccactcaccttt

SEQ ID NO: 1886817 - DNA, 4001 bp, Homo sapiens
gacacatttttggttgtcacaaccggggggatgctgctggcatcaatgggtagaggccaggaatgctactaaacaccctacgatccacaggaaagccccccccccccccccccgccagccaacagagaattatgtggtgcagaatgttaatagtgccaacgttgagaaaccttgggtgtagatggaggagatgagagaaggggctggagatgggaggagaagggaggtgggggtaatggctgggatggtggatgggcagaaagcccagcagcacctggagttctttctccagctgggtcttcaagtcttccatccctggaggcagcaccaggcaggctgggagccttgaagaacacctcaggagcatggggtttgcaccattgagaaactggtacccaaagaaggcatcattcttccaagaatcataaacccgctctaggaacatcaattggggagcaccctgtgagctctgagctccgaactcctaatcccactgatctaatcctccatccccctcctttttcaaatccctgggttggaagtctgtatattggttttgggaggttgtgaaaactgaccagccaggacagtctttccatgtgggaatatttttttgaaatcttccagccttttcacacaatttatgaaatccagtgtccccttaatggccaagtccttcaacctgtggaaagaatggagtgcaagaagatcaaggaagcatcccaccttgtgccctaggaagcaagtgcccagcctctacctggtactcacccttttgctagggagacattaaagtctaaatccttatcctcgaggaatcgctcgtccctaggaaggtccggttgcctattccctgctataggcaggattaacccatctttccaggagccccacctggaggaagaacacacaggtaggggtaaggaggcaggtggcaggtttcttgggatctggtaggggatcaaagacttcctggggctcaacggtacaccttccttctttcctcgagctcctgttcccgatatttcttaaacaggttctgggggtcatcactcacggtccgggctgggggagagggacaagagcacatgccctccctggtcacccctccgcgctcgggtctccccatcagccaccctcccccttcacttctccccatctccctcatctctcattttccctcttttacagtagcctccccccacccgcttcttcctccagcctgccaggggctgtgccccttctccaccgagctcaccagtaccctcaggcaggcagataattccgtggccctgcacccagcggtagcaggggaaaaaggcctcgccttgggtccccgggccctgcactgagatccacttgcagaaccagtcgagactcaacagcacgttgtgtttgcgcagcttcaccatcaggaggcgccccaggtgcagggggacgtcgatctcaaactctgcctcctgcgcgacagtacacagctcaggttttggggtcttcagggaggacggcggggtcggtgaaccttcagagaatcctggctccgtttcccctccacagcacagccggggagaggtggaggtgaggaggagcagctggtactgcggggcgccagcctccccccgggcctgccgtgcccaccccagcgggcgtctctgtccttccgctcgggcaggaaaatgcctctcatctctcctgttcctctcgcttttcctatcaggcgcaccaagtgcacccgacctcagcccctaccccgcttcccaggtttctcatgggtggggcagcagcaccctccgaatggccccggcccccagtgacacctctgagtcccagggccccagctctcaccgcagtccgcgctcacctttccccacaccggtggcagctgcttccctaggtctgcctccccgtgctcgcccaccagccatagctgcaccaggttgggagagcccgccaggagcaaatccccggtggctacgcggaccgtgtacttgcccatcttgcccggagatccggggagaaatcagctttaaaaggatctgagacccagctcccagggaaccacgcccagcccagagtggctgttgtatttgggtttcaggctccccacctcccacccacagattcctccccgactaggaggaacgctgggactggcgccaggctagggtctctgtatccagagtttctcccggcggctctggaaagggcagcctcacccttattcacttggcaaacactccctgatgccagtttcacaccctgccatgagccaaacacagcagcctacggacgatgacagctaaacactagctcccacccaattttggtgaatacataaataagattgccacggaagtgaaatggcttgatcataggggtatttttcaatggaaagttgacactccccagacactcctgctcacccacggctcgcctctctcctggacctcctgggctatcgtgaacagaagggcttgaacagcccttccacctcctcatgttgaaagagaaataaagggccattgtgttttcattgaatgggggtccataataagagctcttctaggtctttcttgcataagctacatccagatgagttgacatttatttgaaataaatgtctagaacctaaaggttcttgtggggaaaaaaactaaatgcagcctctatttagatctttacagttttctcaaaaccttttatagttgtatggctgactcctagtcatcaaattgacagtgacttttaaaagattattgtttatgtagtcataaaatattcaacttatttttaaaaaatactggtatgtttatactcctatttcattagtttgtctataaatttcatcattacaataacaaatataactgatataaacagtttttttttcttttgagacagtcttgctctgttacccaggctggagtgcagtggcatgatctcggctcactgccacctccgcctcctgggttcaagcgattctcatgcctcagcctcctgagtagctgggattacaggcgcccgctaccacgcctggctaatttcttttttgtatttttagtagagatggggtttcaccacgttggccaggctggtctcaaactcctgacctcaagtcatctacccacatcaccctcccaaagtgctgggattacaggcgtgagccactgtgcctgccataaacagttttggaagtttacacaactattcttgataaacataaagctcaactggtggacatcaaagtgccgggcaggtcagtttttttttttggaggagatggacagtgtcagtctcctgataagttggtgatgggtaggtaatttaaaagcttctattataaaatctagtctctctgacactgccctgtccactgcagtcacatctcccaatactgaagaatcctgagaatacgagcggtcatgacacttactcacgtcattcaccagtaaaaccctctatccttcctcctcaaaatcaggaatgctctcctatcctccccattgacccccacccctcacaagcttcacctccactctgtgccctaccattatcctctagagcctcaacttctctttgaagaagatccttctaacattttggcaacatattccctccacttaacctctaattcccattttcagtttcagtcaccgaccagtgcaataacagcttagacttcatttgtcacttaaaactcacctatagtatattacccattttgtggtttatccactcagcccatgagccactctccccttcctgaaggttctgactggagagagaagaaagagagagaacaattgagtttctgagggttttccaggtcctgtgaaatccagctcaattctcttccttgggttctgtgagacacccaagcggctttccaataaatcccactttgttgcttaagttagcttgaagtaggcttctagaacaattaactctaccatatataagacaaaaaaaaattcctgtcagaagggaattgcagtgagtct

SEQ ID NO: 1886818 - DNA, 4001 bp, Homo sapiens
tttgagccagggtattactctgttgcccaggctggagtgccatggcgggaccaccatggctcactgcagccttgacttccttgggcccaggtgatcctcccacctcagcctcccaaatagctgggactacaggtgcatgccactacaccaaaagttacaggtgctaatttttgtatttttgtagaggcagggtttcaccacgttgcctaggctggtctccaactattgggctcaggtgatcctcctgcctcgacctcccaaagtgctggaattacaggtgcaagccactgtgcccagccttataatttttatacctagttgaacgagcctcagttgcacagaagaggaaacagataatcagagaggctgggtattttgcctgaggtcacacagcttacaaatagcagaaccaggattcacatccaagcctatctgcccttaatcccatgaatttcctctctgttgttccatatcgcctcctgatgaacagccacagcactctgatcctgactctcttactctgcacactccccgaatccctagcaccaggggccagtcacatttcttcatttgaccctgtttctatcaaccattccatcttgcacgccctccctccacagctactctcgtgtgggaaggaggccgagcagctgagcttctccagggtccctcaggacctctcctgcagaatccgtccttgctggctggcagcaagccaggcccacagtgggtcccgcagcagcatcattggcactaggccaccccacttcactgctgagcttcctcagggctctgatgtccatacctccagctccttctccagctgggcctgcagttcctccatgcctggagggaacactaggcgagcaggaaggtgagcagagcgcctcagcaccacggggttggcgccattaagaaactggtacccaaataaggcatcttccttccaggagtcccgcacgcgctctggggaaggcagttgttgagcaagttgtgggatctgagctcttggtccttccaaccccaccaaccatgcccccttgactccagcccaccagagggacccaagtctctggtctccccaccctgcttctttcaattcccctgggttgggtgggatctgggggtaagcgtcctgggagacatattggggtgggggactgaccagccagcttgctctggccacagcagaaaatctggttgaagtcattcagatcattctagcaagtcggaacattattttatttttgagatggagtctcactctgtcaccaggctggagtgcagtggtgcaatcttggctcattgcaacctccacctcctgggttcaagcaattcttgtgccttagccacccaagtaactgggactacaggcgcgtgccaccacgcccagctaatttttgtatttttagtagagacagggtttcaccatattggccaggatggtctcgatctcttgacctcgtgatctgcccgcctcagtctcccaaagtgctgggattataggcgtgagccaccatgcccagcgtcagaacatttagtttttgatagtgaggtcggccagccttcaggacagaatggggcaaagggtttgagcatcattctgagactccaacatgacagccacaggcaccgaccttgagccggtccagtgcagtgcagtgcagcccataagccccttggcttccactagaccaggacacctccctctcacccagcctccccttgctctcaccctttggccagcgaaaccttaaagtcaacactcttgtcttccagaaattgctcatccacagggaggtcacatagttttgccccagccacattcagaattaacccatccttcaagtttccccacctgtagggcaggaaggaaatcaggcgtgggtgctggaagcatcagcagctcacgtggggtcaggggaggagggctcaccggtacaacttccttctctcttccagctcctcttcctggtgtttctggaacaggcctcgagggtcgtcgcccacagtacggcctagaaggccagaggagggcttggccagtgacttttggtgagcgcctcttctcgcccctgccaggagagcctcatcactccgtccttctgtgtgacccctgcctcttcagcatcacgcccctcccccaggctccagccactttgtgccagctgcagccacagccccttcgacactcccaaagagccctgcgctccaggttccagcacccccatcctgcgccctcttctccacacgcgcatccccccagcttctctcgcaccccagaggcctcctgacacccccagccccgcgcttactggtgccttcaggcaggctcaggacgccgtcgacctccacccagcggtaacaagggaacctgacctcgtccccggctccggggccctacacggagatccagctgcagaacctgaaggaagtgacgtttgcgcagtttcacaaacatcagcggccccaggtactccggtacttccaccttgagttctgtctcctgcgggcgacagaagaggctcagccccggtggggcctggcgggaggggcacccggctgagccctgctccctccagcgcccacgcccttcctcggagcctctgagaggaggagacgtatcggggtggggggactgagccagagagagagggaccgcgccgagcaggtggccccaggactcggttctgaggggacggggacggcaggtgggaaggtgcgctcctgccttcactttctcctccctgtggtcactgactgtgccaagcgctgggctgagcgctgccgcgccctggacgagcgcgctgtggagcccggacgcgctggtggcaattcccgctgtgcgacccctccaccccaccccgcccgaggctgaggacctgcaggggccccaccggcctggggacaaccttcccggagacctggaggcggagagggctcagccagggagagtgacagaaagggaaggcaggggaaaggcgcgcagaaagagagcggcggggaagggagggcgagcagcatcttggatctggagctcagagcccaggtgtggggggtcagcaggtccggaggctctcgaaggtggcgccaggggctttggatttggtcccgagaacaagcgggagccgttcgaatgtgttaagcagggggagtgaattagggagaaatcattccggcttcagaagggcttggaaggtctgcagcagaggtggcgaggccgctggaggtttgaaatggcttttaaaatagagaaaccgggaggaccgacgaccgctccggcgaccgcagtttccaggcaccagagctgtgtggaatgaggggcgctcaggagcatccccttaattccaaggagatcgagtagcggaaacatttattgagcgtttactgtgtgtcaccaactgcccaccatagggaggaaaaaagggaggagggagcgcgcctttccaccttccgtgccccgtcccctcaccatggagtcgcggggccacctgctccgtgcgcattttctctctttctggctccctttgccccgctttctcggaagctcggagcaagggcgtggagtgcggggagcagggctccgcaggttcaagaggacgcgggcgatcgggggcgggacggatattgggcagggacgcgggagatgctcagggtctagaactgactgcgccggattcttgtttagagggaggtgaagagaggaaggaggcgcgggtgacaccgggggaggcaggaggagagggctgggaggtggggagaggggaggacctcatccgggcatgttgctttgacgttccctgagacagacatccggatttggcgatctgggagagagctagagcagtgatgggaatttgggctttcgcggaagaaaaaaagtaacaggaccgggtagaacacccggtagatatgacatgagatatgacgggaggtgggtcgggaaatcgagagcgttctcctgtcttgactccccatcccttccctctcaccacccactc

SEQ ID NO: 1886819 - DNA, 4001 bp, Homo sapiens
atatacagctctgatttctccctagagtgaaatgactgactgctaatgctttagagtggtcacacttagagtggtttcctcatgtccaatcaatttcttggggacctaagaaattacaaagacaatcatgaaatccattcctccatctcatatggaacctgctcccattacaaaaactagtggtggccaggcgtggtggctcatgcctgtaatttcagcactttgggataggaggactgcttgaggccaggagtttgagaacagcttgggcaacatggtgagaccctgtctctacaaaaaacttaaaaattccctgggcatagtggtgcacacctgtggtcctagctaccagggaggctgaggttgcagtgagccatgatcgtgccactgcactccagcctgggcaagagtccaaaacaaacaaaaaaatctcatggtgaccataggagcaggacctcacacccaatttccttcttttggggaataatattggcctggcatggtggctcatgcttataatcccagcactttgggaagccaaggcagaaggattacttgagcctaggagtttgagatcagcctgggcatcatggcaaaaccccatatctacaaaaaaattagccgggcatggtggtgtgcacttgtagtcccagctacttgggaggctaaggtgggaggatcatctgagcccaggaggtcgaggctgcagtgggctgtgatcgtgccactgcactccagcctgggcaacagagactttgtctcaaaaaatcatattatgaattaactcattagtgccacatgaaaaatactcctcgtttctagtgtgactcaaagatcttcaacatcaaataaaaacaaaactaatgtaagccctatcatttctgcaatttaactgcaggctgagaagctacggcttagtcacatcacattagggaagacatcagatgactaatcaaaagccagactcacaatgacaggtttcttccattcacatcgtgttcctatgtagagttttcatccttcctcttgaaaagggtcagatgttccaccacgagactttttgaattacacaaggaaaaacctgaacatctctgtctggatcatctctgtcatattttctaattatctagattttgccagtttaatgatagacaactgatgggaaaacttaagctaatgtctgttctgattgaacctctgaattctggggttgaagaggctggctgaaattccagatcaaatgtctctgtactcaaagctctgataagagcataagctcatcctcactcctacacaactgggctgaaatctgacttctacaggacaaaatataaaaccagatgtaccttccagtggtctacctaccttgattaggaaggaaggctcccatggaagcttttatctcacaaggacagacatgtctgggcctggccagaaggaagttgtggagtgtgccttcatctttatattaacgaaggcagtgagaaaagtcaggaggcctccccttgcctcccaagcctaatctagggaagctgcgggagaagatgggcagggggcgcacaatatggtcactgtggtgggctggaggcctgggacgctgtggtcccaaaaccagaacatctcgggccaaccgggagaagttggccaccctagctggttgcctacagcaactcgcactgtgggctctggtccgtgcaggcacaacccaggctccggctgggggtggagtagggcttccccggggactctcgcttcgcctcttcttcccccaggagcctctggaaaggcctccctggctccccagaggcactccgcccccgcagtccccgcggcttccgccacgtccgtccctcctacatcctcatccctctccaccgaccgcgactggcgcccgcctctacgacccggctgccccgcccagctctgacagcacctgcgaaccgccctgacccaacaggcctcgacaccactcacccgcgacatccctcacgcgcgtgcgcaccgcgtctcttcgcactacgccacgcccactggcgccacgccccttcgcgccgcgcgacgcgccgctccatcgcacacgctctctgggccccgccccactcacgacccgcccgcgccacgcccctgagcgcgccagagctggagttcggcggccgcggctcgccttttcctgagtagagggtcacgaggggactacaagccccagccgtccgcccccgcagtcgccagttccccgtctgccctcgccggggctccgcggcctggttctccagagccacagacgcgcccgcgtcaccagggtcgcccgtgtgggaacgtgctcggcaggccgcgggtttgagaggcgtcccggcgtgacgaatgcaaccagcgtagcccccaaatgagtcggcggccgccgcaggttgtcgtacagccgcggcgctccctggggcagtcacccaaaggactttcccttctttatttgttgggggcggcggggactggaacccagacgcgcaagtgtggggcgtgtcctcgtggcgtccctggcgctccgaggccgagacccggatgccaggagaggcagtgaggtcggaaaggcaccgcggggccagcattagggctgagctagttctgtggcctcgggtgggacgttcaatctctctgggcctcgccattctctttctttttattgctttttgtttgtttgtttaagacggagtctctctgtcgcccaggctagagtgcagtggcccaatctcggctcactgcaacgtttgcctcctgggttcaagcgattctcctgcctcaccctacccagtagctgggactacaggtgcccactatcacgtccggctaatttttgtatttttaatagagacggggtttcaccattttggccaggctggtctcgaactcctgacctcaggtgatccgcccgcctttccctcccaaagtgctggaattacaggcgtgagccaccgcgtccggcctcagttcttttgaagtcattttaccatcctctggattttcctcatcctaattctccttcccagtctccaggaaagacaggcacattttcttgatgacttcagcacttgtaaccccttgttggctctccttagaggacattaactctgtgtgtttgaacctttcaacttcgaggatctcctcagcccatccttatttgttcacccttctggatcatgaaatctccaaatttgtcttttgaacccagtgcccatatccaccctcacctgaacccattcttgaataaaatgcattcctaccatgactgttctcaaagtttgaagttgagcataccgatgcgccactcctgcttcaatgcttgagaagtcgtaggctttcttctatgtgccttttgactgggcgcctatctcccgacagcctgaggtggtgtagcataggggcgaaggtggtctgtgcttgaatcccaaaaccctcactagcgtgggacctgtgccagttacttgacctctttttcatttcttcactagtttgtaaaacggacacaattacagcacatcttttattgttattatttgacacgaagtctcactctgtcacccatgctggagtgcagtggcgtgatcttggctcactgcaacctctgcctcctgggttcaagcgattctcgtgcctcagtctcccgagtagctgggattacaggcacgcaccaccacgcccggctaatttttgtatttttagtagagacggggtttcaccatgctggccaggctggtctcaaactcctgacctcaggtgatccatctatctcggcctccgaaagtgcagggattacaggcatgagccaccgcgccccgcctacagcacatcttagcagaattttagggatcaaatgagttcctttggatactgtgcctgtttttgactgaacggctgtcttctgacatcctgagtggcttctttagcttagttgtcacctcttctatagcctcatcctgcctcatgacaaaacttctcttctgcctgttcat

SEQ ID NO: 1886820 - DNA, 4001 bp, Homo sapiens; identical to SEQ ID NO: 1243659

SEQ ID NO: 1886821 - DNA, 4001 bp, Homo sapiens; identical to SEQ ID NO: 1243663

SEQ ID NO: 1886822 - DNA, 4001 bp, Homo sapiens
gattctcctgcctcagcctcccgagtagctaggattacagcatacccatgcccagctaatttttgtatttttagtacagacaggatttcgccatgttggccaggctggttttgaactcctgacctcaagtgatccacccccctcagtctcccaaagtgttgggcttacaggcataagctactgctcccagcccaacgaaaacttttaaagctaggcatggagacttcagctcacccctccagcacttttgcctctgccaggatgccttacctgctacatccaggtccaccttgaagtgggcgctgtgggtgtggaccgtgcccagggtgtgctctgaaactttgtttccatacctctgggcagcaccaaaggggaatgctgagctgatgtagccggtggtgtggagtctgatttctatggccccattagggtggaagaccatatcccacacatagtcatagttgagcatagtagacacagatctgatgaccagcaccgtttccgcaaggcccccaaagtagtgggagtagagatctgagtggtgtcgccgcagggggaggccctggttctgttcaaatatacaaaaggcatcgcgtattgtcttggcggcctgggactcaaaaaggaagtgccagtccacgtaggtggccaggtaggggcagtccaccccatgggtcaggggcgtggagaagtggcccaagccaaagccactatctatgtaccggcttcgtagagcagaaggagaattgcctccatagatggccaaggccgcctggacactgacttcataggccaccctctccccttggaagggaacgtcaaagatccttgggccactgaatgctccgaggccaaaggagaaagtccacagtgaggaggccactcgacttccctggacactgaagcgggggccttggggatggaactgcagagggggagctggacccgggggcacaggggacttcagggaccaggacccacctgtgccattgtctgggatcagcaccacattcaccaggccggcctcaaactgggcctccagctgggccaggctgtcatagtagcggccttgatagaacaccttctggatagtccagcgggcagggtcaagggccttgtggttcactagcagctccaagcccacgtggtgcaggaagaacccagcgcccgagatgttgtagtagaggccaaactaggtggcccggtcccctgattgcagaccacggggagccgtggtcattgtcaccaggttccgtccccggcgcttgtagaagcaacagtgatggagaagcccagaagcctggggcagctctctgtcgaagatcatctggtctatgtccaggtactcttggaacaacatggggcgtcggtgatagggcagggggcctccatgacgctccacagtcacgtcccgcatgtaggaggggtgaggcagtggccccaccaccagctcactcacgttgggctggggttgcctgccaaagaagacgatggccagtgcctcccgggcaggtggggggctccccctgtccaagtgagccagggctgcagccttgggaggcagctgcaactccactgagaagacacagttgtccgagggctgggcctgggctgcatccaccagccctggccccagctgctgggtcagaaagcgcatcacagccgtcagctcctctcggctcaggtctgcaaacagctggctctggccagggtgtgtccaaggctgggcactgggagatacggaggggcaatggggaagctggttcagcttacattccctctcacctcctttctcactcccagccccaccttcacccatgcctgtcaccagaacactaaacagggacaaaataatgaagacagccatagctaaagctcctgggtcgtcttcaggctcttggttctgaatgcagaatacaaaatagacaatgataaacagatagagaggacctgggtgcaggatgtttctcacagcctctggagggtcctggtgtggtgctgctggtcaagaggaatgatggatattgtgaaaaaccccaagggcagaggggtcaggggtggagctagaggtgactaggaatcaggtcgtgttaaggaggtggggcagagttaaactttgattttaaatgacccacgtaagcctctgtcctcctgttccaaatcaaacaacgtactcagggtcagggtcaatgaaccaagtaggcagagaggtgtgttttggagataagagctagcaaggtgcaagaggaagtggggggcgccgactgtcctgcggctctcctttcttttccctccaggtggaacttttctcctggctgcaaggctgcaagggaaaatcacctggccacacctccacagccagattccctccttccctcctctagtttttgatgtcctccaggctctgcctcccacctctctctcctgcctccatccatccactagaatcctagcagcagcctgagggaagcctgagggtaatgatgagaaagcaaagcatctagcagggagctggggggctgagaggctgagccaggtcagctttgtggaggccccaagtgccctaagtcactgtaggggagtgtgcagggtgcagaacaagctagaagctgcctggttcattggggtgggggtgagtgtgggggcaggaaccagagtataaccgagaccttcatgcctccccttgtactggactgagggataggccagggcagaggtcaggtggggctgggaaactggctgtggacttatctcgggcctgaaaatccttttccaaaatggtgccgacatggagagtgaagccacctctgtccttcacagccaatggctgagcggcttcttttccaggtgacaaacatgtggaaagccactgtcatttgggcagccaggtcctgaggggaactggaagagactgagggttccagaagggggatgtgcttccctcgtgtacctggggaagaatcctctccaacctggacacatctaggaagacttctcaggaagagatgttcgagccgaccttgaagatgatgcattcacctggcagagaagaggaaggatattccagcaaaggcacagaaacctgaaacagctcagcacaagcagggaacagccaaggatcagcctatttggtgggagttggggaggaggggagtaagcagaggaggtaagatcatgaagacgcgtggcgcatgttttcagcaaggtagtcattgcagaaagacagtgagacagacacctggaaacctagaccaggtcattgaccctgaccctgagtgcgttgttttatttggaacaggaggacggaggcttatgtgggtcatttaaagtcaaagtttaactctgccccacctcctgaacacgacctgattcctagtcccctctagctccacccccgacccctctgcccttgggtttttcacaatatccatcattcctcttgactggcagcaccacacagagaccaggaccctccagataaatcaacaccagaagggtcaggctatccagaaatgtttatgccattggttgtattttgataaggaaacttgcctggttttcctgcctcttgttcttttatttgactttattttttttgagacagtcttgctctgttgcccaggctggagtgcaatggtgcaatctcagctcactacaagctccgtctcccaggttcaagcaattttcctgcctcagcctgcagagtagttgggattacaggcgtatgccaccacacccggctactttttgtatctttattttattttattttagatggagtcttgctctgtcgtccaggctggagtgcagtggctcaatctcagctcactgcaacctccacctctcgggttcaagcaattctcctgcctcagcctcccaagtagctgggattacagacgcgagtcaccacacctgactaattttgtatttttaatagagatggagtttcaccatgtggccaggctggtctcaaactcctgaccccaagtgatccacccgcc

SEQ ID NO: 1886823 - DNA, 4001 bp, Homo sapiens
tcacttgagcccagcagttctatatatatatatatatatatatatatatatatatatatatatatgtgtgtgtgtgtgtgtgtgtgtgtgtatacacacatgcatacatacatacactcacacacatatatatacacacatacacatatatatacacatatatatacacacacacacacacatatatatatagagagaagagagtctcactctgttgcccaggctggagtgcagtggcatgatctcggctcactgtaacctccgcctcctgagttcaagtgattctcttgcctcagcctccatagtagctgggattataggcatgtgccatcatgcctggctaattctttgtatttttttagtagagatgggttttgccatgttggccaagctggtcttgaattcctggcctcaattgatccacgtgcctcagcctcccaaagtgctggtattacaggtgtgagccactgcccctggccaaaatattaattttttaaaaatagcttaaaagtggcttttacacttgctgctttattattcctttgatagtctcacatagggttaggtagggaggccctaaggagaacaaaaagccctagtttagatttactgaaggattttttgactaagtcacatttgtctgatcctttattaaagtagctgttatttcactgctcttccaaaaggaaacacaaaaatgatactgatgaagatgtgctattttttttccataaattcactgtaatctgtccctttccaattttgaacttttgctgctaatgaactttttttttttttcatgtgtaagatgcaagaagacctcttttctaaatggtccatatttattagtactctagtcagagaaatccaaagtctaccatattggaggttttctggaattccaggctgtctgttagactgtagtctttaaagccttgccttatcatactgggccaggtttgtgtgggagataggcctacagctagaccagcaaaggtgctgagagaggaaccctgtcctcctacctggtactttgtgagtgagagatactgatacagacagtggaaagaagagctggatatctcattctcatcaggaagattatacagttctatgatttgggatatgtcataggcatcagagtacaaagcaggaactgaggccaccagcctctcccactgagtatcttgcatttggaagtcacttgtgggactctcagtgaaggtagagttccatgcccaattggaagggtctaagagctgaggtggaagggagctgtagaaatctgaaaccacgggagaaaaagcataagcactgggggatgttctgggggaggtgggcacattcttcttggatggaaggtatctggtttggttgctttgctgattgctgctgctgctgctgctgctgcttcaatttgaatcgccggttcctaaaccaaacctgggagtgggggaagaggggagattgtggtctgttcttggagaaggcattccaggcttctcctgagtgaaaacagccaggttatcatctcacatcctctccaatttaccatgacactgggttctttactgttgactctggtaggttgagtttcaaagctagtttctcctgaagatttctgtctgggaacatggtctggctaaacagagcttctagttctttatactgttggcgggtgaatgaagtacattcttgatgccttctccatattgctgtagtcccagatacttgggaggctaaggtgggaggatcacttgaacctgggaggttgaggctgcagtgagccaagactgcaccactgcactccagtttggatgacagagtgaaactgggactagctggatcctgtggtggtatcaccttcatgttggaatcattcctgttgatgaaagagtctagctagggattctctggggccattctgttcatcatggtttctgaaatctgtcatgaatccccttagaccattttcagtcctgcgcggtgtgtctctctctcaatgaactttttaaaaaaaggaaatcatggcccggagcagtggctcacgcctgtaattccagcactttgggaggccgaggtgggcagatcacgaggtcaggagttcaagaccagcctggccaacatagtgaaaccccatacctactaaaaatacaaaaaattagccgggcatggtggtgggcgcctgtaatcccagctacattggaggctgaggcaggagaattgcttgaacccgggaggcggaggttgcaatgagctgagattgcaccattgcactccagcctgggcgacagagcgagactccgtctcaaaaaaaaaaaaaaaaaaaaggaaatcactcttggattttaatgtggaagagattcacgttctttgatttttagaagatcttttattgtacaattacttcacaaactagatggtattttttataatgtagtgagtgctaaattacctcaaattcttttccagataaggcaggatatgaataaattttttaaaatcacactttaaaagatagtgactgatacaaataacttaaacagaattgcccccactctttgttaccactgtgttgtgtgtctgtatgttcaagcgtgagtaaagctacttgattattgttgtctttacgacaccttctctcctgccagagtgttttctttcctatctctgaggcctgccctgctggaatagacctggtgtactttggcgggagcctgctgctacacaggcagccagaactgaccttcagactaatgagcagagctgtgaagaaatctgaagttcctcataatgttggttgtctgttctgaaaatatcattgcagacatagggagtccatgggaaaagcagaaggagactgtgactgggaaaaagtttgttctaatgagttttaagaagagagatgaaggtcttttctctcttggaccttcagacacccacttgggtctctagcaagtaaatttttcatttgtttcctcttataaagccttttaaaataaacttccacttctgctctgaaaaaaaaaagagagagagagatgaggaagaatggatgagttttaagggccatggtgagggagggaacttcaaggggaacaaaacatctcttgaaagcctgaattttgctaagagatcctatgtgattgggattaaggaacaagtgctttcttggaaaccagtagcctttcagtgttggggattggcttaattttgatcacattatttatctttttttttttttctttttgagacagggcctcactcggttgtccaggctggaatgtagtggcgtgatcatggctcactgtagcttcgacttcctgggctcaggtgattctcccatctcaaccttccgaatacctgcatataggcatgcatcgccatgcctggctaatttttaaattttttgtagagatagagtttcaccatgttgtccaggctggtctagaactcctgggctcaagtgatgtgcctgcctcagcctcccaaagtgctgagattacaggcgtgagccgcctcacttggcctgtttaacattttttgaattgtggactaaaaggtaggtttttttttctttctgaaactgatgagggccttagagtggtggaacaagagcaaaattttaaaaagataattctgaaaaggggattatgagaagaatcagggtcttaagcatattaaggtaggcacatttcttatggacctagagtgggactgagttattgaatgtcagcttcatttttgccatccttagtatagtagatgaaggatgagaatatggagatatttgaaatatccaggtagctgggctctgtggctcatgcctataatgccagcactttgggaggccaatgcaggaggatagcttgaggctagaagtttgagaccagtctggggaacataatgagaacctatctgtacaaacaatttttaaaattagctgggtaaggtggcatgcacctgtagtctcagctacttgggaagctgaggcgagagga

SEQ ID NO: 1886824 - DNA, 4001 bp, Homo sapiens; identical to SEQ ID NO: 1243674

SEQ ID NO: 1886825 - DNA, 4001 bp, Homo sapiens; identical to SEQ ID NO: 1243685

SEQ ID NO: 1886826 - DNA, 4001 bp, Homo sapiens
aatcttgaccctagggtcaagcaatcatcccacctcagcctcctgagtagctggctcatggctcactgcagccttaacctcctagggtcaatcatcccacttcagcctcctgagtagctgggaccacaggcacacgccaccatgcccagctaattaatttttttttagagatgggggtctcaccatattgcccaggctggtcttgaactcctggctcaagggatcctcctgcctcagcctcccaaagtgctgggattacaagtatgagccactgtgcccggctttgtgaatgtacttaatgccactgaattgcaaacttaaaaatagttaaaatggttttaagttttatgttacgtatatgtatatatttatctttagagatagaggtctccctgtgttgcccaggctggcctttaactcctgggctcaagtgacactgctgagtcagccttcagagtagctgggactacaggtgcatgccactgtgcctagctatgtttattttaccacaatgaaaggacttacaaaaaagaagctagacaccgaagaggatacacagttggattccatttatagcaagtacaaaaacaggaaaaactaatgtatggtgacagacgtcagaatagtgattactctttggaggttaatggctagaagaagacatgaagggggagattctggggtaattctttcttttttttttttttcctgagacagagtctcgctctgtcaccccagctggcgtgcagtggctccatctcagctcactgcaacctccgcctcccaggttcaagccattctcctgcctcagccttctgagtagccaggattacaggcgtgcgccaccacgcccggctaatttttgtatttttagtagagacgggatttcaccatgttacccaggctggtcttgaactcctgaccttgtgatccgcctgccttagcctcctaacgtgttgggattacaggcgtgagccaccgcgccagtcctaattatctatttcttgatctaagtgctacttctgccagtgttcagttggtagaagccaccgagctttttgcttatgtttgcccctgtctggattatttatcctttaatcagtagttctccaaaaccccaaactccagcgcttttttttttttttttggagacaaggcctccctgtcgggtgcaatgcagtggctcagatcatagctcactgcagcctcgaactcctgagctcaagcgatcctcccacctctgcctcccaaagcggtgggattacaagagtaagccactccccccggccacagtaagtttttagaaaaaattttaattgcggccgagcgcggtagctcacgcctgtaatgccagcactttgggaggccgagacgggggcggatcacctgaggtcgggagttcgagaccagcctgaccaacatggagaaaccctgtctctactaaaatacaaaattagcggggcgtggtggcgcatgcctgtaatcccagctactcggcaggctgaggcaaaagaatcgcttgaacccgggggggcggaggttgcagtgagccgagatcgcgccattgcactccagcctgggcaacaagagcggaactcccgtctcaaaaaagaaaaaattttaactgcaaaaatctggataagttcttgaaagctggacttttccccctttttgtgtcctaagcctgcgccgaatctgtgccttctttgaaatgctttcccgccttctttctccgggtcccacactacctggggccgcactcttcaagcactggatgctgactaactggtctccttatctgtcttcccgactggcccagagctgagttcttactaatccccgctaacctggagttaggtgcgcgttgcaaagcagtaacgaatccaatcagccggggaggcagacagcagggccggaagaacaaagctggaaagggaaacgtcgcaccggctctgcccagcggcgccagcccgggcaaccttccgcagtcgcgaagccacgcccctttcccaagtacctccgcgctaactcctcccccctggccccgcctctcaccctggattgcctaaggccccgcccaccaggcgtggccccgctctgggagggccgcaatcccgccaacaatgactccacccctccttccgctgagaaacctgtcccttttatttaaagaataccttttacgtcagcccgtcttacgcagcttcgcgtcatcagtgcaaggcgcggaggcgggacttcctgtccctggtataacagcttccgggagaagccggaagagaccggaccctgaacagaatcgcagattgccagcccttttcccgacccctacggaaagacgagtccaggggccgtcctggcgaggtcaaaacatttagtctggtcttttcaggtgaggacttccccatccaggcacagtgccggtccaatccccctttaatttcccatgactcctcgcgtcctgaagccccgcccccagttccccagccccgccccgaagtttgaggggtgtggacggtttgtgacccccttagccgaccctactcctcactggccgggacaactggtcttatcacggaggctggggccaggcagcccttcggttcgggtgggcccatggaccccagtccaacgccgagggaataggaccatccaaaagcggaaccttcgcctcagaaaaagggtgcgggacccctcctcaccgtgcggtcacggtacggacagggtagatcacaggctgagggacagagcaaagacccctgaggccggacacctggggtcctgccgggcccctccccacgagagttccctgtgtctgtgccaatcgttttcgtctttctttgccgcagtttcttttcctgtaaatcatggttaataacattaaccttcttaccatcaggggttagttgtggttgtgataaataattactaccgttattaagcaattgcaatttgcagtgtgccaggcactgtgccaagtattttgcttcgatgatttcacgtcatcttcaaaacaacctcatgaggtaggtactgtttttaaccccattttactgatgagaaagctgaggctctgagaaagttgtctgaggtgttatagctagtaagacgcaagactggggttataattagttgtttttctaactccagggccggtatattaaataaggatgttgatgtgttccacagataattctttgagcaactactggggcattatattggacacttcagtaccaagagaaatacatacgatccttgtctaccaggagtctaatagaaagatggacaggtacataagtataatgaagttttataggtgctgtgagaatagtctgataatggtaatcaccagactggatttgcccagggacagctgtgaaagcagcagattctccaagggaaatagtaggtactccaaggagcaagcagggacccttcctgcctttctaagaaactgcagcagcagaaccttcacagtgaaagaagagagactgagatatggattgtgagagctgttatggaatctttttcaaatcactccacttggggagtggtcattgcaggagtgggcccatggtgacccaggaaggtggtgcttctggtgtctgtcccaagttgctccccagggcttgccagaagtttcagaggcggcacataatgtctgctgcatagtatctgcccgcggtccctacagagttatcgttttagatttgtctgactctgcttttgatggtaggtcagttttctttggctcttgacatctggcagcctggatctgtgaccaggaatgaaataggctcaaatgagacaatctggcagggatggctaaacagtgcttccaggggggccccacagtaaaatattccaggcttttgggtctctctgaagccactttggaggctgcttaggaggcatatttgcttgaccaagcgatagaaatcctagagaaactcaggcctcagcaaagatttttcctcattcaccaaaaaagcaacaac

SEQ ID NO: 1886827 - DNA, 4001 bp, Homo sapiens; identical to SEQ ID NO: 1243696

SEQ ID NO: 1886828 - DNA, 4001 bp, Homo sapiens
agatgccaggcgggcaccgagtttcttgcccttgttctgcattcctaggtatgaggacctcaccacgtcctgctctgcgcctgtcatcggccgcggtgtgtctcctcaggtgccgagctggtcacttccatgtacagcatggataaccgtcttctcagggaaggcctccagcccgcattcagccacctgcccagccgccgggcggagggagcaggctcaggcaccgagactgctgagccactggccacccgggaagcaggctgcgttctgagtcggtcaccgaatatgtccccccttggacgggagtagcgcaacgatgtgcaggccagctcaggaagtaacgctgggagcttctagaaggtggagcgggatccaggaccgtgggagcttttccggagaagcctacctctcctgtgttgcagctgatgggagcagcagggcctggagaagaactgtccccaggctgactcccctcttggagtgaggaggcctcccgtgtttgcctgccagcctccatctgtcatcttggttccagccattcaactttcctccaggcgagcagagctgctctacccccacctgctccgtgttggccccagacccaactcaggccagtggacgtctgtcctagggctgcgtgtgagatcggtgggtgcagggaacacagcaggaagctggcctagaagaagggggtcagggtcagtggagatgctcctaccttcaggtaaatgccctcatttgttagggccagtttgagcgagctttctgtcatttaccaccaaaagaatcctagaaaataaatacacagggatctacccccaaacactggagacaataaagaaaaaggaagcagccagggccagtagctggaaggaaattcagccggaggagaggaggcgcggggctgtggtgggagggaggcaatgcttcctgaatcttacttccctggtctttccatcggcctgagcccgtgccagtctggggatctgccggccagccagcacaactgcgtctcccccaggggcctgactcgttgaaggaatgaatgaatgaatgattttgcagggatgggaggctgggagactgagaggtttcattaaacggaaacgctcagatctggtgtttcacaacgtaaaacaaataattcctctatgttagcctaatttatgtaaatatttctccacgggaattgtaccgggagacctgtgtgccaactcggccagcttccccggcagaatctccccttgggaggacccttaagcaggacccttcctaaaaattggaggcagctctgactcctccattcctcctacaaggttcccccaccccctagggctttccaccgcatgagagtcctccgggcccctcgtttcctactgccctcgacccttccttcccgagacctctctctctcagtaaactgcctccaacgagaatcttctgacggcaggagggtcctccccgtccctaagggtcgccctgtccccaggccttccagcaggacactcccctgtcccctctccagatcctccttcccagggccctcctccaagatcctcttccccaaccctcctctcccagggtcctcccctctccagaatcccggccccaagcccccaagcgctgtctgcctgtctggggtcctccccagagttcaccttctgcaggatcctccctccaagtcctctcctcacgatgctcccccgaaatcctccttctccaagtcgtcccccactccagggccgagctctctccagggtcctcctgcagcaccccctcccccagggttctcctctctgccccgaggggccggccggggggtcgccgcccgcccggcgggcttacctgcgaagcggcggggtcggggcctctcccacctgtaagcccggcccgcggcgtcctgcgtccgagccgctccccgccccgcagcgccaggccgcgacccggcgggccgcccgccccgaagtgccacttcgcgaagtgccgcctccacgcgcgctgccgccggcgccccccgctctcctccccgcaccttctgctccttcttcctgcgccaccccgcccccgcctccccgcccccagcccggctgttgcccgggccccctcaggctgctcccagggccccagcccgcgccgcgcctcccctctcctcccccaggatcgacgccgccgcagaccaatcgctgcctggagtcggccactaggccccacctccgatcccgcccccctcccccttctccggaacccaccaatggaaagggcggtgcgggggcggggcctggcggttgcctagcagcggcagcgccgggcgggggcgggtggtcgggggcggtgatgcgggcgcaacgggggcgggacgcaggggcggggactgccgcggggcggggcctgaggcggctataaaggtggccgccgccggacgccgggctctgtggttcgggtccgctttcgtctccgtcctgctgccgttaccgccgctgctgccgccgcttgcgtcccccgctccggtctgtggtgcagccgggacccaggaccatgtctctgtctcgctcagaggagatgcaccggctcacggaaaatgtctataaggtgagcgccccccggcgccgagctgagcccgctccgtgtgcgcctgggtcgcgcgccgcccgcgcgcccgagcccgaccagggcggccccggggccgcgcgccgggccaggaggctgggactttgggggtcttcccggcgcggccacccgggacccgggctgctggggtggtgagcccggcgccggccgctcacaggtggccacccccgcccgggcccccccatcccatgcgcgccgcggcccggtcagtccccagccccaggcccggggagcactccccgctccgacggccctgctcggcccccgcgcgctcgccttggcgtcggcgggaacggagccgcgcgccgggccccggaagccctcggaccggtcggggtcgtagcacacccgggcagggccggggcggcgggggcggcgggcccaggggttgcggcggccaggacggcatgggggctgtctgaaggccgcggtcggcgcggtggcaccgtggggctcctccaggcgcggttgcgcgagcctcgggcacttcattctcaacaggctttcccttcccacaactcctgcccggcgcccatgctggggcctaaggtgggaggtcggagcgcgggcaggctggatgggtggacggataatctatcatcttatgtaaccgcggagagagaagactaattgtgtaggaggctgacgtgcctgcctttgcttcagatgtgttaagagtggcatccacgttctcgtctgcgaaatgacaggttcacatccaagggccgcagagcaccgctggaagcctcccctgccgccccctccccagtcgtttttgtggctgggataccgacaaacaggcccttggttttctctttcttcagcatccgttctcggtccagacccccacgcctgagcccggcagctgccggggagcattttctcagaggagaaacccctgctctgggtgtccctgggtcctgggcgatctcttacagatgtgctttgtttcaaaactgtctgcaggttcagtgacaggctgggcgatgagtggagtgggtatttacccggcagtcgctggttcatgtttcctaaccggcttgcaccctgcccggcagagtaactgtttctgattgtggtaggcggccaaggcgtgcctggccaggggcctgggaagccctcttagctctcaggcttgggagagccagatggaggcttcaggggtggcccctctggttccagctggagtgcagggggccgattgcacttgaatacagctttcaataaagcttgtgaagttggggccgcgtcagtctggaaggtttctgaaggcgggtgtgcggtcgactagatgagtcctaaagccacgtcggagccactgggaaacaggattcagggtgacctgaggagtcggcttgggaaaggcacaggcc

SEQ ID NO: 1886829 - DNA, 4001 bp, Homo sapiens
cctctcaacgacaccgatcatccatgtttttttttttttttttttttttttgagatggagtttagctctgtcgctggagttcagtggtgccatattggctcacagcaacatctgcctcctggttcaagtgattctcctgcctcagcctcctgagtagctgggattacaggcacatgccactacgcccagctaatttttgtatttttagtggagagggggtttcaccatgttggccaggatggtctcgatctcctgacctcgtgatcctaccaccttggcctcccaaagtgctgggattacaggcataagccaccgccctcggcctcatccatgattttattttgccatttcaagtgatggagcttgttttagagctggaagaaaagccaaaatgccagttaatctaaactagattcctgccccagtgcagaaccaatcaagacagagtccctgtctttcccggaccacaggatttgtgttgaaaaggagaggagtgggagaggcagagtggatggagaacaaggaatcattttctatatttttaaagttcttcagttaagaaaatcagcaattacaatagcctaatcttactagacatgtcttttcttccctagtatgtaaggtcaattctgttcatttgcataggagataatcataggaatcccaaattaatacactcttgtgctgacttaccagatgggacactctaagattttctgcatagcattaatgacattttgtacttcttcaacgcgaagagcagataaatccatttctttctgttccaatgaactttaacacattagaaaaacatatatatatatctttttaaaaggtttataaaatgacaacttcattttatcattttaaaataaagtaaatttaagatttggaaggttttagaataatacaaaccaaagaactaatgacaacgtcctttatttttaaagattctagaagttgctttttgtaattagacaacataaattctgaattttttcacatattgctgccaaccccttgggtcttttcctttctccaagaaagagaaagctacagaggagtgactgaccgggtaggtggtggtagccttagctttctccaatgtttctggttgttttctttttcttgcataaaaccaaaatcaacaacgaccaaaccaacaccaatcaaggcctccccgcccctaacctttcccagtgacctgctctcatctctggatcctcctcaagcacatccctgccggcagcatctgttactactgacgctcctctacttccctcttgcgctttctcaatggcgcaaatggatccagttcttaagttctccctcccacaaaatcctgtctcctccccttcccagacatattcctggcacctcttcttccacaaggtcccatcctctcatacataccagccggtgttttttgttttgttttgttttgttttgttttgagacagtctcgctctgtcgcccaggctggagtgcaatggcgcgatctcggctcactgcaacctccgcctcccgggttctagcgattctcctgcctcagcctcctgagtagctggagcggcaccacgcccggctaatttttgtatttttagtagagacggagtttcaccacgttggtcaggctggtctggaactcctgacctcatgaccagccgacgtttttaaagacatagtgtccccctcaaggcatattccagttcctatcacgaggattcccccacggacactcagtgcccccttcctgatcctcagcgcttccctcgcgacctacaaactgcccccctccccagggttcacaacgccttacgcctctcaggttccgcccctaccccccgtcaaagaatacccatctgtcagcttcggaaatccactctcccacgccagtaccccagagcatcacttgggccccctgtccctttcccgggactctactacctttacccagagcagagggtgaaggcctcctgagcgcaggggcccagttatctgagaaaccccacagcctgtcccccgtccaggaagtctcagcgagctcacgccgcgcagtcgcagttttaatttatctgtaattcccgcgcttttccgttgccacggaaaccaaggggctaccgctaagcagcagcctctcagaatacgaaatcaaggtacaatcagaggatgggagggacagaaagagccaagcgtctctcggggctctggattggccacccagtctgcccccggatgacgtaaaaggaaagagacggaagaggaagaattctacctgagtttgccataaagtgcctgccctctagcctctactcttccagttgcggcttattgcatcacagtaattgctgtacgaaggtcagaatcgctacctattgtccaaagcagtcgtaagaagaggtcccaatcccccactctttccgccctaatggaggtctccagtttcggtaaatataagtaataaggattgttgggggggtggagggaaataattatttccagcatgcgttgcggaatgaaaggtcttcgccacagtgttccttagaaactgtagtcttatggagaggaacatccaataccagagcgggcacaattctcacggaaatccagtggatagattggagacctgtgcgcgcttgtacttgtcaacagttatggactggagtgttatgttttcgtattttgaaagcagaaactaggccttaaaaagatacgtacaactctttagggagactacaattcccatccagccccaggagtctggggcaagtagtcttgtaaggtcagtggcctgcggggacgcagtgagcgccgaatttgcctggggcaggggaaatgcgctctggcccatgtctgcgcactcgtagttccacccctcagccccagtgtttgttatttttcgggttcagcttgcttttgccccgtctccgtcgacgcaatcgccaccagtcaatggggtggtcgttttgagggacaagtggtaagagccaatcttcttggcgaaaacgcggagaaacgggactagttactgtctttgtccgccatgttagattcaccccacagagatagcggcagagctggcagcggacggtctttgcattgccgcctccccagggggcgggaagctggtaaggaagcagcctgggttagctaggggtggggtcacgtcacactaagagggtttggagaagttcaagggaggaatcctgcaaagaagaggggcgactttttccgtgtctccggacagctaatcgttttagtgacaggatgagagagcccttcgtgttctgagggaccgagtgggcgaaaagcgccggagagttggagagtctgtggttcagaatgcgaggtgacaacgtgctagcagccctcgctcgctctcggcgcctcctcggccttggcgtccattctggccgtgctggaggagcccttcagcccgccactgcgctgtgggggcccctctctgggctggccgaagccagagccggctccctctgcttgcggggaagtgtggagggagaggcgggtgtgggaactggggctgcgcgcagcgctcgccagccagcgcgagttccaggtgggcgcgggctcagcgggccccgcacccccggccccgggcagtcaggggcctagcacccgggccagcagctgcagagggtgcgccgggtcccccagcactgccggcccgcctgcaccccgcttgaattctcaccgggccccagccgccctgcacagggcaaggctcaggacctgcagcccgccatgcccgagccccctcccaacccctgtgagctccagcgtggcctgagcctccccgacgggcaccgccccctgctcctcagcgcccggtcccatcgactgcccaagggctgagaggagtgcaggcgcccggcacagccctgcgcaggatccactaggtgaagccagctgggctcctgagtcagatggggacttggaaaacttttatgtctagcctgaggattttatatgcaccagtcagc

SEQ ID NO: 1886830 - DNA, 4001 bp, Homo sapiens
tgtggctatctgtcctctcttcatcgagcagaaatctgaggggctccatttctttcgtcatttgtctgtccttctgaccctctttgcctgtctgtctagatctggccctgctgctgccccgtccctctctgtgcctcctcctgacagtgtgtctgtctgtgtctcttcttccatgagtctgtctgtccttaggggctgggggatacagggggagtgtggaggtgcacagagaatcagtgcagaggaagtagattgaggggagggggcttggtgctgggctgaggcagggttggggtgggtgtgagcaggctcctgtagaagagggaaggaacaggactttgggggagggcaggggagtctggagggatgggagtgggagctcgagctcgcatgtccctggaggagaagatgggtaggaatgggaaggatcagggaggagcaggagggtgccaggtttgggggtgtctatgtggacagggaggactggacagttccttctcctaggcctcctctgctcctctctgaaggcctgggacataggggaaaccgtttcatctccatgtctccttggaccatggatggtggatgcttccacagggaaggctctggctgggtgacgtgggtttctgaggtgctgtcctcggtcctttcccatgccaggccaagctgaatatgagctttggggacaggcccaatctggagctgctgagggccctgggggagctgcggcagcgctgtgccatccttaaggaggaaaaccagatgctggtgaggcttggagactggggtgctgcgttctggctggagccaggccctctgcctcagtgccctcctcaccccatgaacatctttccaagtgggggctcaatggaggtgacaaaatcctgagacccagagagggtgaacccctgcctagagttgccaaggaccccactgtgagcctagggctctagcccaagacttgggctgttaggactgggtctgtggggtgctccctacatgccccaattctgcctgaccccttgtcagaggaagagcagcttccctgagacagaagagaaggtgcggaggctgaagaggaagaacgccgagctggcggtcattgccaagcgcctggaggagagggcccgaaagctgcaggaaacgaacctgagggtggtgaggaaaggaggctgctgggcggaggctgggtgaccaaggaagaggggagccagggctgggcctgagggctgtctgaagcttgggagtcacggtctcagctcagcacctaggaaagcaagaatctaggggctaaggtgcaggaagggcagaggctggccaggcaaggaggccaaaggtttctggagctgcagggggcagagaagagctggatggggaggttcctgagcaggcagggagcaggattctggattaccacgtgctggtgctggcggcagccttctgctgagctcatctcagggtatagagctggagtgggggcagggatgagacccatcacagtggcagccccaaattagcagcatcctttgatcctaaactcagatgtagagttaatcctttccaactgctgggatggggtagagtgaggctgctggttttctgagaccccagtcaaggtggaagcaggtggctacccccctaggttttcatgctaactcctcctttgggaggagatgaggagtgggagaagtgccccagccctcaggtgaccattggccttacccctcctctggctaggtgagtgcccccttgccccggccggggaccagcttggagttgtgtcggaaggccctagcccgccagcgagcccgggacctcagtgagacagccagtgcactgctggccaaggacaagcagattgctgccttgcagcgggagtgcagggagctgcaggccaggctcactctggtgggcaaggtgcgaggaggccctggtcacctcttccagctcagccctgcacagggccatctgcctgttgtgggatgcagacaagatgttaatgagacgcaaatgaaagggagggtggaggttgctgggagtaggttcccctggcaacggcccaggtgggagaggggagaagggggtggagccatgagtcccagacctgggcatttctgtgctccaggcttgaggctgtttgccggtgggtctggctgtatgcatccacacatcccctgtgtgaagggatgttcacaaggtatttagcacagtgctgggcacattgagagcacccaagaaataagttactgagaatgaccgcataggggctcgcgggagcatgtggccacatacgcatgcacatgtaaccaggcatgtacccatgggagggtgtgcacagtctcgcgcatcggagcccctccagcaaggcgaagggctctgcaggggatggcatggggcgggcaaggattaggcctgagtcccctccctgtccctgtcccccaacctcaggagggtccccagtggctccacgtgcgggacttcgatcggctgctgcgcgagtcccagcgggaggtgctgcggctgcagaggcagatcgcgctgcgcaaccagcgggagacgctcccgctcccgccgtcctggcccccgggccctgctctccaggccagagcaggggcgcctgctcccggggccccgggagaggtgagcgccggcgcaagggcaggtgtgtgggtgcgtgcagatgggtggggggaacgaccaccgggatctcccctgcaccgtgctcagaaccccaaggactcagtggtggtgtgcgcactcccaggggctggggagctttcccgtcctgggcagggtccacctccaagcctcccgtgctcgtacctgcgccgtgccctcccctgggggctccagggttccgccctccataggcctgcgcccagcggggcctggccggccgcccctgccgcgctgccagtggtacggcccggccgcaaatccctggttgtcctggcagccgcccggggcccagcccgcgccgcctcctcccgccgccgccgtagagcggggacgcccccgtcagcgcccgcctggctggccaggcctggccccagctacccgggggcggcggtgcgtccgccccggctccaggtacaggcaaccctcactgagcggggggcttaggcagcccctgtctcgagggccagggacccgcttaggacccccagaacttaagggtctggcttctcgccatcatcctaggtaggcagcaagtaggtcctcctccttctgggaagagggctgggaggagagaccaggcagtgatctgatagtgaccaagacctccgggtggggggaggcttcttgctcagattttgtctccctggctggccctggaagggagatgcaccctcccatcaagacctgtcctcccccaaagtttgcacggataatcggaaggtgtggtagggtgggcttgggggaagccaggagaagggtctggctggacttgcgctgctctaggccaagcccagatttggatgatacagaacccctatcttggggaacaccacatccccgggggcccaggcagcctcctagttctctgccagtcgctgaaggacacccaggacagttattgagtgcagagcagggctgctgctggaagctaaaaagggaaagctttggcctggataaaggacccatctcccagggcacacgtgggtcccaggatctcaaagcacttatggctccaggacacaggggtgcagcctttgtacttacacatcagctggagacaatgggaggtgggtgggcagacagtacccctctttgctcttgctaggcagggatctcttgctggctgaatgatggggtgggaacctgctctgggcaggctgggctggggcaggctgccctggggccctgttctcaggtgccagccccttgcccctgggcatttccaggccacgccccaggaggatgcggacaacctacccgtgattctaggggagccagagaaagagcagagggtgcagcagctggtaagtcctaggtcaagg

SEQ ID NO: 1886831 - DNA, 4001 bp, Homo sapiens
gggaatgggtggtgggaccagggacccaatgctaataaagactggactgtgcttctcttttgtctgagactctgttgctggggtggggagctgaatgcgggcggcaggcacatggacagtatgggcgcacagaagggctgggagggagaacctctgtcgctcctccagaagatacgggtttggccctgcctatgagatcagaagagggctctgggcctggccaggccacagccggaggagagaagggcctgggccatctgcagaaaggggcagggatgtaaggcatcctctcaccttctaccctagctctggccctatcctgcccccctacatacccaaactgaaagctgcctacatccagttttaatctaagaaagtctagggggtcctaggtcatataaaaattgggcaaaatccactgtggcacatacacagcatcttagacaagggcacagacactcatatacaaagcacacactgagatgcaaatgcatttacacacagaggccccattcagtgtgccagtaacacacacacagacacatgtgacatgactggcatgacacacacagggattacacacacccagggcacatacatattcagtagtacacacatgcaatgatagaaacatagggcgtgtcttacacatagaagagcacacacatacagtgacatttgcataataaacacggtggctccatacacatacatagatagagacatgttcatatatcatgataaatatagaatacatagatacatggtgatatatatatataaatcaaaccatgtcattatgcatatttacatgacgatatgagcatgtcatatattgtgtaatcaattactacattgtgccatatagtagcatccatatctatatatatcatgatgtgttgtaatttataaactcatgcaatgatagcctcccatgcacataacagcacacacatagacacagtggcaaacaaacatagatgcaatgacacagaaacatacatacagatacacccaatgtgtttttgttacgttttattatgtgactcatagacacataatagcacacacatatatacacacaatggccccttcacatatacagaaatagataatgtctattctatagatgcatactatacacacgcatgcgcataatggcatgcatatatactctgacctaaacagcaacacatcatgcagtggcgtgcgtgttgacctacacactgctttagggaagtgaagatgtccactcctccccatgcaccccctacctccagttccattggctcttgcctgggtggagcccacagtcaggggctctagggttcagtatcaccgctgctattctgtgggggtgccacacgagggcccccgaccttggctgaaactggcttgcctaatgagtcccgggttcagagtggagaggggctgcctctcggggcttctcccaacacccctggctctggggactctgtctagacccctgccactgcatatagactgactcctggctgaggggattctcacgtccttgtcccccaaattatttagcaacaagatctaaggctagacagaagatgaacttccaggcaattcgggacaaagccaacccaacaggccatgtgggcttccctggtggcctgggacagccaggttgccccccaagtgcaatctgccaggaggaagcagaaggaattctccgtctatttctacctgtctctttgcttgtcttcccggtttctttctcttggtttctgtctctctctttgtttcatctcaagtcccatcttttctagttctgcccttctctgtggctggatctctgtcataccctcccccgttctgtctctatcagtctcacccgatgtagggaggaccatctgcaccccactcgcctctgtactccggaaggtgtgagaatgtgtgaagatgagggtgggaggccacatgtgggagccctgggctgacatgccgtgagaaacctgctcttccttctgtccccgaccctgtcagccggttcagcccaccagtccagcgccatcaccatggaaaccagcagccgacttcctattggtgggtgggaggggaggaggaggaggaggaggggagggctggctcttcccggctcacccccccacccaattctgaggctcagccctcctcggagcccaccatctcgaggctcctggactgtaagggacccctgcagtccccagagcagaggccagcaggggctgagactatgaggcaagcagcccatcgacccaggcctccttaggaccagcccagccacccagcaagcgaaagagcagcagcagagagcagagccggagataaaggaccacagcggaccactggggatcacccccagcagctcctgaagcctctggccgggctgaggggttgcgacagacggccagacccacagacactgacagacacacaacgacaccgatgcacacagctgcacgacactgacacactcagatacaaccagggacagcatcacatactgccacagccctgcaatacagacacccacacacacacacacaaacaactggcaactctgaaatgggcagacagtgacacacagcaccacccccctcaacacacagaagtgggggcacccatcttcccaacacatgagacagcattgacctgcacggacagacctggagacacacacacgcaccctcacccaggcgcagctgtcggtggcctctgcacatcctccctacccccacagggacaccctcgctcctccacatactcgcgcacacacacagctaccagcaaacatagctcacatacccctggctccagctccagcagccctggcgccttctgcagcctcctttgtgggtggggaagagctcagccaaccttggatggagcgtcggtgaagcaagagctcagaggggagaggggctggcctggcatgaccctcgccagtccccccacctggctgggtgatgtcccccggcccgggttctggggccccttggcagtaccatggagcaactgacaaccctcccacggcctggggaccctggagccatggagccatgggcactgcccacctggcatagctggactccaggtcgagggggtgaacctagcagtgcagccccaagcatcgctgatactcctccggcagctctgcagcttcaagaactgaggtctgaggagagttccaagcccaaaggagacgggagctccaggcccgtggggggaactgaccctgaaggagcagaggcttgtctgcccagcctgggccagcaagcatccagctctggacccgcctgccagaggccagaggatgaggaagtggaggctttcctgaaggtaagggatctgtggagggctggggtctgcaaggtgggggtctctcaccatgtcctccagcctggccaggaggtgaggcgaggtatgcatccccaatgcccacctgtcctctcttggcctgtctgtgggtccatctctgtggctatctgtcctctcttcatcgagcagaaatctgaggggctccatttctttcgtcatttgtctgtccttctgaccctctttgcctgtctgtctagatctggccctgctgctgccccgtccctctctgtgcctcctcctgacagtgtgtctgtctgtgtctcttcttccatgagtctgtctgtccttaggggctgggggatacagggggagtgtggaggtgcacagagaatcagtgcagaggaagtagattgaggggagggggcttggtgctgggctgaggcagggttggggtgggtgtgagcaggctcctgtagaagagggaaggaacaggactttgggggagggcaggggagtctggagggatgggagtgggagctcgagctcgcatgtccctggaggagaagatgggtaggaatgggaaggatcagggaggagcaggagggtgccaggtttgggggtgtctatgtggacagggaggactggacagttccttctcctaggcctcctct

SEQ ID NO: 1886832 - DNA, 4001 bp, Homo sapiens
gcctccagaggccctagtctctacctgagtgtctctgaaactggggggatggggtggagcctttagggggaagggaagagggaactgaagaggaagtgggggagggaggtagaggaggcaagtctggcgccatgctgagtcaccgcccacaaggcccagggcgggccctcggggggccctggcagggttggggggatcttaggaagccacaaggagggctggggggctcttggagcaggagtcaggaggcctgggcagcctgaagagtacacgccgacggacagacagacagtgcagtcacccataaagtagaaagcactactaacagcactggagggtgtagtgtttcctactttatggatgagtgtactgtgggcttcggagatcacgccactgctgccgcccgctgcccgccaccatcttcctcggcgctcggggacctcgtgtgacaggtgagcaccttacggcccctccctaccctgcccagatgcctgaaaggcctccatggctttcctgcccttcctggttccggacagctggggaaaggccacagcagctcctctgctgccctgcagtctttgggggcggggagggctggacatgtggaaccctgatgcagccgcagcgtcaaggacgaggaaggggtgggaagggatggtacgtggaggggaatgggtggtgggaccagggacccaatgctaataaagactggactgtgcttctcttttgtctgagactctgttgctggggtggggagctgaatgcgggcggcaggcacatggacagtatgggcgcacagaagggctgggagggagaacctctgtcgctcctccagaagatacgggtttggccctgcctatgagatcagaagagggctctgggcctggccaggccacagccggaggagagaagggcctgggccatctgcagaaaggggcagggatgtaaggcatcctctcaccttctaccctagctctggccctatcctgcccccctacatacccaaactgaaagctgcctacatccagttttaatctaagaaagtctagggggtcctaggtcatataaaaattgggcaaaatccactgtggcacatacacagcatcttagacaagggcacagacactcatatacaaagcacacactgagatgcaaatgcatttacacacagaggccccattcagtgtgccagtaacacacacacagacacatgtgacatgactggcatgacacacacagggattacacacacccagggcacatacatattcagtagtacacacatgcaatgatagaaacatagggcgtgtcttacacatagaagagcacacacatacagtgacatttgcataataaacacggtggctccatacacatacatagatagagacatgttcatatatcatgataaatatagaatacatagatacatggtgatatatatatataaatcaaaccatgtcattatgcatatttacatgacgatatgagcatgtcatatattgtgtaatcaattactacattgtgccatatagtagcatccatatctatatatatcatgatgtgttgtaatttataaactcatgcaatgatagcctcccatgcacataacagcacacacatagacacagtggcaaacaaacatagatgcaatgacacagaaacatacatacagatacacccaatgtgtttttgttacgttttattatgtgactcatagacacataatagcacacacatatatacacacaatggccccttcacatatacagaaatagataatgtctattctatagatgcatactatacacacgcatgcgcataatggcatgcatatatactctgacctaaacagcaacacatcatgcagtggcgtgcgtgttgacctacacactgctttagggaagtgaagatgtccactcctccccatgcaccccctacctccagttccattggctcttgcctgggtggagcccacagtcaggggctctagggttcagtatcaccgctgctattctgtgggggtgccacacgagggcccccgaccttggctgaaactggcttgcctaatgagtcccgggttcagagtggagaggggctgcctctcggggcttctcccaacacccctggctctggggactctgtctagacccctgccactgcatatagactgactcctggctgaggggattctcacgtccttgtcccccaaattatttagcaacaagatctaaggctagacagaagatgaacttccaggcaattcgggacaaagccaacccaacaggccatgtgggcttccctggtggcctgggacagccaggttgccccccaagtgcaatctgccaggaggaagcagaaggaattctccgtctatttctacctgtctctttgcttgtcttcccggtttctttctcttggtttctgtctctctctttgtttcatctcaagtcccatcttttctagttctgcccttctctgtggctggatctctgtcataccctcccccgttctgtctctatcagtctcacccgatgtagggaggaccatctgcaccccactcgcctctgtactccggaaggtgtgagaatgtgtgaagatgagggtgggaggccacatgtgggagccctgggctgacatgccgtgagaaacctgctcttccttctgtccccgaccctgtcagccggttcagcccaccagtccagcgccatcaccatggaaaccagcagccgacttcctattggtgggtgggaggggaggaggaggaggaggaggggagggctggctcttcccggctcacccccccacccaattctgaggctcagccctcctcggagcccaccatctcgaggctcctggactgtaagggacccctgcagtccccagagcagaggccagcaggggctgagactatgaggcaagcagcccatcgacccaggcctccttaggaccagcccagccacccagcaagcgaaagagcagcagcagagagcagagccggagataaaggaccacagcggaccactggggatcacccccagcagctcctgaagcctctggccgggctgaggggttgcgacagacggccagacccacagacactgacagacacacaacgacaccgatgcacacagctgcacgacactgacacactcagatacaaccagggacagcatcacatactgccacagccctgcaatacagacacccacacacacacacacaaacaactggcaactctgaaatgggcagacagtgacacacagcaccacccccctcaacacacagaagtgggggcacccatcttcccaacacatgagacagcattgacctgcacggacagacctggagacacacacacgcaccctcacccaggcgcagctgtcggtggcctctgcacatcctccctacccccacagggacaccctcgctcctccacatactcgcgcacacacacagctaccagcaaacatagctcacatacccctggctccagctccagcagccctggcgccttctgcagcctcctttgtgggtggggaagagctcagccaaccttggatggagcgtcggtgaagcaagagctcagaggggagaggggctggcctggcatgaccctcgccagtccccccacctggctgggtgatgtcccccggcccgggttctggggccccttggcagtaccatggagcaactgacaaccctcccacggcctggggaccctggagccatggagccatgggcactgcccacctggcatagctggactccaggtcgagggggtgaacctagcagtgcagccccaagcatcgctgatactcctccggcagctctgcagcttcaagaactgaggtctgaggagagttccaagcccaaaggagacgggagctccaggcccgtggggggaactgaccctgaaggagcagaggcttgtctgcccagcctgggccagcaagcatccagctctggacccgcctgccagaggccagaggatgaggaag

SEQ ID NO: 1886833 - DNA, 4001 bp, Homo sapiens
agtcggcccaccctgtgcaggcagctgcagcactttctctggtcagctgagtagactcacttcctctgccctgcaccccagagaggccgggagatggagggcggggtctcaggaggaggggtggggcatggtctggattcatggaaggtgaggagatgcaggagaaatgaaggggggtatgtccctggggaatcagctggaggcaggcaggcatcagtctcttctgcttttgcttagggactaagattcaggaatccctctggccttggcacctccccctaccttgttctagacaccaggggccaaaattgagaaccacatgatatccttgcaaagggatcgtttatagcacctggaaacaagaatctaagaagcagcctttggccttgtgcctctacactaatcatctattacatccctatggcaatttccaggttcaaaatgggccacctctattattgcatttgaccctcagtgccatcccacgaggcaatattattcccctttcacagatgagaaaactgagtttccattacatctctcgcccacagtcagtggcctggtgaagctgcactggtgcttcagcctttccccttgcacaacgctgctgtccctatggcctcccttcagttctccatggcagatggggatccagggcccataactggggcaggggcatgggggtcctccaggtttccctttttcttccttgaaccccatccagcctgcaggtggggctctggggttgcaggtccactgaccttagtaacaaaggctccttgggggtgagggcttccatgcctcctgtgttcacccaccctgggacccctcgaagaggtgccgggacccctgacacccacccccattttgtcccaggcttctcacctccccctccccagagccgcagccccatgacgcagccagccgctgttgccccattggcccgccctagtgcatttgcccttatttggccaggccagctccaggctgggtctccacccccggcccagcccccgcaggcctgtctctctcacttcgtctttttgaggtttggctctggggctctggggctctggggccctggcgggcgtcacttcaaacgcactttctggttgagtcactttttaacggctccagtgctgtgagctgctgctgctgctgggtccctggccttgggggccaaccctcccccatttgactgcttaataggctctgaaggaaagggctggggaggccatctgctgctggagagactctgcgggccacctggccacccagttaggcccctctgccccccaacccacaagcctgggccagagggtccgccctgggtcgctcccactgctttttccaacggggttgtgaggggagaacaggtcttcacagaagacctgttctttggggactttgaattgagctccctctggggaacagaaacggggtgcccgattttcaggaaggtgaaacttaacctcgctgagtttccggttcctcatctctgagatggggataccatcacttacctcactgggtcagcatgacgatcaagcgagattcagattgagtgtgtttcatcaagttctctagctgcctgggctgcctcccttccctcggccccgagtgcagaacgtggaggtgaacgggatgaatccaagctggttcgcagggcagtcctcactgagcagtctctttccaactctcaccaccttttccagctggtcctgggatgtgaggaatcctgttgggggcaggaggctggcaggaggaaatagatagctctttgccccttgtttccagacaagataaggggagaattctactagagccattcctagccaccctgccttctctgcattttgggaggtgtgccctcgagccagctgagaagataccatggctgcctgggggctgggcaggatttggaacacagatactgctgcttcctcctgcgaggtctctgggctcctgtgctcttggggacttcctagagcacaaacaagtcttttggtcaactccctccccatttttataggtgaagaaacaggctggggtttaggggcagattcagtgactggcccagaattgtaccataaataatcacagggtgaggattagacccctagtttcttgacacttaattttatcctctgcttggtgatcctgatgttgggatagggagtggggctgatgagggattgtagtgggttccaggcagaaaaccagctcttggaccccctccctgtccccgccacacatacacacacaatttatttgcagcagttggaactggagcaggtgcagctatgcaagttaaacccagcacctgtgtgtggagagagtccagagggagctttcatctctccacttgtgtccccagaagatcccagaggagaaagcttctggtttcacggccactcccacagcagtggtcagggtagccttcctcacacccacaccccctttccacccagcccgtcctgccttttcccagatgttgtggaaagaacccaacttggccctaacttgttttgtgacctcaggctgccttctgcctctctctgggcttgcagctctgtttcctgactcgggaccagttgctgcctaaccttgctgcttaaaagtccttgggtcttatgatcccaggagatctgagccagaaccctgccccagtgcgaagtgacctcctagtgtgggccactgtgcattggagctgccccttgccagacagagtagagcaggagagtatgaaattaaacctaggggagtctggtacgagcaggcaggggctgaggggcagccagtttgcccgccctccttgcctggaggccctttagcactccttgtgctcccaaggctctgagatgagacagatcttctgaggtgctgagatgatctctgtaggggacatgggctgtcttaggttcttaaggcacttgcctctcttggcacctgcttcccttggctgcccctccagggagatggggaagggtctcaacatttgggactattgactccaatttgctttagccccattttgcaatgctaggggctcagtttccctcctttgtggccaggcctgtccccaactgtagcttactggagggcgggtctgctctgccttctggacttcctgtttgtgagtggttaagtctgtggcttctctcttgttggctctttgtaaggcaggttatctgggctgccatctcccactggctgcttgcctgcctgtgagtgagggccccaggcccatgcagatggcagggaagggttggttttcttttctgccttcatgtgcggacaatgagcttgtgtcatttcttccaccctctgggcctgctctccttacaggcattaggccttcaaaagacaattttctccctgtttctcctccttgcccaatctctccttctaaaccctcttccacctgtactcacattctccaggaagccttctctgatgggactcctgtgactctaaggttgctactacagcatccaacatcccagccccttgggccctggcaactgccacctgggatggccttgtgcctgttgccgttactatgttaaatgtagatgtgtgtgtctacttcaccctcagattcagtgctcactagaagtaggaaccaagtgtccccatcagacctgaagctctgcccctgctttgggtacaagacactcacttgcactgacacacacactcgtacacactgcctatcaggctgggagtgcccaaggacaggtcctgtgtccttttctctgccggctcacctttgcctacccacagcctcagcttggcacacagagatggttgtcccccaggtcggtaaggtgggggtggcagtgagggaccatgagcctggagccctccaggattccaagcccagatccctctatcctgatgaagggctgttcccaccttgttcctgccgcccccgccccctacttcctctgagcaagaatctgaatgtcagaaccagggagggccgtgggggacttttg

SEQ ID NO: 1886834 - DNA, 4001 bp, Homo sapiens; identical to SEQ ID NO: 1243741

SEQ ID NO: 1886835 - DNA, 4001 bp, Homo sapiens; identical to SEQ ID NO: 1243745

SEQ ID NO: 1886836 - DNA, 4001 bp, Homo sapiens; identical to SEQ ID NO: 1243751

SEQ ID NO: 1886837 - DNA, 4001 bp, Homo sapiens
cctctcccagagaactagaggctgcagcggcagcagttggagcatctcactgcggggctcgggaaggaggaaaggagtgagcatgtcctgctcctgcatgtccctgcttaagctcaggactggcccttccaggccaaggaccccagcatagaccccaggacagggccccaaggatccctggctcatgagagcggcttgctgggctgccccaagagagcctgaaggaaacacattgttgagctgagctgacgtcgctgtttcttccagactgctctctaaagtgggcaggtgagttcttgccctgtatgaaggggtcagggagatggcagggtcctgtccagagagctgccttgtgccatttgacaccagcaggccaatttcagcaggttaacaggggaaatggcaacctgtggcccatgagggagtgcccccacttgaacatctctagaggctactgattgtcaggcagaggtgggatcgtccaggggatggtgtaacctgctacttcttcctgcccttcctggtgtccgtcacccccaccccttccctaaggttctggagcctcagccacagcccccccccgcccaggaacagggacccctgaggacaagacacaaatgggaagctccagtccctgcgcacaactgtatctatgaaattcttttcatctttgttttgatgagcaaagttcaatgccagaatatttggtttatgagtcatgctaattacagctggggggaggcaccaggaagaagaacagaaaggagcatgttccaaaaacactctgttgtcctggttgccctgaaaaggggggtcacttcctaggaacaaggagggaacccatggccttcctgggacagcttgggctttctctgctcctacttgggaggacgtccctcgccagctggctgcacctgcctgggaggggcagtggtgtcctgtagccgcacagcgcccacctagggcttcctgcaccatgcttcctgcctccctgaatgagctcactggggacaccacccttggcaacacaagaggaggagagggaggcgggaggagaagtagagagtccctgggtagcggacctgtgtccttcctgcccctgggcattctctgttagcagctgggagagagaagttcccagcatcagcttggcgagctgagtgccatgttcccaacaccagataggaaggttaaaagtatacgccccggaggccaggcgcggtggctcacccctgtaatcccagcactttggaaggttgaagcgggtggatcacttgaggtcaagagtttgagaccagcctgaccaacagggtgaaacccagtctctactaaaaatacaaaattagccaggcgtggtggtacacacctctaatccagctacttgggaggctgaggcaggagaatcgcttgaacctgggaggtggaggttgcagtgagccgagatttggccttgcactccagcctggatgacaaaagcgaaactctgtctcaaaaaaaaaaagaagcatatgacgcacttgggataaagacacagattggagtcttgagtcctccatccctgtctctgagacctcaagcaagccgtgagcctcttgagctttgcagctctgctctttccacaagtgagagttcccttgatagaagtgttgagaattaactattataataattattataattattaatataatgttgagcgcctgccatgtgagaagcagacacacaaacctgtggctgacatcatgatgatgatgatgatggtgatgatgatgatgatggtgatgatgattgccactgttgttgttgggtggactctaggggcctctccagctctgcagctctaagagggagggtggggaagcttctgcttgtcctcagacctcggctcccatctccctgtcttggttccctcctccccggttggcaggtgctggagaggcctcctggagcacgtcctcccatgtcctcccgctccctgcagcacacaccacagccaagtgcgtctatctgtggctgttcatggctgcacggcctgccagggagtgtgtactttcctgcactataaaaagcagaggccgggcagcctgtaaggacatcacatgctcccctggggctgtgaagtggccagcggtggagaaaacagtttctcacggcatttctcatgttcaaagctcaggaccagaaagctcccagcacgtcatgttgcctcctttcctagaaactaggtggggtagaagagtcaggaacacctcacagaggggggcggcttcctccctccctcccaagcagggatgagtcggcccaagggtgcctgaagcacgcggagggtccagagaagataatctggctttctggggctggaagagtgtggcccgggtattggccccgcgaggcccgggctaacagtggggaccacacctgcaccggtggagaagccatggagggctgggtggtgggcggtgggtccacctgcgaggtccagaagccccagggcggctcagaggctccagccccaggccgggggggccactcccagcggcacaggcagcttcgcttcccaggagggccccggggaagcaacaccgttttttcctgcccaagctggaccccctccaggacaccaaggctgtcagatgcggggggccaaagtcagcgcttcctattccgtgaaggtccaggttggccacagacaggactggacagacccggcggtcaggtggtcccagtgataaggagtggggtgagggcatccccgccaggtgcagccgcgggcattagtaccattcctcttccttccacaccctcagaaaggcaccagagaacagtgaaacaagataaacaccccacaaaaaactagggggaaggtgcaattcctcccgttagtatccacgtgcagaaaagccccgctcctccacagtcagggagacccgggaccattatgacccccgcgcaaaggcgcctatggcgggggctgagccagagccagacgccagggctgcccccgaaaacccgggtctttccgcccctgcgccgccaccgccaaccggcccctcccacggcgctctccgtccgtcccggcccaggtgtctgccatccccgccctggccaccaggctgaagccacgaggatggggcggggcagcgctgggtcccccggcccggccacctacctccgtcccgccggccgctcctcccgcgccgcccctagagcatctcccgccggccaagcctcctcccggccaggtccggggcgatgcacagactcggtgaaggaaacagagcaggggaaaaggtcttccggaggacggcagtgcagaagaggagggtggggggcggtacgagcagccacaggtcccccccacccacagcacctccgtctccccggcgcggtctccgaggtctctgcgaccagaagcggaagcgcggtttctcgaaagtaaaggaagagagggagaaagtgggacagacgcgcaaggagcgaagcccagccagatgtgagcagcgaggagcctccaacacccccagcgcttttcgtccaaacagcagccgcggaggattaaccgtgtgtgccccgcgccgcgcctcagggaaatccagcggccgcctcctcccggccccctggggagcccgccaggctgagagtgggggtggggcagattccgtgagtctggaggtccgtccagaggcggaggggctgcgagccccggacgagaatgccccccgcaggatgggggtgcccagcaaggctgagcgctcctagtcacttggtagcagagggatgagccccaaggcctccgggatccgctgtggccaaccctgaggggtcaggtctccaaacagtggcagacctgagacgccctgtgcattatcggggactcagacaggtttgggggaatctgtgaaccccctataacaaaatgccaaactgtgtgtgtgtgtgtgtgtgtgtgtgtgtgtgtgcgcgcgcgcgcatcacctttggaaggtgatggtccactgttt

SEQ ID NO: 1886838 - DNA, 4001 bp, Homo sapiens
gatagacgcacttggctgtggtgtgtgctgcagggagcgggaggacatgggaggacgtgctccaggaggcctctccagcacctgccaaccggggaggagggaaccaagacagggagatgggagccgaggtctgaggacaagcagaagcttccccaccctccctcttagagctgcagagctggagaggcccctagagtccacccaacaacaacagtggcaatcatcatcaccatcatcatcatcatcaccatcatcatcatcatcatgatgtcagccacaggtttgtgtgtctgcttctcacatggcaggcgctcaacattatattaataattataataattattataatagttaattctcaacacttctatcaagggaactctcacttgtggaaagagcagagctgcaaagctcaagaggctcacggcttgcttgaggtctcagagacagggatggaggactcaagactccaatctgtgtctttatcccaagtgcgtcatatgcttctttttttttttgagacagagtttcgcttttgtcatccaggctggagtgcaaggccaaatctcggctcactgcaacctccacctcccaggttcaagcgattctcctgcctcagcctcccaagtagctggattagaggtgtgtaccaccacgcctggctaattttgtatttttagtagagactgggtttcaccctgttggtcaggctggtctcaaactcttgacctcaagtgatccacccgcttcaaccttccaaagtgctgggattacaggggtgagccaccgcgcctggcctccggggcgtatacttttaaccttcctatctggtgttgggaacatggcactcagctcgccaagctgatgctgggaacttctctctcccagctgctaacagagaatgcccaggggcaggaaggacacaggtccgctacccagggactctctacttctcctcccgcctccctctcctcctcttgtgttgccaagggtggtgtccccagtgagctcattcagggaggcaggaagcatggtgcaggaagccctaggtgggcgctgtgcggctacaggacaccactgcccctcccaggcaggtgcagccagctggcgagggacgtcctcccaagtaggagcagagaaagcccaagctgtcccaggaaggccatgggttccctccttgttcctaggaagtgaccccccttttcagggcaaccaggacaacagagtgtttttggaacatgctcctttctgttcttcttcctggtgcctccccccagctgtaattagcatgactcataaaccaaatattctggcattgaactttgctcatcaaaacaaagatgaaaagaatttcatagatacagttgtgcgcagggactggagcttcccatttgtgtcttgtcctcaggggtccctgttcctgggcgggggggggctgtggctgaggctccagaaccttagggaaggggtgggggtgacggacaccaggaagggcaggaagaagtagcaggttacaccatcccctggacgatcccacctctgcctgacaatcagtagcctctagagatgttcaagtgggggcactccctcatgggccacaggttgccatttcccctgttaacctgctgaaattggcctgctggtgtcaaatggcacaaggcagctctctggacaggaccctgccatctccctgaccccttcatacagggcaagaactcacctgcccactttagagagcagtctggaagaaacagcgacgtcagctcagctcaacaatgtgtttccttcaggctctcttggggcagcccagcaagccgctctcatgagccagggatccttggggccctgtcctggggtctatgctggggtccttggcctggaagggccagtcctgagcttaagcagggacatgcaggagcaggacatgctcactcctttcctccttcccgagccccgcagtgagatgctccaactgctgccgctgcagcctctagttctctgggagaggcatgcggtgtgagcaggaagggaggggcttcggagccatgtgggaaggatctttatctctgggtccttgtcaaggtcacggctgtgtgacacttgtgctggggtgatatgagtggctcttggcaaatcagcacccctccagctgcctgttcttgcctacatttgatttccagagctgggcttggcatctgaatgtggttcaaagggggatggtctccagcaggggcacggggacccccacagtccccactgtacaccagggcactgctatcttgcctctgaggccccctggatctaagccgttctccagcttcagatggggctggcacagactgcaggcccctccccgggcccccatcctgtccaggacggccgtcgggacggctgtggccgggccggtgtctgcccatctccctggctcctgtaggaattttccttgacacgagacagagtagagcaggagacggcaggcagggaggcaggagtcgaggggaggaggagaagaggcagacaggcaggcggggcatggggaagtcaagttcttggtgccctgtgctgggtcaaatgttgttcttggccacggctaaagccacacttggtggaatgccccaaaccctatgctttgggttgtacccatccccctcagcaagacatctggataacagccaccctctgccctggggagcagggaagctgctgggaaagctgccagccctgggtgggttcgaggcagatgtaggtcagaaggcgggcagggccccctgactctgcccacaggttcctggggccagtcttcagagctggggacagaggtgtgttcagaaaacgcttagacccattctccttgtaaagaatctaaagtgagagatggaaggatctgggtgggttagggggtgaccacaggtctcttgcgtcctctggcattcaggggagccccctcctccatgaaaggatatcaatgagggcaaggcccatggtcctgagggtcctccccgtgtggtgcgtgaacttagattcctttgcaactcagagctcaggtctgcttgtgcccattagagggcactggtcgggagagaaaaatcatctgtaccccagcacatgggtcttttcctcccttcttcagagcttgccagcatgctggtgtctcttcaccctacaaaagcagtgccctaaaaatgcacatccgatgggccacactgcccaagcccctcacattttaaggtgtgtgtgtgtgtgtgtgtgtgtgtgtgcatgcacgcgcgggtgttcctggtgatcctgtgcctaaatccaaaggaattaaactccggtggtgtattttaagatgctagcaggctggcaccagggatatcttagcacattgcatcaaggaagatggttacaggtttccctggtaccccataccatacctggcatgtagtgggcactcggtaatcctctgttgaatgatgaatgcaagggctcagctgctggatacagtcctcgaagccaaaggctgctgcagcggttccacctataaacaagtaagcaaattggtgggcaccgtaaccctgagcccagtgggcgggaacggtcgctgcaccatggcttgggaggaggaggagcctatgctctctggcatctttctggccacccctcggggtgaagtgtaatgtgctttgctgtcggacacacctaggtctaatctgagctccagcacctccccactgtggaacctggggcaagcggctccatcgctctgaggctgtttgcgcattctaaggatcaggtattctaaggattaggcattctaaggatcaagctttctaaggatcaagctcagtggtgtagggaaggcaccatggccagagtctggctctcagtggtggcttttcaggggtagcggggctttgtcagaaggaatctctgataaacattgggctactcctgggtccaggaacatgctggccattgcacatcacgcacaggatgggctgcaggacggggctccgttt

SEQ ID NO: 1886839 - DNA, 4001 bp, Homo sapiens; identical to SEQ ID NO: 1243769

SEQ ID NO: 1886840 - DNA, 4001 bp, Homo sapiens
ctccagcctgaagccccacccccaggacatccagctccgctccttccctcccccagtcccgcagccaagctcaactccagggtgggagattaaccaggtggagacctgggatttcgctctgggaccccctggtgacaaccctcacccccgtgccgcctgtctcctttcttccccaggcccgcccagagctgagctccgtcctccggctgctgcccaaatcaggggtcgtggacaaaggatgcctggggcctgcggccctacgccaggaccccgcgccgaatactctgattcttcgggctccctccaagggagtcccaaagaccccaatggccaataggaaagtgggttcggtctgggcagcagtctgattggctccagccttcgggagcggacccaggggcaaggggaggggagaggggcggtcctgggttttggggtgggaatcggattccagctgtggttctctccctgcgctcccgcccgcactgccacggcggacggccaatgggcgcgcggctcggggccggcggcgtccggcgattggctgcggggctgtctgggggcggggccgaggcttgaagttgaagtgagggatccagctgtggtgtgcgcggggctcctcgccgccgctttcgctcgctcgctccgcgtctcggccggaggaggaggctgtggcgccggcgacagctacggcagcggcagccaccgcggcggctgcggcggcggcatctccgcctccactcccgcccgggactgccccccactgtctccccgcccctcccggacagtgagcccgcggcggggcgggggaaggagccgcccccaccccctccaagcccacccctaaagagatccctcctcccctcccccgccgcctggcgcggagccgggacgatgctgaccccttagatccggctccagctgcgccgcgggaagagggggcgcccctccccggacccccgccctccgccgctgccccccttttcgttcgccctctcggggcggcttcgccgaaggtagcgccgaatccggcaaccggagcctgggcgcgaagcgaagaagccggaacaaagtgagggggagccggccggctggcccgggaagccccaggggcgcaggggaagcgggactcgcgccgggcggggtttccctgcgccccggcgccccgcgggcagcatgcccctgcgggcagggggagctgggctgaactggccctcccgggggctcagcttgcgccctagagcccaccagatgtgcccccgccggggcccccgggttgcgtgaggacacctcctctgaggggcgccgcttgcccctctccggatcgcccggggccccggctggccagaggatggacgaggaggaggatggagcgggcgccgaggagtcgggacagccccggagcttcatgcggctcaacgacctgtcgggggccgggggccggccggggccggggtcagcagaaaaggacccgggcagcgcggactccgaggcggaggggctgccgtacccggcgctggccccggtggttttcttctacttgagccaggacagccgcccgcggagctggtgtctccgcacggtctgtaacccatatccttcggggcacgacggccaggcgcggggtcagaagggggacgggccgcaccgccgggggtcgggggggaagaagacccaccgccaggtgagtcgaagtgagcccggagggtaggcggatggggggggggctgccagggaggggagggggcaccagagtgggagcggagacgcgagcaggtctcgtcggtaacccgggcttaccccacctgcgtacacacacctcagtcttcctgggttgggggggtggggatccaggccaggagaagagagctgtgccccgctggctcgcagctggacgccctccagatgtggtcaggggagggtcgtcatcctccagatgtgggaagcttcgggagcctgggagctgtactctgcccgcgccggttagcgagctgggtttggtttccgagtttggtggggggtgggtgggggcggtggggaggaagctgcggggacggaggaggggggaccgcaatctcctgggtttccctccttcccccgccccaaagtttgcggcggattctagggtctgatcccccaacctggtccttgaggctgaggtttttactgacctagaaggagatgttggggggcggggaccaggtcctggcccacctcaccccccacctcgcgggttggaggcacaacaaggagattccggcggcggctgatgtcaggggcgcagaatgagaacaagatgtggtggaggggagctgtctgcccccggagctgggagtggagcccctttccgctagagcccagtgccgcgggtgcctcctacccgatctccattcgatgcagggtgcttaagattgggttggggagttttatgctggatttttcttgtggagggaaagactgtgtcaagagcttttttagcaagtgggggatggggttaagctggtccaggttactcctcccctttcacaaataaagagtgctcctgcagaccaggtatgggggactgcaggcccgcgaaagtcttgaggggacagtaatactgtcagtgtgttcactaaggaggactcgggtccaccaccccagcgtagactccgcagataggtttggggaatgcaagccccacattccagggagatggatttagcactgctccctgtctgcccaggctggagtggtaggggagaccccagcccagtcagaccctagctcaaagcgccacttgacagacgcctggccccaagctccctggcgggtcctgccaccgggggaaggaaaggtggaggggaggtgttgctgccatctcaggtctggacagcttctctgggctccttccttccagctcagaggttcttatagacccagggtgggagaccccaggtctcccttgtagcccctgtgagcctagcagggactctgctttggggaaggggggtggaaggttggtgccgccctcactctctgcagctctgctgcctctagtgcgcaaagcagggatgagcttgtggcccccccacccccatcctctacaccttgtgggtctttaggaagctcccctcatcacatcctcttctcatccactgccccttcttcctttctctctgagctgcagaaagagaggtgcaggcctcagaggtctgtgttcttgctgaataggcacaatcttgaggtttgagcccccagccccaggcccctttctcccaggcagggatggagatggagaactgatatggctggaaaggatgggttccgagcaactctcctctctgcccctaatcatttaccccttccacgaatgggaaaaagcatcaacctctatgtcctccttctcaagggtcccaggggaggtagagagagctcttctctcccctctccctgaaaacagacctctaggctagcatctcttctcgcctgccctatctccaggtgctagtggagggtctggaggcagactccttcactgagtggtctggacgggggcaagtgttgaggcctggcatgggggaggagaggtgggaggacagcactcaccttgggagttggggagcagcttcccccaggggagtggtagttgggtgtgtggcatcagcattactaggtctggagaagcctgggttggctgaggatgggttgagaacaattttttggcaggggactgcctaagctgtgcccctcaccactgccatcctacccaagtaccaagagacacctgtatttttgctgccagaggggctctgaactgcctccagggcctccctctttctctttgtggtatctgtgactccccacaggcttcaggagggtccctgtacgcctctgagccggagggacataaggacactcccctccacccccaactaactgaagctagttaggcttttcttggtacattctgcttcttggcctctcctttttaagggaccaggtttcctagagaggagatc

SEQ ID NO: 1886841 - DNA, 4001 bp, Homo sapiens
ggactggtggtcagccgaggactacaggtttctcgggtgccttcctggggctgggtccaggtggcaacgaccgggtctgggagggtcctctagttggattgtccctctgcccctgacttgcccgagcctcacaagactcctgaggagggtctgagggtgctgactgtgccctcccatcagactgaactcagaaagccagggcagctcaagccaaagctgcctcaccagcagctgaagacaggggctctgcagaactctccagaccccagccaactgccccagccagctgcccctcaggcttctggagcccccagagccacactgaacttcaagcatcagtgggtggagctaaatagaagtcactagtcccttctgcagttgccatgaagcaacttacagtagtctccaatggcagttaacaattgcaggagtttctttgtaacttgtcccagtgtaaataagggttagtcctaacagtaaaacaaaacaaaacaaaacaaaaaaccttagggctgggcacagtggctcaggcctgtaatcccagcactttggaggccaaggcaggaggattgcttgagctcaagagttcaaggctgcagtgagctatgattgtgccactgccctccagcctgggtgacagagcaagaccctggctcaaaaaaaggaaaagaaagaaagagagagagagagaaagaaagaaagaaaagaagaaaagaaagagagaggaaggaagggaaggagagagagaaggaaggaaggaaggaaggaaggaaggaaggaaggaagggagggagggagggagggagggagggagggaggaaggggaggggaaggggaaggtgaatgggaaggcgccaggagccgtggctcacgcccgtaatcccagcactttgggagaccaagatgggcggattacctgaagtcaggagtttgagaccagcctagccaacgtgacaaaaccctgtctctactaaaaataaaaaaattaaccaggtgtggtggcgtgcacctatagtcccagctacttgggagactgaggcaggagaatcacctgaacccaggaggcagaaattgcagtgagccgagattgtgccactgcaactctagcctgggcgacagagggagacttctgaaaaaggagagaagaggggaggggaggagaggggagaggaggggaggggagaggaggggaggggacgggaggggaggggacgggaggggaggggagggcccagagatctctaattccaaactctgaatctaactgtacagcaattctagaagagcctaagatcataaaatcctgagcatctaagatgtgggttctccttatttgacccctcccaggtcaacatccttctcctaacccaagtgtcagtctcttcccttgccagtgaagtagggaagaaggcatgtacacatacacacacgcacacgcacacacacacatgtacataccccatggggggcagagggtcacaagcccaggaggagggggcacagctcacctcggccccccagtgccatgacaggctggctgtgcctctgctaccaacagcagccagctggtcttgctcactttgttctgaacttagacaccttccttctgctgtctttcatcccacggcaatagcgaagagatgagagtataaaacagagatccctttcatctagcatgacccatgctgttttaaggcagaactcagcattcagagaatgttccagtgattgacccagcaacacagacaagccgttttctgttctctagtccacatacaaggcagctcctccactcctgatgaggaagatgccggcccctcccactcccctgggaccactctcgggccccatcagacctgtgtcggctgagcccctccgtaggctgagccctccgtaggctgacctgctcttcgccggatggactgcgcgcacttaccttccccctcccagggaagcgaggactgaatgtggcccaatctctggctgaactgaacggcagtggacaagcaggtttgacaggcacatcccacaggagcagtgccttatatggggcttctatgagccatcgaagcaccagtgcagtcccacagctagacattgccgtaagaaccacagggatggctgagaacagtccgtgcatctggtcgacccacagaagatggtgattgagggtgattgaggggaaggcttcaggcttgggggctgggaatcctctctcctttgtgaacggtcacccagttcatcatcatttctacccttgggaaaatcctacgaagatcaggataaattctagggcctttcttggttctcatgatccattattggaagtatctgaataattccaatagatccatctcaagttaacatttcataactattgtttagatttagatgaaagtcttggtcctccaccttgagatatgtctagaatccgatccattctcaccacctgcattgtggtgtcctgatcatggcccaccgggacctctgtaatggctcctaacttcttcccacgcccccatcaccagcgctcaacacagcagacagagaagtcctgctagggcatgagtcagctcctgtcattcccttcggtgtacaggtcctggagtcctcagcgtgaccatgaggctctgcttatcaggtccttgctgaccttatctctcttttacctgctccagacacacagcccaacagtcttgacagtccaggcacacttctgccccagggcctttgcacctgctgttcccactgcctggaacactctttcccatccctccttccagactctactcaaatgctacttcccagatcatcctacttaagtccgtagacctcccatcctggccttcactccccttccctgttccatcttctctgtgggaatactgccttgacctaacgtgtattctagttacgtggcttcctgccagcctccccactccacagtaacctactgaggacaataattcttgtctttcttgttccctgctgtgtccccacccctagggctgtgatattccacaaatattggttgagcgaatgaataaacattggttaggggcttggttcccaatgatgcagacactgaaagaagggaaattcacaggtccatggcctgagaaccttcaggattatcctgcggacaatcaaagatcggccttcaaggtcatgtagctcatggtggctgagcagtagctccaacccaaatctcctggtgatgagccggctgaaggcacagccagttgggcagagcaagtgagaacgcaggccgaggccaggtgcagacatgaactctccaaccagggttacagccccactgggtgtcagcttcccctcaggcagttcatttaagcccctaaggctcagctctcttagtttcctccagcagacctcatgataagccctcccccacagtggggaagcttgccagctcatcacactgtgccagccacacagagaattctagttacagaaaacgcaaagaaatgccgccattcccagtaaaagaggggggcagaagaatgcactggagatgggaggagcctccctaagaacagaaatagccatagaaatagtcaaggtgcagccatagaaaggaatgaagggcctttgcagagacatggatgaagctggaagccatcattctcagcaaactaacatgggaacagaaacccaaacactgcatgttctcactcataagtgggagctgaacaatgagaacacatggacacagggaggggaacaacacacactggggcctatggtagggggagtggagggagagcatcaggacaaatagctaatgcacgtggggcttaaaacctaggtgatgggttgacaggtgtagcaaaccaccatggcacatgtctacttatgtaacaaacctgcacattctgcacatgtatcccggaacctaaaataaaataaaataaaaagaaacagtcaaggaagccacaaccctgaaggaccctgtgttttctgaggtcaaaaaccatatctta

SEQ ID NO: 1886842 - DNA, 4001 bp, Homo sapiens
tttgagctgcagtcaagaggacaatctctactgggtaaaaatgctttataaagatgatgtttcttggttggtagagtaaaattttgcatttcatttccaataaataatgctattcattagaaactttttcaaaactctcaaagtgctactaagcctccattagagtattttctctctctctcttccatcattatccacattctcactacctgtacaaagtgattcagtgaaaactggattcaaaaggattagtctctgtatttccaaaagagtttcagcccatctctggatgagtttctaataaaattcagtgaaatataattgtatatgctagatagcttttgcttccctccactcccagtatgctttctctctttgtccttgaccctctattctgtgcccagaaaggctgacctgtaaggattgtaacagtggtcccctcgacctctggcttccagtgggttcaaccaatgggagaccttgacaagagatttgaaggaggaaagaaagtggggtttaaatatttatcccaccagctccctccttgctggtgactcagatagccactgatgttatctgaagaatctctttataaaatgtctttctcttggttacagaaatgacttctaactattacatcaactagctccatggaactgcaatttctcttgatggtttctccaaactctgcccacatgtatatagtcagttttactataaatcatttcagataacccagattggatgagattcattgagggccctggcataaaaggacaggaacactcagactgggctcccatctttttgatagattccaaaaatgtgagcccaggactctacacacatctgcgatgttgaaaagatcagtctgttgagaagggctttagtagctcaaagtacaactgcagtattaattttattgcccaaatgataaaaaagcaagtaaataaaatgaccctattcaataacttttttttggcggggttggggatagtaggaaggaattgattcagaatcaggcataaattaaatttatatgaatgagatttaaatgatgatttcaacttagtaaaatttgctccagtgaataggctacttcagagagtaacaagaaataatcagaataattaaaggtcagcctgtagtaattgagtaaatttgcctattttcacttggtatgatattaatttgaactgattatcatgccaggactttaatatttttattgaaaggtcattttggacaaaacaagctacaggattttatatatatacatatatgcatataaatatgtatatggatatatacatacatgtgtatattatatgtgcacataaatatatatgacataggaattccactgttaacttactcaatggtttctactgtacaactcacaaatgcaaagtatatcattcaaattctgattttatgcttctagcaaacaaataagtaaacaaatgaattattttttaaaaatagtccaatgttaaataatatatatttcatgtagattttccaatttataaataaaatttatttccagctaaatgtaggacttatgttgctcattgagttctaattattattttctcttgcaacacgctgtggcattttggtgaactattttggcatcagtaaattcctaagtatagtcaatagactcctattaatatagtagggtatttttagctcaggctttagctttttaaaaccacagtgcttaaagtgtccccttacagaaaaaaaaaattactatgttcaagtataaccccattcatatatatctacccaagtgctttcgtctatgaaatgagtatttgactgataaatacatacatatttaattttgtaactttccccacaataaattatttgtataaaacagaaaaatttttatctattgtaattattttcttacctcatctggagggtctgagaagcattggcaacagcacaaatgtgacatgagtatttaaagaaaaggtgaattgcccagggctaaaaaacatactccatacatcatgttttgaacagtcatacaatagattatgatgtgactgtgaagtcacaacagtgggctcccaaatatgattttcttggtggacattaccctgtgacactttccttgtatatgtgtgtgtatgcaagtgtgtgtatgtcggtgtgtgtatgtgtatgtgtctgttgtttgcctgtctctctgcaaagcattctactcaggcacagtaatgagtaggacaagttctcctacaaacgaactcaatactgttcatcaattaactcttgcgcttccttctaaaaccacttgtgaaatcaaccatttttcctcttcttcagattagggaatgggaacaaatggagtcaacacattcataagttataagatgatattttgaggcaagtaaaattaaaaacagcaattcttgttgatgggtattcaattctgacaagcacagattacacaagtaatgcaagaggcattagtcaccaattgttgctaatccgattttcatactttagctttttataataaaattgacagttgagtcctgtgtattttacaaaattggaggctaattttcaggtcatctcaatgatcctaagcaaatccaataaatatggagtaaagatgactctttgcacaatgaatttcatatacttcactcaaattagagcctccaagtccctccctcaaatgttatatattttcactttatactagattctcttgatgtgtatcataatagcaaagaattcacttagcaaagaatccacttggagaacacacacagaaaatgaaagactaaacaaaattttaacaggtctgttcgccacttagtttctcctcttaggtgctttaatttgttgcttcactctgtacatttctggcatttctgggaggatattagtaagttactgtttcagaactcatttggatctttttcccctccagaactctcttacctctttagtgaacacatttttaggcaattataagaagctgattaaccaatctcaagacatttggaagaaaataaggtagatcagtggggaagatcattagagttaggagtaattattccaccagttaataacagctgatatcctgatgaccctatcataagagaactaaaataaacagcagtagttcataatgtgtgatggtttggggacatttggggtagtaaacaattctatgaagttcagttatgaattcttcgctgggttcacgatgacagaaaagaatttctgttcatgaagggtgacctttgcatacctccaaaaatgtaagcagcaaggctgagttgggaggatcacttgagccctgaagttaaagaccatcctgagaaagatggcaagaccctatctctacaaaaaaataaaacaaaatattaaccaggcatgatggtatgtgcctgtggtcccaggtactctgcaggctgagatgaaaagattgcttgagccctggagttgaaactgcaatgacccgtgttcacaccattgcactctaaactgggcaacagagcgagacttgtccaaaaaaaaaaaaaaaaaaaaaaagtaagtaataaagtagttaaaactgaaagttgtagagtaagactttaaaaattacctagtatagtttcttcattttacaaagcagaaaactgaaattctgagagaccactaagtgaataacgtacattcaatcaatttttttaaagggaaactaatttatcacctaaagctaacatcaagccatatcgaatatattaaaaaatgacactgctaaatgataaacaagtttggtcactgttttaaatgggataaattttgaaatctagaaccaattatatttattatttactataaatcaaaacttcaccgttgaaagatattgtcaatctttcagattataggaagttgtagaggacatgctaatgggcttcccagatcttgtttcagtgatgaactggttgactcagaagctggaatgctgctggcatagggtc

SEQ ID NO: 1886843 - DNA, 4001 bp, Homo sapiens
tagtcaaatgaacttctagtgactgcgcaaaatatggacttcaaaaatctgtgcatcatccttatgcaggcaggggccatgctgccattttgtttcaattttagtatatgtttgctgctgaagcaagttttgtttgtttgtttgttttagactgagtctcgctctgtcacccaggcttgagtgcagtggcgcgatctcggctcactgcaagctccgcctcccgggttcatgccattctcctgccttagcctcctgagtagctgggactacaggcgcccaccaccacgcccggctattttttttgtattttttagtagtgacggggtttcaccgtgttagccaggatgctctcaatcacctgacctcgtgatccgcccaccttagcctcccaaattgctgggattacaggcatgagccactgcaccctgccaaagctctcattttatacatggatattcatgagtcatggatgagacttggctctgttaaatccagctaacatacttgagactcagaattctggtgagggcttcctgtcacaaatctgggaaacgataatatgggacattccacgatctaagaaaagggtccggccgggcgcggtggctcacgcctgtaatcccagcactttgggaggccgaggcgggcggatcacgaggtcaggagatcgagaccatcccggctaaaacggtgaaaccccgtctctactaaaaatacaaaaaattagccgggcgtagtggcgggcgcctgtagtcccagctactcgggaggctgaggcaggagaatggcgtgaacccgggaggcggagcttgcagtgagccgagatcccgccactgcactccagcctgggcgacagagcgagactccgtctcaaaaaaaaaaaaaaaaaaaaaaagaaaagagtcctcagcatacagatctggtagcaatgaaaaaaggaaactcatctctttctgcaacattatttgaactgaaccccgagggcctaaaggataatttatcatgaaggtcttagctaagtctaggctgagacaaaagcataacaggcggggtttcaccatgttggtcaggctggtctcgaacttctgacctcgtgatctgccctcctcggcctcccaaagtgctgggattacaggcatgagccaccgagcccggccaacatgaagttcttaagggtggaaggaacctgagcgacagtagaatatgtctgctgtataatatgtattcagcttatgtttgatgaataaattgagaaaatggataaacacagttgggaagtgcaatatttttaaagaaaactcctgtaaagtagaccaacacttttgcaatagtaataatcctttatatttgatcccgtctcactaagaggcctgggcccctgacccctctgacgtttccccatcccgggtgccatggggcctccgggcaccagaaagccagtgtccccgacaggacggcgcacccgcatccttcacctggccattacctcttcttcctatccctcttgtccacgccagtgtctccaggagccaagacgtgctccaccccagggacgtcgcccgaccgggcagctctgtggagctcgccaagatcttccaggcggacgtcgtgctggggctggtctaaggcgccctcaccgtgcttgctctcgctgccgacgctatttttccaccagctgtaggagaagcccgaagaccactggtcccccgggtagcccaagtaccactggtcctcctggctcctgacgctacgggtcttcctcgtggcgtagactgccagcttcggagacccctcagcccctccccgcttttctccaccccaggaggccatcagtagcgagctactgcctcggccacaacctcccagcaggatagcccgcggtttccaatctgcgaaaggaggaccgccaagccagaaatgccaagccaagcgatcactgccacgccaagccaagcgaccaccgccaagccaagcagccaccgcaaagcctcgcgggtaaggccaagccaatccgttacagaccagtgcgcctgcccacctgtgacgtcacggaacctgtgacttcactgcaactgcagctccagcctcccagaaaaagactccttggcctgcaggtggcgctgcagctccagcctcccagaaaaagactccttggcctgcaggtggcgctgtagctccagcctcccagaaaaagactccttggcctgcaggtggtgctgcagctccagcgccaacctgggctggctggtcctccctcggaggtttcggggtggcggcgcctagcctgcctgtcatgagtgctgtttcacagactctatctcaaaaacaaaaccaaaaacaacaacaacaaaaaacggtgttggaagttctagctagtgcaaaaaggcacgttaaagaaataaatggcatgcagattggaaaggaagacataaaactgcctttatttgcagatgacatgattgcttagaaaatcccaaagtgtttgtttacatgcaggtttagctaagtctcaggatacaaagtcagcatacaaacgtcaattgctgtcccatataccgattgaacaattggatttggtaataagaaaaacaataccaattgcgacagcaccaaacaaaaaacaaaaaaaaaaacccgaaaaaaaaccgactaaggtctaaatctaaccagatatgtgcagaaggtagagctgtcagggtggttgagggcatgggctctggagctgcctgcctggccttgcctcttgcctttcctgctcataagccatgtgtctcagtttcctcctgcagagtgcatccacctcacaggacctctgtgagggtccaacaagtccatacatgaaaaatgcccagaatggtaaacagtaaatacatacagtaaatatgaaaaaaattgcattcacataatcaagcacaaattagctatttaagcacagctcatcaagtttacacttgcagagtaggcccagccatgcctcaggaattgctgtgtggtgacctccctccacagggacatgcagcacccagtcccgcagcggctgtcctggtgggcacgctggcactcagtgagcaacacccctcacagactacatggccttataaagacacagcagccctagggacacatgttatggccatttttatgacagcgatgtcacatatcatccttcacctaattccttttctggggagtcactcgcgcctgcaattgggctggctaagatgctctccttacacggtggctgaggaagaacactttctaataactggggaagactatagagcttcacttttaaagatttcatcatctcacatcagtcagaacggctattgataaaaagtcaaaaaataacagatgctgacaaggctgtggagaaaagggaatacacttttggtggaaatgtaaattagttcagctactgtggaaagcaatctggagatttctcaaagaacttaaaacagaactaccatttgactcagcaataccattactgggtatatatccagaagaaaagaaatcgttctaccaaaaacacatgcacacttatgttcatcacagtgctagtcacaatagcaaagacatgaaatcaacctaggtgtccatcaatagtagactggataaagggccgggcgcggtggctcatgcctgtaatcccagccctttgggaggcagaggcgagtgtatcacctgaggtcaggagttcgagaccagcctggtcaacagggtgaaaccccgtctctactaaaaaactacaaaaaattagctgggtgtggtggcgtgtgccagtaatcccggctactcgggaggctgaggcaggagaatctcttgaaaccagaaggcggaggttgcagtgtgctgagatcgtgccactgtactccagcctgggcaataagagcaaaactccatctcaaaaaaaaaaaaagaatacagagatctgacattcctttgagccaccactccaaaatggtttctcacctactcactccaacaaaattgctctt

SEQ ID NO: 1886844 - DNA, 4001 bp, Homo sapiens
gctttgactcacactgtctttggaactagtcagcaaatagtcaaatgaacttctagtgactgcgcaaaatatggaccacttcaaaaatctgtgcatcatccttatgcaggcaggggccatgctaatttctctccattttgttccaattttagtatatgtttgctgctgaagcaagttttgtttgtttgtttgttttagactgagtctcgctctgtcacccaggctggagtgcagtggcgcgatctcggctcactgcaagctccgcctcccgggttcatgccattctcctgccttagcctcctgagtagctgggactacaggcacccaccaccacgcccggctatttttttttgtattttttagtagtgacggggtttcaccgtgttagccaggatgctctcaatcacctgacctcgtgatccgcccaccttagcctcccaaattgctgggattacaggcatgagccactgcaccctgccaaagctctcattttatacatggatattcatgagtcatggatgagacttagctctgttaaatccaactaacatgcttgagactcagaattctggtgatggcttcctgccacaaatctgggaaaggataatatgggacattccacgatctaagaaaagggtcctcagcatacagatctggtagcaatgagaaaaggaaactcatctctttctgcaacattatttgaactgaaccccgagggcctaaaggataatttgtcatgaaggttttagctaagtctaggctgagacaaaagcataacatgcggggtttcaccatgtcggtcaggctggtctcgaacttctgacctcgtgatctgccctcctcggcctcccaaagtgctgggattacaggcatgagccaccgagcccggccaacatgaagttcttaaggatggaaggaacctgagcgacagtagaatatgtctgctgtataataggtattcagtttatgtttttttttttttttttttgagacggagtctcgttctgtcgcccaggcgggagtgctgtggcgcgatctccgctcactgcaagctccgccttctgggttcacgccattctcctgcctcagcctcccgagtagctgggactacaggcgcccgccactgcgcccggctaattttttgtatttttagtagagacggggtttcaccgtggtctcgatctcctgacctcgtgatccgcccgcctcggcctcccaaagtgctggtattacaggcgtgagccaccgcgcccggcccttatgtttgatgaataaattgagaaaatggataaacacagttgggaagtgcaatatttttaaagaaaactcctgtaaagtagaccaacacttttgcaatagtaataatcctttatatttgatcccgtctcactaagaggcctgggcccctgacccctctgacgtttccccatcccgggtgccgtggggcctgcgggcaccagaaagccagtgtccccgacaggacggcgcgcccgcatccttcgcctggccattacctcttcttcctatccctcttgtccacgccagtgtctccaggaaccaagacgtgctccaccccagggacgtcgcccgaccgggcagctctgtggagctcgccaagatcttccaggcggacatcgtgctggggctggtctaaggcgccctcaccgtgcttgctctcgctgccgacgctgtttttccaccagctgtaggagaagcccgaggaccactggtcccccgggtagcccaagtaccactggtcctcctggctcctgacgctaccggttttcctcgtggcgtagactgccggcttcggagacccctcagcccctccccgcttttctccaccccaggagaccatcagtagcgagctactgcctcggccacaacctcccagcaggatagcccgcggtttccaatctgcgaaaggaggaccgctaagccagaaatgccaagccaagcgatcactgccacgccaagccaagcgaccactgccaagccaagcagccactgcaaagcctcgcgggtaaggccaagccaatccgttacagactagtgcgcctgcccacctgtgacgtcacggaacctgtgacttcactgcaactgcagctccagcctcccagaaaaagactccttggcctgcacgtcgcgctgcagctccagcctcccagaaaaagactccttggcctgcaggtggcgctgcagctccagcctcccagaaaaagacttcttggcctgcaggtggcgctgcagctccagcgccaacctgggctggctggtcctccctcggaggtttcggggtggcggcgcccagcctgcctgtcatgagtgccgcttcacagcgccgccggcgcacctgctcctaggcttgctcggttcaggggtatgggccagttccgcccccggcttggccactgcagcgaagttgccctagggtccgcgctgccaggacgcaagcggagtctgatggctgggtcagagcggcctgtcagcccggctggaagggcctgcccgacgccgctgcccgcccagctgctactcggcctgcgcctggagccagggaccagctctgggcattctgctgccttaggatggggccgagcagccgctccccgccctgtgccgcagccgctgcgcgcatctgcccagggtccgtgcagctggcgacccgggcaggtcggggaatgcctggtgccaccgggattgctcgcctctagtccgtcctgacccttcagcccgcgagcaccagtgagattgaagaaaagtgacggccgggcgcggtggctcacacctgtaatcccagcactttgggaggttgaggcgggcagatcacttgaggtcaggagtttgaggccagcctggccaacatggtgaaaccctgtctctactaaaaatacaaaaattagttgggcgtggtggtgcgcgcctgtagtcccagctactccagaggctgagacaggagaatcgcttgaacccgggaggtggatgttgcagtgagctgatatcgtgccaccaaactccagcctgggcgacagagcaagactccgtctcaaaaaaagaaagaaggcaggagagaacgaaggaaagagaagaaaagaaggaagaaaggaaggaaggaaggaaggaagggtgacaaagaagaatctagagagcactcaaatactaattcttgaggacaattaagacagatcgcattatgaaaaacagattttgtcactgaagcctcagggcttcagcctagatcctgcgctgctcacccacagaaagccaaccactgagatgagtattgcaaaggaagaaggctttaatcagatgctgcagccgaggagatgggagctcagtctcaaatccctctctctgaccaactaaaattagggatttttagtatagcaaagaagaaatgtaactatgtttaagaaaacatgaactaggaaggggtaaggaagcaatcatttacaaaatatctgtggccgggcgcagtggctcccacctgtaatcccagcactttgggaggcagaggcgggtagatcatgaggtcaagagatcaagaccatcctggctaacatggtgaccccttgttctctactaaaaatacaaaaattagttgggcgtggtggcacgtgcctgtagtcccagctactcgggaggctgagacaaaagaatcgcttgaacccgggaggcggaggttgcagtgagtcaagatcgtgccactgtactccagcctggcgacagggctagactccatctcaaaaaaaaaaaaaaaccagaaaaagaaaaaaagtatcttcaccctgcctcctcaatcttggcataattccccctgcgagtggtttctggggtctcagttggcatttagtcacacattgcacatatcgtgtgcacatctgcacagctcagcagtgtcctgggtaggccttgaagggtgatcttcacgtaagcctgtggcctgagcaagaaagctgcacacgggcagcggaggaaccagcaggagcccagtcctctgt

SEQ ID NO: 1886845 - DNA, 4001 bp, Homo sapiens
ctgggcgacagagcaagactccgtctcaaaaacaaaaaaaacgcctcagcaaagcagaggaagcaatcagtagaatgaaaaaacaggcagggagcggtggctcacccctgtacacccagcactttgggaagctgaggggcgccgatcatgaggccaggagatcaagaccatactggctaacaacatggtgaaactccgtctctgctaaaaatacaaaaaaagtgtcctggcgtggtggcaggcgcctgtagtcccagctactcgggaggccgaggcaggaaaatggcgtgaacccaggaggcagagcttggcagtgagcggagatcgtgccactgcactccaacctgggcgacagaccgagactccgtctaaaaaaaattaaattgaattaaaatttaataaaaatgaaagaacccagataatggaagcaagtatttgcaaaccatgcatcaggcaaggggttcatacaaaaaatgcataaagaactcaaactactgaaaagcaaacatacaaatgatcttattaaaaaaatctaccccaaacctttgtcccccaccattatttccctaccttcttttccaaacggcctttggccccctccctctcaccaccctttttctttcaccatctgcccccaaacttcatcattttttgcccaccctcatttcacaaagccgcctctactctcctgctcaacacccttttccccatccatctacccaaaccctttccccagtttcttcccaccctcttttccccttatccctggccaccctctttttccccgtcccgctctcatcaccctcttttgcccctttatctaagcaaaaacattttcccccgtcttttcccaaaaccttctctccactcctgctgctcactaccctctttccctgcttcatccaaccaaaaactgttttcttcatcgtctttccccgttcctccttgccattctctttcgcttctccatctacccaaaaacatttccctccgtcttttcacaaagccttctccccacggctattcacctccctctttccccctccatctacaccccaaaactttccccaccatcttttcaaagtctcccccctttaccactagtgctcttttttcccctatcctgcttgccaccctttttcccctccctctgccccaaactatttttccgttgttttcccaacccccatccctgctacctgtcgccaccctctttcctcctcattatcctcttcccccctccatctatcaaaacacttttcaccccccgtcttttctttcttcaccatctttcttttctgccactgtcttttcacaaaactttgtcttcctcctgctggctaccctctttttccttctgccacttgctaccctcttttgttcaacccaaaaacttttccccctcactatattttctccccactgtcttttcacaaaaccttctctcccttccccccccttttcccccatcacctccctctctttcctccgcccacctgccaccctcttttccccctccatctacccttaaactttttacccaccgtctttctgcaaaaccttccttccctcccgctccccaccctgtttttacacctccatctacccaaaaacttttttccccaccatcttttcgctgccatctttttgcaatgccttctccggctaagctatccttttttccctttggccctaactaccctcgttactcccctctatctgtcccaaaactgttttccttctcctacctgctccagccgcgctgctctctctccgtcactgccaacaaccgcagcgaggcgagccgcgctcccgcggctccagcctccagcatacggccaccgactcctgattcctagtcctctacgttgggcagtgagcaactccacataaaaatacaggaacttgaaaaaacgtgtttccgcttcagcatcatttatatactgcggtaatgcccacggaggttcctggactgcatgtcttgattggatgagaaaaaaacctccaggcttactctgattggactttatgatcatgttctgattggatgagagcaagtcttaacacaaccaatcacagcatgaaaataaagtccaatcagagtaggcctagaggttttttttctcatccaatcagaacatgtagtccaggaactgcatttgcataacctcatatataaagcatgctgaggtggcgtcaggtcatttcaggctcttctgtgtccagcggaggagcaactctgtgtccagcttagagaactggaagaagccgcaaccttccacctgctggagggtggaggatggatggagcctggagcctgggtcactacctcgctgcggttggtagtggcgatagagcagtaggagagcggtcagcagcaggagcttctcctgccaggctggaggactagaaggaagaggcactgccacatgctggaggctggaacctgtgccaccatggcttgcctcgctgtggttggtggtgacgtcggagactgcagcttagccacagtggtagaaacgtgatggggtaggtgagttttcctggcctgccctgtgtgcctctgggggcaagtgttgggtgtcctattggggttcactgctagaggctaccctgcctgtggcagtggtctggttgggggcactctccggggttgcattgctggtggtggggcaggttgcttggctatctggggctatactgcccgtggtggcaggggtggtgaggggaggcagattgtgtacactagcttgtattgctggtggctggggaaggattaggggcgttatcttctgctgcactgccagcagcagggagtgggttgggtggagttaactggggctacaatgctggcagtgggggtggtttaggggcgttgttgggtgctgcactgtctgtgactggggggtgcaccattaggagctgaactgcccgtggctgggtcagattgtgggcactattgggtggtatgctccctgaggtgtggggggagtgcttttgtggggggatattggggttacattgcctgaaactgtaggatgtattggatgtgctatctgggggctacactgctagtggcagggggcagattaggggtgccatgggggctacactgccagcggcattgacgagctgaggaggtggcagtggcagtgacagcagtggcctccttcttctcatagcttccaagtaagggatggttttcctcttctcggactccagactctagaaggcgattttctccactcgagctggattgcatggtagggcctccacacccactgtggtttcccggcctgccctcatgctttgtgttgcgaagaccacctgggactaccaggcagggagtagtatgcaccatgggggaagtgggagacagggcactgtgggtggaggtgtcaggaatgggaaccagcccttgggtggggagcgctggctgggtctgagtttctcctactcaggctcccggaggagggcagccttggtgggcccagcaattcctggccagctggacttggccaggggccggtttcagtgaaggcactcactcccaccccaggccccagttcctggccagcttttgccaggaggggttggactttggaaggtgggtgtgagtgccttcaatgaaactgatccctgacacccagtcaccagcataacgaggtgaggctctaatggttccaatccctgagtcctgttttcggcttttctggctttgcctgcccagctgctccaagccaggctgaaggaggagaaggaggagtcgcctgtggtacggtggagcagatgacgtggctctgcagcttgcctcatgcagttggtggtggagatggagaccacagctcgactggagcggtaggagggcacccacgggggcctggaggtaggagcctggtagggtgggctggtacgttgagggtgactggttgtattggcattggcgctagtggtggtagcagtaggaagtctgggggctgggaagggggagtaggagcact

SEQ ID NO: 1886846 - DNA, 4001 bp, Homo sapiens; identical to SEQ ID NO: 1243804

SEQ ID NO: 1886847 - DNA, 4001 bp, Homo sapiens
tccccatctctcccaatttccctccatttcacctcttcctaatctttgcctatgattcctcttaaccagtgattttgatttgccagaaaaacaaaaccaaactcaatactggtttaccttttaaaagagcatctttattatttccccaggccgatcacagccctgaacaaaagcatccgatacacatttgtcagtctggtggctttggtgccatgactgcctacacaggctgatgacagccactcggttgtcaccagacgcggtgtgagggaagggggaggggacaggggaactctcagagcaaacaatcacaaacacactgtgaaatcgaaaataaattacaaaaactaaatagtataaataaattaaaatttaagttaagaagagtcccacagtgtggctgtttggcaacaaccagtccatagaagaggtagctgtggaggtcacacgcatgttcccaaggctcaggctcctgctcctccccactgggcccaccgaggtcgctgggcctcgaagcttctggacccctcaggcactcagctccaggtcgctgacatatttctggacccactcctcactggggtcagcacagacctgccggcttcgcttggttaggaagctgtggagaagggaggaagagttaagcactggggaatccagcaggggaatcctgggcccaccatggccccaccattctgctctctgtcctgggcagctcagggcttgctcctctttcaggggccccctgcctatctctgtctagagagcttctctcagtgactcagtaggggtggccctcagagtgtcccgctgcctccttcttcctgtccctttcctctgggctggggcagcccttcctgactctgtaacacatgcctcactccagctccaagtcaggtcacacctcggagccctgcgtcctgtatccccgataggctcctgaaggctgggcctttccaggatagccttctggcctgtctctgccccaaccctgaccctccctacctccatagaggtgagcaggaagactggcacttacatgacaccgggcttggagcactggctgctcgtctcaaagtagtcagctatgaaattctgtggaatctgccgggaggtgtagctgaagcagcaggcggtcggcgtgtcagcagcaactgtggagaaaggaagagaatgagcccgagtcacagctcagaagaaaaggccaggcagcttctgatccccgagcagttgaggaaggcaggcttgctcagaccaagtgactggaaggcatttgggcatttttgctgagaaatgtctctttgtttctgtctgtatccttctttctccttgactcttcatagtgggttctctgtttctctgtgtgatccagatacctgaacggactgttctcttatctcagttctcttcagggaattttgtctggttcaagaagtcataccccaacccaagagaagccttggacatctctcataagacatccaagggacagagctcctgggagacctagagtgagctggagagtgaacaacataccccactgggaagtaagcagccctggattctgcctcttgctaactgattcgtttcgaaccctgtttttctatctgtaaaagggactgtaactcccctgcccctgcctagattctcatacctggagactagggggctaagaccccttctagagataaaaataaaagtcttaaagagaaagaccaagatgtttggcagccctttaagaagttctcttttctcttgggggcttttaggccacaagaaaagattgatgtggtctaaccatggccagagagtggtgatacccacaacgaaactcagactcacgtgatgcagagaactggttgcagagagccatggtgcagaggaggacagcaagggcagcagtggagacctgcatgattctgagcaggtgacggaatgtgggctcgagtgtcagcagagccaagaaaggactgaccactgtctgctgcccgtgtccttctgaagtctgaaaccagctctcctctttataggcagccctggcggatggggaaatggaatctgggggtgaggagggaaatttttaagcgtagtgatgctgtcatgctaagttgcacaactcagggtccctggtgaccacaggggctcaggatatccaagaatagcatctttgagctattctctaactctcagctctcaactcatgacttgttatagtttcatagggaaatggtttctcctgtgagtgtgaagaggggtatatgtcaacccaaggctattcttagtcagtcccttctcataagaactggtctgtgcatgaactctccagccccattccttcccacagagctgcaattctgcttcctcagctgctataaccacagggatagggttgatgggctgatgctgtggagggctgcacaacccttcctcctcccagaggcaaagaactgaatgaaagctggaggaatagaaagcatgaggtcatgtttcagtcatttgtctatttattagtcatgtagtgactagggcgctgtgttaaacgctagttgtggatcataaaaatactttagaggtgggtgtcaatatgtcaggtgcctagaaatatctgtagccattaacctagaaaaagcatttctaggaaagagttctgtggaaacaacccaaatatggagccatcttcaaacataaagatacctgacccagcatcgtttataactctaaaataaacaaagctaaatttttctccatcagggaatgataaattatccactagatcatttattattaagtctctaaaatgaatgaagtggcataaatatgcttataacatcagtggttaaaaaaagcaagatacgacattatacaaattctacaaagtctgaagaattgtacaaatatatatatatatttgtactatatatacatgtatttgtacatatacacatatatatttgtacaaatatatatatattccttgccaaccctaagcatggaaaaaaatacaaaggcttggaaatacatgccttaaagaatgaatagttcttatatttgtgtgataggtccctgggtgatttattttcttatttttttctttttctgaatttttctcattttacttagttagactttattaccttcttggtcagcccacaaatttataaactaatttttaaaaaaacatttccaacatcactggttgaaaaataggttgttgtcagttgtttaatctgaaagaaattattgataaatatgctgaagtttctgttcaatggttttggccaaaatgaagtcttgatttcccatttctttgaaccattttaaggatcctatactatacttacataaatcatgccaaattgaagcagttttttacttattcttttcaatacataatttcagtggtgtggaagggtctctaccttctcagccagattatatgcttttttttcttttccatactttgttattttattctttcacaatcaatcagcatacctcattttataatgagaaatagatttagttggttttaatgatctttgtttctgagatgcccctgatctcgtgggggcaggtagagtgtatgaacaggtaattgtagcatttagccgaaagtgctaggactcctagtagaaaaagaaatgaaagctcagaatcccacgaggggaagaagtgaccttccaccagagggttggggaaggcttcatggaagggatggaactttagttgtgtctggataactgcccgggatttaggcatctatagatgagtgcccagctgaggcagagtcctgagtgtgacattgtgggttcagaggaaagagggggtgcttcagtggagctgcagagcagtgggggtgaatatggatgataaagctaaattgggaccaaaccaggacaggccttgtattccccccaaaggggttagagttgatacatttgatgctggagaataacagaggacagaagccaagtgcgaccatgcctttggaattctgtcct

SEQ ID NO: 1886848 - DNA, 4001 bp, Homo sapiens; identical to SEQ ID NO: 1243813

SEQ ID NO: 1886849 - DNA, 4001 bp, Homo sapiens; identical to SEQ ID NO: 1243814

SEQ ID NO: 1886850 - DNA, 4001 bp, Homo sapiens; identical to SEQ ID NO: 1243815

SEQ ID NO: 1886851 - DNA, 4001 bp, Homo sapiens; identical to SEQ ID NO: 1243816

SEQ ID NO: 1886852 - DNA, 4001 bp, Homo sapiens; identical to SEQ ID NO: 1243830

SEQ ID NO: 1886853 - DNA, 4001 bp, Homo sapiens
ccttctttttagcaagtgtatgaactcacagtgcttttctatgaataaaccatggatcacatgaaaaatcatttttcttaaagaaaaaaaattccctaaacccagaggggaccagcaaatacttaacaggagattagagatttcctgtgagtgcatatggtgcggggtgacctgattctgtgaagcaaatgttattgtcctccttaaattcatgtgttgaattctaattctatgtgatggtatttggaggtggggccttggcaggtgattcagttcatgaaggcagggacctcatgaatggaattggtgccccttcaaagggactgcagagagctccctcatcccttctgtcatgtaaagacacagtaaaaaaggtggctgtctatgaaccaggaagtcagccccacggaatccgctgacaatttgaccttggattttaccatctccagaactgtgagaaatcaattttctacgctacctagtctatggcattctgttttgacacccagattagctaaagtagcagcatatcaacttgcacacataattcttggaaactctgatgccaaatccttgatggcaaaaggtgaatgatctgccggagacatgagcctacatcatccctctttccacagtaaaccagagagtcaaaacaggcaagagtaggtcaaggtcttctaaaagccatacctgaaaggtttccaataacagatgactcgatggtaattcagccacacaaacaaccacaacaaaagacacaactatcagagattttcaggatagcctcaaaaacaccatctaacattagggagttcaaaaaggcatgaagtttcagaaatcaaactttattgtaatctcgtttcatcaacttgtaattctaacactattaataaatggtagggcaggtggtggcatggagagcctggggcacaacggctgtcgttaaaagctttgtttgctttaccctttggagccacctcctggtcccctcacccactgcccgcctgttaagggcctgtcccgggcagcacattaggggcaaacagcctggatgcccagctgtggacccgcatccatgcctggaggaggaggttgcctctgggagcaggcgtagctgctggaactcttcctcccagccttcttttaatgctctccggcacctcctgcacacagataaaccaagatcaggagaataaacggacctgcagcagcaggactgtggttctagtgaatgagagaagcctctctgcagcgaggtacaggaggccaggccaaatgccctgctctctgcctgcatgtttgccaccgtgcccaggactaggggcagcatgggagctgctggctggggctgtgctggtcaccccctccctcccacttttctctccagccacgctttcagttccagggttagggccagtggctacagtacgtgccgtgatttcaggcagctcctcattggtctggtccttggctggagctccctccagctccagtgctctctctggaggggcctcttcccatgctggctctggctccgccgctggtgctggcagtgctcttacttctgcacatggaccaggagctgagaaaggagaaagggtcaccagcatcagtcactttccactggaatttccaaacacagaaacgacctcactgaatttaagggaattccagcccaaaagcaccgcccctgcaaagtcttccaggctgcaggccacctcaccacgtgtctgtgcctcaatgagctcctgaatctcctggacaaggacagtgtgcagctgcagccccaatgggatctctggtgtggcctggcctgctagggcctgccccaggctgtcctgtggtacctggatgcgccttattacaacgggcgacaggcgtctggggtgagggatgagccttcttcggcatcgtcagaaaaggctctcactccctccgttcctgaagcagcaacctctcaaagtggagaagcaacacgagaacatcttgctctcttgagcgtctcccaccaagtgagctgtttacggcgctgactctaggatatgggtgcctggttaccagagttctaagttctgttcgtgtggtcatcatccaggaagtgacgtcgcttctttacggttctgttccctagaccccttccttccataagacctactccaggactccactgggctgctgactactcaccctccccccacgtcaactccttacctgtacactgttatgtccacccaaggtctgcttggacacctgtgcctgatgttcaccaggggccggatgtcctcaggcctgatgtccacctagggcctgatgtctgcgttgggcctatgtccctctgggggccttgtgttcacctggggactgtatccaactgaggcctgatggcctactgggtcttgttgttcacctaaggccttgtgtccacctggggcctgggtgtccacctgaggccggatgtgcacctaaggcctgagttttcacctgggcctgatgatcacctggggacttgggtctaatgtctacctggagccttgggtctaatgtctacctggagccttgggtctaatgtccacccggagcctacgtatctacctaaggcatgatgtctacctgcggcctgatgtcctcatgagtctggtgttcaacatgggcctgctgtccacctagggccttggtgtccatctggggcctggttgtcaacttggggcctggtatacactttgagtccagggtccacctggggactgacgtctgcctggaggactgacgtcctcctgagtgaggtgggaggatctctggagctcaagaggttgagaccacagtgagctgtgattgtgccactgccctccagtctgggtgacagagtgagaccctgtctcaaacaaataaacaaaaaagccacacaaattatatagctatacaaaaatattttgtttctttttaaccttattctatgagcttttttcattatttatttattttacttttaaaccgtttgttgttaaaaaacaagacacaaccagacactttcgcctaaggctaagcagggtcaggatcatcaatttcactgtcctctacctccacatcttgtcccaccggaaggtcttcaggggcagtaacaggcatggagctgtcatctccttgataagaatgccttcttctggaaacctcctgaagaaactgcctgaggctgcttcacagttaccttaaaaaaaagtagtaagcatatactctaaaataacaataaaaaatataggatattaaatacataaaacaataacatcagcatctattattttcatcaagcattatgcactgtcgataatcgtatgttcacacccacatcaccacaaacatgtaagctctgtggtgtccaatgaatctgcctttctttacctacaactgtcttggtaaattcttttaccacccatcccactgtcccagagagtcgctgctcccctacgacactgagtaaggaggagatacagctgacaccacccggaaatattccctgaggccaagctcaggccacagattatggtgaagcctccaacttccacactgtaagccaccaggggcctggtgacccctgtgacgaggccacagggagcatctatggatcaggcacctacagaggccccagggtataccccagcacactggaggcccctccccacacccacaaccccaggcatgtatacaggatccacactcctgcccacaaacaccaggtaatgcatgaggggaagggaggctgccttgagactaagcactgcctcactacctaaaagcactctgtcatcatgagggtgaaccagagattgcctggactggccgtttaatccatcactttggcccttgagttactaacattgttgcaactgtccaaagttactaactttgggttttctgcccacctaactgccggaagctaagatggcaacatcagtatcagtcaaataaagcaacacgcgttaacttagtgaccactacacaagctc

SEQ ID NO: 1886854 - DNA, 4001 bp, Homo sapiens
agtgctttctatgaataaaccatggatcacatgaaagagcatttttcttaaagaaaacaaaaattgtctaaatttttgtttagacaattctgtttagacaatccccagaggggaccagcaaatacttaatagaagattatagatttcctgtgagtgcatatggctcggggtgacctgattctataaagcaaatgttattgtcctcctcaaattcatgcattggattctatgtgatggtatttgggggtggggccttggaaggtgattcagttcatgaaggcagggacctcatgaatggaattggtgtccctatcaaagggactgcagagagctccctcaccccttctgtcatgtaaagacacagtaaaaagatggctgtctatgaaccaggaagccagccctctgcagacacggaatctgctgaccatttgaccttggattttaccatctccagaactgtgagaaatcaattttctatgctacacctagtctatggcattctgttttgacacccagattagctaaagtaccagcatgtcaatttgcacacataattcttggaaactctgatgccaaatccttgatggcaaaaggtgattgatctgccggagacatgagcctacatcatccctctttccacaataaaccagagagtcaaaacaggcaagagtgggtcaaggtcttctaaaagccatacctgaaaagtttccaataacagatgactcgatggtaattcagccacacaaacaaccacaacaaaagacacaactatccgagattttcaggatagcctcaaaaacaccatctaacattagggagttcaaaaaggtgagaagtttcagaaatcaaactttatttatatttcatttcataaacttgtaattctaacactattaataaatgctagggcaggtggtggcatggagagcctggagcacaacagctgtctttaaaagctttccttgctgtaccctttggagccacctcctggtcccctcaacccctgcccacctgttaagagcccgttcggggcagcacattagggggcaaacagcctggatgcccagttgcagacacacatccatgcctggaggagaagattgcgtctgagagcaggaggagctgctggaactcttcttcccagccttgttttaatgctcttgagcaccacctgcacagagatataccccaccagcattagcacaataaacaggccctgcagcagcagggctgtggttctagtgaatgagagaagcctctctccagcgaggtacaggagtccagtctgaatgccctggtctccgcctccatgtttgccaccatgcccaggactaggggcagcatgggatctgctggctggggctgtgcttgtcaccccctccctcccacttctctctccagccacgttttcagctccagcattaaggccagtggctacagtaggtgccatgatttcaggcagctcctggctgggctggtccttggctggagctccctccacctccagcgctctctctggagggggctcttcccatgctggctttggctcgacagccggtgccgcaagtgctgctatgtctgcgtatggaccaggagctgaaaaaggagaaagggtcaccagcatcagtcactttccactggaatttccaaacacagagacaacctcactgaattcaaaggaattccaccccaaaagcactgcccccgcaaagtcttccaggctgcagccacctcaccatgtgtctgtgcctccatgggctcccgaatctcctcctggacaaggacaatgtacagaggcagccccgatgggatctatggtgtggcctggccagctagggcctgccccgggctgtcctgtggtacctgggtgcgccttcttacaaagggccacaggcgtctggggtgagggatgagccttcttcggcattgtcggaaaaggctctcactccctccattcctgaagcagcaacctctcgaagtggggaagcaacacgagaacatcttgctctcttgagcgtctcccacaaagtgagctggttacagcgctgactctaggatatgggtgcctggttaccagagttctaagttctgttcgtgtgtgtcatcatcgaggaagtgaggtcgcttctttacggttctgtcccctaggccccttccttccataagacctactcaggactccactgggctgctgactactcaccctcccctcaggtcatctcctgacccgtacacagttatgtccacccagggtctgcttggacacctgtgcctgatgttcaccaggggccagatgtcgtcctcaggcctgatgtccacctagggcctgatgactgccttggcctatgtccctctgggggccttgtgttcacctggggactgtatccagctggggcctgatggcctactgggtcttgttgttcacctaaggccttgtgtccacctggggactggtgatcacctggggcctgggtgtccacctgaggccagaggtgcacctaaggcctgagttttcacctgggcctgatgatcacctggggactgggtgtgtgccttgggtcttttcccttttcctgaacagggcttgcagtttccaaaccagacacaatctcccagttggagaaagaaaaaggatcctagatgatagtgagacaaatttcaggaaactccatccaaataagtaaatgagaatgaggacaggattcattgtaagtaacattctcaggtggtgttccaaagttatcttttgcctgggtacagtggctcacacctgtaatcccagctctttgggagcccaaggtgggaggatcactagaggctaacagtttgagaccagcttgggcaatggagtgagacccccattctgaaaaaaaaaattaaaaaatttaacaggcatggtggcatgtgcctgcagtcccagctactcaagaggctgaggtgggaggatcgcttgaactcaggagttgaaggctgcagtgggtgaggatcacaacactgaattccagctgaggtgacagaatgagaccctgtctctctaaaaaacaagcaagcaaacaaaccaaaaaccacagacaaaccagacccctcttagcagaatacttccatgaggtaataaaaggtatgtaccaaatgcctacaacaaacatatgtcatgatgaaatgttaaatgcttcccatggaattaggttcaggacaaggttccatccaccatcgcatttgaattccacattgcacagtgtaaacgggcctgcccaaggtcataacattgcacactgggtaagtcaagagaacccagtacagcactttagatccttcattatagttttgttctaaaactgctcctgttatcttttggacatgagtctcttaagtattatcatttgaattcacgtatactagttcattttcacactgctctaaagaatacctgagactgggtgatatataagcaaaagaggtttaattggctcacagttctgcatggctacgaaggcctcaggaaacttacaatcatgatggaaggcaaaggggaagcaggcaatttcttcacaaggcagcaggagagaggggagagcaggggaaactgccacttatgaatccatcagacctcatgaaaactcacttactatcatgagaagagcatgaggcaaaccacccccatgatccaatcacctcccaccaggtccctcccttgacacatggggattaaaattcaagatgagatttggttggggacacagagccaaaccatatcattctgacactggtccctcccaaatctcatgcccttttcacatttcaaaaccaattatgtcttcccaacagtcccccaaagtcttaactcattccagcattaacccaaaagtccaagttcaaagtctcatctgagacaaggcaagtcccttccacttacgagcctgtaaaatcaaaagcaagttagtgacttccaagatgcaatgcgggtacaggcattgggtaaatgttcccattccaaacgggag

SEQ ID NO: 1886855 - DNA, 4001 bp, Homo sapiens
ccactggactctggaatcgatgaaacaaataaaccaccagatatatgcaaaatccagagagcggatgagaagagagcaacaacaatgaaacatatatgaatagagaagcagacaagtgagaacggggtgcttcagagatggacagagtaacttccattcctgattttctggtttctcttactccaatttcatatgagacctggctgcattttatgccttaggttctgtgagttagccctgtattttttttattaaatacatttagctttttttggcgaaaaaagtctgtttcttgtgataatattggagtaagacaatcataagggggagggatttgaattgggaattgctggaaacgagatttcaatatgggaagatgaaaggatcttggaattcaaggcaaggagaacatcacacacaaaggtgctgaaacacatacttgttggacatatttggcggatgatgaatgagccagcttggtcaacatgggttgaacagaaagcaaaataacaggataaatgcttgtaagactgacgggaaaactttgattaatcgatggagctggcctggattttaaaaatctgtttattctttttaggaattcccaaaggctatagaagacagagaataagggtaaaaaacagtaaaagttggctgttggaagaagtgaaaaaataaaaatagggcaatggtgtcttacatgcagcagggtaataagagatgaatgaaaatcggcagtgaaataaaaggaatcagtggggtactagcagggaatttgggcttcctgctgagtgatagaggggaataggctgtttcttaggcataacattacatttgccacatgtggctgcacaggctgggccctgccggctccaaggaaggactcccccttacaaagacttcaaagtgaatcgtgcccctgggcttctgcaataggggtggccttgctcctaagtcataactctgtgtatccccacaacatctttcaattgatggccataaaaatcccaattcaaactggttttaaaacagggactttattggctcatttaactgaagagtgaagaggcatacgggctttgggggtggattcagaagtccacaccctcagcgctctgactccagacctctttgatcctttcagagcatctcttctctgtgtgtcaactctgtcctctggttaggtcctttgatggccaaaatggctttagtagtctcacatccaatttctttataactctccctacacaaaagaatagactcttcttccatggtttctccaaaccctgattaaatatctcctcacgtctcatggacctaaattaggtcttgttcatccaggtagtgtacagatgaatgtctagcaatgctctctccctgtctgtctctctcaaaaaagaaaaagaggtaaaaatgaaaaaaaaaaaaaaaaaaaaaaaccctgacatgcagcgtttgatttttatggcataaactctctcaccatggctgatttcaaactaccaatgcgatgtccctggacccagcgtgcggtagaggggcctgcagtggactctctgaagcccctgggagctggctccagcagtcggctaggtctgtccctgaaccaattcctgtgaataggtagataagccctgctgattggcttaggaaaatcaaaggtggctgatgaagcttgttggggttagttccattcttccacatgtaaggtagggatggagaaagtggataacagttggccaattgtgaaatgtctggtactgttgaagtgaatgcaggaagatgaggaagaaaggtaaactattagagagaggaaggcagataatggagtgagatgtggaaaaggagtcaaagataatgattgggtggcttacccagagcacgaagcatgggggacaatgaagaggagcgaagttaaggagtaaggagagattgactacagtattcatctttgcactaaactattcatccaagctctctacagtttggccccagttcattttccacgtctatttgggaggccgtatagtgtcatggggactagtctcatgatcttggctgagtttgggaagcaattctgaacctctgctctcctcagagcttcatgggggtgttgtgaagattaactcagcctacgagaaggtgtagggcataatggccatgaatgaagtctctggggctgggctgcctcactcaaactccagttccagcagttattgtctatgggaccttgggcaagttgattaaaatctgcaccccaggttttgcatctgtaaaatggagactaccatagtatttttctctaaggttgttatgagaatcatatgagttacttatagcttatagagttaaagtgattatatatatatatatataatttacttataacttacagagttaaagtggttttatatatatattacataatttacttataacttatagagttaaagtggttatatatctattatataatttacttataacttatagagttaaagtggttatatatatatataaagtggttattataacttatagaggtaaagtggttattacaaaaagtacctggaaaatgacaagtactgttcagaagtgacagcaatagttgtgtatttagcagaatgttaggcaaataggagatactagatagtcattagctacacttattattatgaccacctgctactgccttagccagtattttgttttgtttttagaaacgaagtctcactctgtcacctaggctggagtgcggtggtgcaatcactgctcactgcaaccttgcattcctggactcagggtgtcctctcccctcagcctcctgagtagccaggactacagatctgcaacaccttgcgtgatacccagattttatgctctagccaatgttcacatttcctgctgttcactagaaaaatgattgcaggactgagtgggaaatgcagaccacatccatacatttcttcttctaaactctcaaacactgtgtttgtagctctgtgggcactatttcagctgcacagttttgttttctgtggactttcctcatttgctcacattcttgaagtgagagggtggcttggccactgtgggcagggtttaaatcatattggctttattgtgtcaccaaggagctcctggatcactaagaaagagtacatatgctgatttcaatgcattaaactcattttaacataatctaagatatcttgttcgtgggtcttggatcttggctttttctactgttatataggagaaaagaatgggcttgtgtatcaggcagggtcccagcagggggcagaattcaccccaggtgcttcaaatgcacctattaatgcataaaagcctaatgcattaataggttttaatacagggatgaactaaagagtggcagggctaaggaaaccaaccaagggtgacaaggcacccagagaatagtaacagtgggaagtgttacttccctaagtgatgaagcaggacactgtgttttcagagcccagggaaggtggagtcccggagcaggagccaccaagttagagctgttgtcaccgtgacgcccagcttctctaagaaacatggacctaaggtagggaggggagaagagtaaaggcttgccttgcctgctcctttttctcacactcagatcttctgccagggccacccattggctgaactcaaccaggaacctgccatcaaggaagcctgggggactcagtcctcagaggtcagcctgctggggcaggggacaggaccgagaatagagaatggataacatgaattttaaaaatatattttctatgttactgtatatccaaaagagtatcatttcaacatgtcaatgatataaaaattatgatgttgatgatttgcattcttctttttttgtactaagtcttcaaatctagtgtgtattttattctcctagtgtatttgaattcagaccagccacatttctggggcttaatagccatctgtgtccaggggctattaccttggaa

SEQ ID NO: 1886856 - DNA, 4001 bp, Homo sapiens
caccatgcctggctaattttttctatttttagtagagacagggtttcaccatgttaggcaggctggtctcgaactcctggcctcaagttgatccacctgcctcagcctcccaatgtgctgggatcacaggtgagagccaccgcacctggccccaagtggaaattaaaacagcactgtattagcagtgaagccaggctcaataatctcccaggctgctgtcccacccattgcccctctgcaggcactcacctttccaagtcactttgatggcttctttctgcgagtttctacaaccttcagatccagctttctccagccacaggagtgtcctcaacctgtgcacagggcgggctagaaggaccagggggtgaccccctacagaagcagcctgcaaccaatcatgaatgagcattagtgccagatgcttcagctttgcatccatcaggcatgaggtgcatctacatgccctggcagaagtcccgatgggagggagcaccagtgctctctgacatagcctgctgtgggcacacctgaattggctttctcccctttcctgcccattctcacttcctccacccctcctggtgcttcccagatccccctccaaaatgaaccccttgcacttgaatccttatctcctcatggggggacaaacttaagacaccaggccttgaagtctttcctcctatttgcttttcatccttttgcaaatttatacaggtcagagaagcaagtattcatccagggaagcttatcattttcggaagtgtttagaaatgataaaaaatgaatcaaaataaataggagtaaattttattttttaaaaagcacctaatgataaatatgatccatttaatcttaggagacaaattaataacaaaacttttctttataattaagtgatgaggccttcaacggacacactatcaagaagctcaggatgtcctttttgaggcctcctcctgctctccaaactcttcatgattgtgcaaaaacgccgagcagagagagaaatggaaattgtgaccagtctcctaagacgtcccaggttgggtttgctattggtctcattagtgccactgaaactaggtttttaaatcttgtctgccttgatggaagcatccatgcccttggtgactcagttcccagcatcgacttcaggctcagctttgggacccatgtacccaaccatgaggggccactcaggtgttgcgggaagagtcacaagcatcatccaagaagactgtctgcagttgcccaggccaaggtgaaactggaagcatcttttgataaatatacaatgtaccatctcactcagtccctgctagataggccaacgaatgctttgaaaaactcctggaaggataaacatcaaaatgtttatgttgttgtgtctgcattgtgaaattggggttaatttttattttttctttctgtttctatattttctgaatatcttctgtgaaaatgtattacttttgccaccatattttttcaatgctatcaattttttttaaagaaattgccactggtgttcactcagtcatttaacaaatatgtgccaggcatatcctaggcactaagaatgcataaatgaacacataaaacacctcctttcatgggtgttacacactagtgagggaaacagatgttacataagtcagcaaatatgtacagaatataaagtcaggtctcggtgaatgttggaggaacagcaaagcaggacgagccataggtgacccaggtagatcatgtgcaaatggaacctatctcagttcaagctgctattacaaagtaaaacagatgggtggattataaacagtagaaacttatatctcacaattctgggggctggaagtctaaggtcagtctaaggtacaggcatggtcaggttccatgagggttctctccctagtttccagatggctgacttcttatatcctcacttggtggaaagagggcgagagagggatctctccaggatctcttttatgagggcactaatcccgtttatgagggctccactgtcatgacctaatcacctcccaaaggccccacatcacaataccattatattgagggttaggatttcaacatatgagtttgcgtgggagcaggaggaagagtatacattcagtccataaatgagaaaccatccagaaattatccattacaaaggagttactgtatccttcattttttgcatgaaaattatacaaactgttggaaaacaattcatctttatcttgcatttcagattaaaattgtactatttaccttctatataaaatgatctaaaacaagatcaatttatctgttagaagtaactttaaaagtttttttaaactaaattcaggttttatatgtgtcatctttcccagttctgttgatttttccctctttactcactctctggacttctacttttcaaaaccacctacaaatgcccctccactgtatagcaacaggctccacaatcagtgcaaaatgccatgatcaccgtgacttgcccagccacccaccttcattcttcacagcctaagagtcaaggaagtgatgagtcacccttcatcatgaatgcctcggctaggtaggcccgcacaggcttcagtgtttaggacccagagttatccctttacagcatgttgaggaagagttgctgaagttcatctgccttttgcagcctgcacaccactgttgaatgttatttcatgaaagaaggatacccaaaactcaccaagccataagaattcacaaccgcatttacccccatcctttggaaacggcgggatcaattattttctttctaagtcctcttggccatttccaaatgaatgtagggtgtcccaggggttcccttgtgggcccattcagtgtggccaagagccccacagtccgcacgtacacaacagttctcagtgatgctgcagagcaggacaaagaaggacagagctaggtaagaagccaaagagaaaaggctgccaactggagaggctcttaaagagacaccataggagattttaaaaattactgtatataaaagagttcaggtggtggaactggaatagttgctataaaacagttgttctaaaactctcaaagaaaacactgctagaatttaacagaaagcttctgcgttctgcagttgaaaactctaactgtggcacgggtgaaatcactctcatttggcctggagaagtgggtgtggaaaatggcaccccgaggcaatcaaagagacagacttgtgtttcctctgctgagtcaaagaaaagctgagcactgaggatggccaggcttcacatagccaaagcccagagccaggaggataaaagacttttgagcaaacacatgccaccaagtccatgcactgaatctggacccatttattcttgagtgccctacttatttttttaattcttaataagattgattatctggtgttttgacccatatagtagattacaagaggcgaataagaaaatgggtcgggggtcgggcacgggggctcacacctgtaatcccagggctctgggaggctgaggtgggtggatcacgaggtcaggagttcaagaccagcctgaccaacatggtgaaaccccatctctactaaaaatacaaaaaattagccaggcatggtggtgcatgcctgtaatcccaggtactcgggaggctgaggcaagagaattgcttgaacctgggaggcagaggttgcagtgagccgagattgcaccattgcactccagcccaggcaacaagagtgaaactccgtctcaaaaaaaaaaaaaaaaggaaagaaagaaaatgggtcagggatgctgttgggtcagaagcaggaacactgatttttaaaaagactacacgtacaataaaagtgacaggtatgtgtaagagaaaagattaacaattttacaacagccaacaagaacctcccaagcaaaacagagcaagttttttgttttttgttttttgggtttttttttttgaggcggagtctcgctctg

SEQ ID NO: 1886857 - DNA, 4001 bp, Homo sapiens; identical to SEQ ID NO: 1243850

SEQ ID NO: 1886858 - DNA, 4001 bp, Homo sapiens
ctgccaaggtgaaaaacactaagttttataaatcacagaagctatgactcttcaagatgcttaggtgagtaatgccttatggcatggtgaaaataacaccctcacaggtttcagggactcaggtcttggttctggcactcaacagctaggtaactttgatcagattacttaaaactctctgggccttaatgtgccagacttagagaggataacttttgctctaggtttaaacaacaagtgtttataaaagcacatggaaaattataaagagttcaaaaacttttaacgtagtacttaatgctattttcctctttatggagtgtcctttccctttcttttatgctgtaaaaatcttttttttttttttttttttttactttcagatctagggtacatgggcacaacgtgcaggtttgttacatatgtatacatgtgccatgttggtgtgctgtacccattaactcgtcatttacattaggtatatctcctaatgctatccctcccccctccccccatcccacgacaggccccagtgtgtgtgatgttccccttcctgtgtccaagtgttctcattgtgtatgctgtaaaaatcttactgttccttccagagcaccaagtttagatctctgaagctttccttaaaccaactgcacagaaatgttacctcatcagggtttctgcagcactttgtatactacccctatcacactgatagtgacaatcgacaacctcttgtcccctcattggtctagtgttaagctcctacagaatcgggtggggggggtgtcttaatctcttcagcgtcccctgtgcctagcaatgttagttgaggtgaaccaaaacggctatcctctcatcattgaaaacacagaaaaaaatggcctttttagaacccaattacctattttttctcttctttttcaaaagcggaatcttttcttcaatctactttttacttgtggaaccccaatctgaaaagaagatcgaggggttgggggatgctgagatctaccctggtaatcacaacacttatgataacacaggtaataatctattagtgcctgtacctagtaggtgtctggctacccatgaaacacatttatctaattctctcaacctcttataaaagatgtaccattactactccattgtattgctagataactgaggttcagaggacttaggtaatttgctccaacaaggtcaaaaggccagaactagaatacggatttcactccagaccaccaaatctgaacctctacatgcaatctggagatatctggatgattcagttcctttagtgtggctcagaaacaagtaacccggagttcctctgggctcccatttgatagagactacggtaaagtgtaattgattagacgtggaggtggaagcatccccacgagaaccatttcctcatgatgctcctgtcaccgggaagtgttctaattttaactttatttttattttaaaatttatttttagagacagggtctcactgtgtcgcccagactgcagtgcagtggcgcaatcaccgcaacctcgacctcccaggctcaagcgatcctcccgcctcagcctcctgagtagctgagaccacaggcacgcgccaccacacctggctaattttacattttttgtagaggcggggtctcgctttgttgcccaggctggtctcgagttcccaggatcaagcgatcctcccgcctcggtctccctaagcactgggattgcaggcgtgagccacagcgcccggccgctgtaactttaaattgcccgggaggactctgcagcccaaccctgcccacctcacccggtcaccggaggatgcctgtcaacttctgggagctgcaagcgcgggccggccagtcgtccgcgcgcggctttttcttcaggacagcggaggcacaccgtgctttgcggttcccggaagtccttcaggcctcagacctgtcagcccgccacactccagccagtcccttccgatcacctccagacaccacgctctcctttcggagcccgcccgccggaagtggcggcccggaactactcccacaggggggcggggaaggaagatggcggcgcccagcgtcccgtgaggagagaggacacagggatcccggggagcggccccagactcgtaaattatggccgcatctccgcacactctctcctcacgcctcctgacaggtactgtacccgccttgggcacgaccttgggggaaattcttctcttattaccacgtgcgaggccgtggttccggctggctgcaaccttggggagcccttggcgaggttggccggccaccggtgtggtgggggaaatgacctctggagtagcttggagtgaagaggtcacggagctagggtccagtcttgcactgtggctttagtggtccacacagcctcctccatccggcttctgcggaagagcggtgtcttcctgcttctttaggttttcagatagtggaagctggaggagagggcagagcagaaccttggggttccacagtcctccttatcagagcctcggcttctagccactggcttgcaatgacaaggaaggtgctttgcttccactcagaagccttgttccaatataaagggtcatgatgacaacgttgatgataatgacagttgcagacagcggagtgtagtccccatcagacttttgtctctgtaccgccagagtggtctttaatatcctttcactcgaagaaactagtgacaaatgtatattggagctggaatgttcttccttgactcttggtaatggctcatctcaaatgtcaccttttcagagaggcctttatagagaccaccctatataaactagggccccctacttctttcttttcacatcattccatttatttctttcattatggttagcacagtctatacttgtttatttatatactcgtttattatttgtttttcccaactagaatataaaccttgtgatggcagggacagtgtccatctctggtttacctctgtgtttccagtgcccagaacagtacttagtgtacattgtttgctcccaatagttatttgtggatggatgcaatttgtccccatggagatcttaaagaggacgttagatgattaactaatggttgtgtgaggaatgtgatgccggtggtgcatattagaggccagataagagaagccagggactgccttttgatcacatcccagaaacttttttcacttgtcacctaccacacacaagctctctgcaccatctggtgatgttgacactgtgactccatgaaattgcgttcttcgttctttttcataatgttattttatggctgtcttctggtctgtgtgattccagggcaattcatttgacttttctggaattgagtttactcatctataaaatgacgtaattgaagtaggtgatctcaaaggtcctgtttggtttgtaaagtggagaggtagaatagattggctagggtctggtaattgttgaagcttggggataagtaatgggggctcatggtactcttctgcttttacacatggctgtgattttccataatgaaaagttgttgtttgttgttttttaaagtcctgtgattcttttttgaatcacttctttgttacattctaccatacctgactgtgaatgttctttgatcctgatcctgggcactcattctcagagaactcatccttttatgttgcttcaaatatcttctctgtatggaggtttttccagcatgcatccttcagattagctgtttttctgcctttccattctatattgtcagctataggacaattctgcttgactactgtgaattgcccagttccagtaggtgggctgcatgtggcccatatggtttgttgctgcatcagtctttgcagtggtggtatggaaggaattaatagacagcttactccctgaagctgtgaacataattgccaaaaactctgctagtaagtggtctgtataactccctgtgatccatttggaagatctactaaga

SEQ ID NO: 1886859 - DNA, 4001 bp, Homo sapiens; identical to SEQ ID NO: 1243883

SEQ ID NO: 1886860 - DNA, 4001 bp, Homo sapiens
ctcccaagtagctgggactacaggcgtgcaccaccacacctggctaatttttgtatttttagtagatagtttcaccatgttggccgggctggtctcgaactgctgacctcaagtgatccacccaccttggtctcccaaaatgctgggattacaggtgtgagccaccatgtctggccaatatccactatttttagtaaatgatagccatgattactgctgccaccttcattattgacactcaaatgtcctctgctctgagtgcttattttgcctttctcttctaggatatccctgttttctgggtctctcctggtgtccagccattaccacaggcacagagatggattcctctacacttgggaaaccccaaggctgaccccagccagggatgcatgtgggttacttgggaatggagcagcagcaccacctagtggcaatgtgcagcagcatgctaattactggccaaatgcaggagcttgtctaatagctactacatcaggacaccttggaagtcacctactccagcggttcgtccagcacttgtgtggccacagcatcctcctagagagggcttcccatgccatgcactagaacaaaagaggatgtggagaatgaaagacaaaataggagaaaacttctcagtgtaatgctcctcagggaccacagggtagtaaaaaaaagtttaaaaagcatctccaccagatctagagacaggaagtaggtcagtggttagtggttgcccagtgctgcggaggacaggggaaatgaggagtgactgctaaagggtacagggtttcttttcagggtgatagaaatgttttaaaagtggccaggcgcagtgattcacgcctgtaatctcagcactttgggaggccaaggcgggcagatcgcttgaggtcaggagttcaaggccagcctggccaacatagtgcatccccgtctctactactcatacaaaaattagccagatgtggtggtgcacgcctgtaatcccagctactcgggcagctgaggcacgagaatcgcttgaacccaggaggcagaggttgcagtgagctgagattgtgccactgcactccagcctgggtgacagagtgaaactctgtctcaataataataataataataatgataatgataataataataataataatgctgatgagtttgtggccagcactgctgttcatacttggacaagatatctccagggaaacaccggagcaagacattcaaaggtaggagacacttaatcctcataactctatgaggcaggtatcagtatccccatttaacagttaagcaaactgaggctccgagatacagaggctaagagtcagtggcctgaggctagcagccagtgagggacatggcagggatgcaaacatggctttcagagacccaagtctttccttaaaactactgtactgaaaagtgctccccacttatacttactttgactcaccagctccagtgtcacagtgtgggaaaggctgtagtgggtgtgccgtgaaaaggcaaggcgtactgccagggcctaaggctgggacagcacatctcagtttgtcttccataaacacaccctaggagtttcaatagaaactctgctaaaattgatgaggaaagagatttcaagaagttcaatacattcagaagcacatgactatcctctcctccttccaaagcaagttctttatcgtctgagcaatcaataagtgtttaacgaggcctggcactgtattaggtaagctgtagcataaatacaaaagtgtaagacacagtccctgcccatttgaggcgtacaatctaaatatttctcagaggccgggtgcggtggctcacacctgtaatcccaacactttgggaggccgaggcaggcggatcatgaggtcaggagttcaagaccaacctggccaacgtggtgaaaccctgtctctactaaagatacaaaaattcgccgggcgtggtggagggcgcctgtaatcccagctactcaggagcttgaggcaggagaatcgcttgaacccaggaggcagagatcacaccattgcactccagcctgggcaacaagagcaagactctgtttcaaaaaaataacataacataacataacataacataacataacataacataacataacataaataacataaataacataaataaaataaaataaaataaaataaaacaaatatttctcagaaattactccatggttaaaaagcaaatctggacttagttgccagtattgcaatgaacattctttaaattcaatattttgaagaaaaacatgataccacacatttatcatggaatgaaattttttcctagtaatataaacttcattgttatgaataaataaggtttgcttcagttaaaattcacctgacatggccctcctgtataattttttatttaattttatttttaaaattttatttaaaatttattatattaaatttgggacaggttcttgccatgttgcccaggctgatctcaaactctgggctcaagcgactctcccaccttggcctcccaaagtgctgggattacaggcatgagccactgtgcctggccaatcttctataattcgaataaatatttcttgaaaaagtagttttagaaggttaaataggccaggcgtggtggctcacgcctataatcccagcactttgggaggccgaggcaggtgaatcacttgaggtcaggaattaaagaccagcctggccaacatgatgaaaccctgtctctactaaaaatacaaaatttagctgggcgtggtggcgggcgcctatagtcccagctactcaggaggctgaggcaggagaatcgcttgaacccgggaggcagaggttgctgtgagccaagatcacgccactgtactctagccagggtgatagagcaagactccatctcaaaaagaaaaaaaaaaagaagaaaaagtttaaatagaagtgcttaggtactaatatggccaacaattgtctggacaaacgagctctaggctacttagtgaacctcctctccgggatatttttattaatatttggagaacaacataaaacacatttccaagtggttcatgagatgccatggccatccaaaagagggaggcaatgcgccggagcttggtcttgacaagagatattttccatagcaaaatttaccactaactcgagggcaataccaggtgggctgggaatctcacatctcccaaattagcctcttgattctgtcacaaactttcagaactcaaaggcttgtggttctgggaatggaaactaaccaaacatcatctggactgagacagccaaacctggagacagcgccatcccaaaagtgaaccgtctgcttcatgggaagaacatttatctcagagcagggagggatgtagcagctgcagtcgcaggggaccgagacccaagacggtgatgcccagagcacaaacacgaccctccactggcctgtggggctctgggaaagagcttcggcctcacactgggtcacctccccacagggtccccatctggcaaataagggaaggaactagcataaggaaaaggctggataccttcctagtgttatgaagtattgatatgccagtgaaaaagctcacggatgtctttaaataaagcgtcttacatcaggaactctgggctacaatatagtttcagggaaaagttccaatctgagcctctttgcacctgcaataagcaaataccttttctttcctgaggatcatttgcttaaagcactgaagagtgagctgctagctgcagcagtggtggtaaagaatgacgatttctcggtagcgcagtggctcatgcctgtaatcccagcattttggaaggctgaggtgggtggatcccttgagctcaggagttacagaccagcctgggcaacatggcaagaccctgtctccacaaaaaatacaaaaattagccaggtgtggtggtgcacacccatagtctcagctactcagggggctgaggtgggag

SEQ ID NO: 1886861 - DNA, 4001 bp, Homo sapiens; identical to SEQ ID NO: 1243889

SEQ ID NO: 1886862 - DNA, 4001 bp, Homo sapiens; identical to SEQ ID NO: 1243891

SEQ ID NO: 1886863 - DNA, 4001 bp, Homo sapiens
ctgagtcctctctctggtgacaagtgggaagggtgtgagaactggagactgtccacatgtggcttcatctaaaaggtatgaccagaggcattactgacatcccaggggattcctgaccctagctgacaggtgccccagttaaaacacaccccaaagctagggctgctggaacagaaaacagctcccctcaaaggtctgcagcagcccctctgcaggcacaccgcctcaggctacatatcctcaaattcaggggatcttggaataactcgtgcattgcacaatcccactaacaagtgcggaaaattaagttactttaaaattacaaacttgggccaggcgcggtggcttcccagcacttcgggaggccgaactgggcggatcacttgaggtccggagttcgagaccagccttgaccaacatgaagaaaccccgtctctactaaaaatacgaaattagccaggcgtggtggcgcacgcctgtgatcccagcttttcgggaggctgaggcaggagaatcgcttgaacctgggaggcagaggttgcggtgagccgagatcacgccattgcactccaacctgggcaacaagagcgaaactccgtctcaggaaaaaaaaaaaaattacaaacttgaagatttaagccaacctttcatcacacttgtgttcacgtgcatatttttccattgtaaatatgacacaacccaaaaccttctaatcccattgtttttgaaatctaccttgagactgttacagtctaaaggacacctcatgagtacaactacctcatctgcctctcatcttgccagcatcttaatcctgtgtgactttctctacattcacctaaacttaacccttgctcatttgcactcagtcaccgctccaaggccaaggggaaccgttcagagagaacccccagcgggagggcaagccccactcctagccgggccactcccccgctccacacggcatttgggtctttctgacattttcccccacgaatgcaagacaccggggcagcctctgagggggcagccagacagccccggaccgggctgcggaagaaagagcgtggcctttgtttactgcggtgaccttaggcgtagaggaagccgacgcccgcttcgcggccccagccctaccccctcccctcccacggcccgctgcccccacccccgccctgcccctcccccaggcccgcctccccacgccccacccagcccttcccgagtccgctccccacgaccctgcccctacccaggtcggctccccagagaccatgccccaccccgggtcagctcccctatcccctccttccccaaccctcccctctccagaccctgctcccccgacctggtcctgcccctcccccacgtccgctccccactgccctccccacccctggccgcgctagcctagtggccgttgggttctggccacgatccggcggtgccgggacttgcgcggagaccccgcgggggccaccacttccttccgcgatcgcgcttggtcttggcagccgcagggcccgggtcttcgggcggcgggcgggggcggcggggcctcaccgagatagatgtctccgaaggagccgctgccgatcttccggcccagccggtacctgttcccgactctcagctccatggcggcggcggcccgattcgctcctgccctcccggccgcttcctgggtctgaactctgggaggcggcgccgctgctgccgctactgcgggtccggctcccggctccgcccccctcacggccccgctttcaccatcgctttcctgtcgccccgccgctcccagcgcctcaatacggggcggatgggacagtccgagcgccgccgccgctgctccggcccctaccggtcccgcttgccctctccccgccgcggatggactcggatcttccgggcctaaatcccctttcagctgcctaaaggagccgccgccatcgcgctgtgacgtcacttcccctagcaacccggcggggcggggccgcggcgctccaggggcggggccgggcggggcgagcgctccaggcctcctcccgaccctgcgccgtgcccagcccctctgccctcctgttaccccgggacctcgggccgccagccccttccacgtgcaggctcctgctgctctcgcgggggcttttcgtgtgtcccccgagatgtcgaggaagccaggtgagttcctcgcgacaggcggtgccctttgcaggaggggacaggtagctgaggcgtggacagagtgacaggccaggctcaggggacacaggtgagaccccctcactgggctgccagttcccgggcttggggcatcccagtacgtcagcgtctgcggccttacctcctgacacctaaggccagagacagagcaggcccgcgccctgggaggtcctgatgtccagcctgaagattgaggacaaagccaccacctttcacaaaatgaggccagaccacctgcctccctccagtccctgcggcctggagacggagtcaacattcttatctgtgttggatctgaatgttcctccttgcaaaggaaacaaggagtggacgttcaggctgatggccagcttcaaagatcggggcctttgattcccatcactgggaagaaagcccttcagacaagcccccccaggctgcaggtgcatggggaccttgaagaacccgtccccatggtcccacgtccatgtgtctcgagacctgtcgcatcctcgctgaaactcaagaatgtgaaacaggtgaaggtgtgttttgacgcattagcataccagggctgtggtgtgggcaccgccgtgtgagtgagacagcagcctcagcccgtccaggtcactgcagaagaggaaagcagcccccacaggccccacagtggtgctcgcctttctccaccccccagtctttcctctccacccctcagctccaaacagctggaggtcaggtcggggagacgggcgtccattcccgaaattacatagcagggcctggagacaggagatgccgccggccagaccaccatcagtcactaatgagggatgggcagtcggaactgcccagtttctgagttacagaagccgggggtggggggctgccagactagtaaaactgaccttgttggcggaatcgctcacggcttttctgttgatgaacagagtccagctctcccacgggtggctgtgatccttcttcctggggagtcctgctgtccctgactaggggcacctgcccacctgtcagctgctcctccctcggctggtcctcctgggctctgatggccccaacatttctagctcttctcacccatagtgccccaagcttcatgcagctgcggcaggtactgtgcccgtctgcctggcttttgtgtgtttgtgtcttgactctataacccgtgcacacggactgggctgtggtgtagtggggatggcaggagccctgggaacatgcgggctgggcaaggtgaggcaggctgattgctgtggctcccccaccaccagccccagccacaacaaactgacaaaggaagaggacagtggtaccctggagccctggggtcagagagaggaggacaaagcaggtgtgtagcccagggaatgacagcaccccttccgagaagacagggagggtgcagacatggccaggttctgagctagaaaactgtcagcagggggctgaagctgaggatagtcattgccaaggaacagcctccgtcacagaggagacgcacagatgcggtgacgagggagggatgcggggctggtgaccgctgggaacggatgtgtgaggcagagtctccaggcatggtctgtggggcggtttgatgatactagaacatctcagagtagaaggacgtcccgacctgcagactggaaagcccccagagctcccggcaggacgtatgagggccagcccacacccaggtctgtcctgatacaactgaacgccacagtgtcttagctcctttactgttgctatcaagaaacacctgaggctgggaaatttatgaa

SEQ ID NO: 1886864 - DNA, 4001 bp, Homo sapiens; identical to SEQ ID NO: 1243896

SEQ ID NO: 1886865 - DNA, 4001 bp, Homo sapiens; identical to SEQ ID NO: 1243902

SEQ ID NO: 1886866 - DNA, 4001 bp, Homo sapiens; identical to SEQ ID NO: 1243914

SEQ ID NO: 1886867 - DNA, 4001 bp, Homo sapiens
accatttactactccatactccagccgccatgcacaatggttgtgtatgaggctcctgtgatcattaacaggagtagaagctgggctcagacactctggcacttgcataggtcaaggggtgtgttgtgctcttgcaacaaatcccacatagacatccatatgcatattgtcccaccgtcccctaagcagaaaccagggttaagtacagaatagtcccgggaacattttggttgcccggccttaggtgagcctttctggggctgggattttgacaccatctgctccattgtttctaaactgctgtgttctggcgcatcaattgtttcatcacattatcatcacggaaagcttggtctccctcaaaacatgaaccgggtaggccctgtgttccagtgggggcttttggacttgactttagtgtttaggaggacagagtccctctcccctctgtggtgctggggtattagtaaatcagccttgaagagataaggggctggggcctcaacctcccaagaggctgtcactggagaatggtctcctgccctcagatcttgggcatttccacagcacactgtccccctcgtccttccaaatacctacatacgctcttgtaataggagagctgggaactccacccaaaaccatacaaaaagttagtctgtgtatttggacgcctccccagcactcagtcaccgagtttctcctttccaacagcagtcactctcatgcagtttaagtgatttattgatgtctcggctaagcttgcgacagtttcaggacatttcagccatcaaggtctaagaagccctttccattcccgaggagccctcagccagcctccttcttcctcatctcctcactctggccgcgtagcccctcatggcgtccatcttggacgcccctttgttcgcgctccacgccccccacttccttcttcgtcagctcctccactttggccgcgtagcccctcatggcgtccatcttggacgcccctttgttcgcgctccacgccccccacttccttcttcgtcagctcctccactttggccgcgtagcccctcatggcgtccatcttggacgcccctttgttcgcgctccacgccccccacttccttcttcgtcagctcctccactttggccgcgtagcccctcatggcgtccatcttgcacgcccctttgttcgcgctccacgccccccacttccttcttcgtcagctcctccactttggccgcgtagcccctcatggcgtccatcttggacgccccttttttcgcgctccaagcctcccacttggccctggctctcacgtctgaggccggagggccggggatgtcgcagtcgccctgggtggcctgtttgtacaagccgtagaccagcagcttctcctgatcgctcacgggacccttcagctgcttgagggccgcgcagctcgaactccacttggcacatggggtggtggaggcggtccctggtgctagaagctggaggtggagagttggagtggctgttactactcgatctcagggggaggagacaggcacgcgatgtttgtgttttgtcaagcacagattgcaagctcggggtccagcgtaaaccccaccatgtttgggctcacacggcgcattttctggggaggaccagccgtcaaaaagcgtctaggatccggaacgctgctgtctggagggggcggcgcggcaggagcgcgttgagggactgtatgtggcgcgagctgggcgggtgggagtggaagcctcgcgtggtgcggccgcgctgggtggtgggcgtcccgggggaggcgctcggtgggggtgaactgtgtgcggggcacgcccggggttaccgggtgagggtgaatgcggggccggggaatcatgagcccgacccgctgggaccccggaagaggggccgggcaggggacggtgcggaggggtctagtgagcgacgtccgggtacctgagggctggtgggagggctctgccggaaggcggcgctgtgcgcttggcgcgctcgttcgtgaggactgcgcgtgcgcggcggaggctgtgggcggggccgggcggaggttgtgagcaggcctaagcgcggccgccgtggctcctgcgtctcccatcgtgccgtgcgtcccgcgccgcgttcgagttctcggaggggagggggcgttagccccgcgcagccgccggcgtcgccgccatggacctaggtgggtgccgcggctccccggccccgggctgcgtccagcaatgcgccaccagagcggtgctgccccgtcgcgtctcctcctgtcgcgcacgctcgcgcgggcccggaccgaaacgtcccccgcgtcggggcgggtctaggggtcccggggtggccttggcggggggtggtccgggtcccgccgcgcgttgggccgcgtcttgccgcctccggccccctgcgcttgaaaacacggagcagacgtgaagttagagcccttggaagcgcccggggctcgcgcacgtgctttgggaaacgggctccctccgagcacccctgggcgccccgacggcctcatttcctgaacggcagctgcgttcttgagcaagtgtcttaacgctccaagtgtcttacgctcatgacgtttcctcatcgacagagcggggagaatggaagtgtgtctccccactgagttttgggcgactttgcattgagatcgccgaggtacagtgtcccttgtggggttgcgcgggtcacacccgcggtgggggcggctgcgctcctgaggtatcactttgtgaacctgcgtgcgtccggattcagaatcttacaggcaaggtctgggagggagcccataggaactagatgctccctgctaaatcttggcacacgctgctaagaccaggaggctgttctgggagagctgggggtgaggcaccccgagatgtgtcagcagtagtaggctggggggaaatggtctggtccccgcccccagacagcttttcaggagcggaatggcagagctctaagggcttggagcccctcagccgtaattgcttcccagccccaccacattcaggctgggacaccctcagcaaatcgtttctgcgcctcagtgtccttatctctagagcaggaatactagtcctcaaaaggtgattgtgaatagaagagatcttacctgtgtaccacctagcacagtgtctggcatggagtaggtgcttaataaacctaagaagcgggctgtggcaagcactagttaaccatccatgatagagtaccggagtattttccagctagtaaccgccctgggacttactacttcaaactgtgcgtacttaatgcgcctggaaggcaggtgtttagggccaaacatctgctcaactaagccaataatgcaataaaattaaatttacagcgtcaggagggactatattttgggaccctgggagagcctcctgagccagaaagaagggcggtaacccccagggaggtccccttcgcagcgtaaccctccctgggagtcggtctcagccactgtgagatgagatggattgcctccacaagtgggttacatagtgctgagcccttggcctgctgccgctcccataaatggtgggaggggtaagatggtccttagtctcctggagtcagtgttttctctgctggtgtctggcctgtgaaaatggggaatatgagctcttgggggcatgacagactgaggaaggagtagcatctctcactcctgggaaaggggagatgactcaggaatgaggaatagggagcagtgtttgcaccctcgttttagtttctgggccaaaggaaacatacctgataaagacctacatcctttgatgtttctgagctgggggaggcaaagaatagtgacaagattctggtcttgccaaccatgaaaaggtttggggaaaccaacatttactgagcacctaattagactctgtaactggattcttactgtagctctatctcatttatccatcatagcgtcccggggagatggggtcaggagatagcagtgcca

SEQ ID NO: 1886868 - DNA, 4001 bp, Homo sapiens; identical to SEQ ID NO: 1243915

SEQ ID NO: 1886869 - DNA, 4001 bp, Homo sapiens
gtctctcctttctgctcccttactgtccccaccttcgtgccccccacatgacatcatgagatctttctccttttctgttctgccccatccaccagcccttggtatgtgcttcccgtgtggtagcaagaatggcttccaactgttctagacctacagcacccccatagctagcaaccccagagagggcacagcccccacgaccctggcatcctcctccgaccctttcagggcctgcaactggcccctctggcaccctcgtttggacccattgccatgcaggcatggtgaccctgagggcagccccagcagaattgggtggaggtagggaggggcgtttaccaaggcagggacactggcagacccagagcagcggctgtgtcatcggcgcctcctgtcacccccagggtggtgagcagctggatcgagaggcgcaaggtgcagtcggagaaggccaacctgatgatcctctttgacaagtacctgcccacgtgcctggacaagttgcgctttgggttcaagaagatcacgccagtgccggagatcacggtgatccaaacgattctgtacctgctggagtgcctgctcacggagaagaccgtgccccccgactcccccagggagctgtacgagctgtacttcgtgttcacctgcttctgggccttcggtggcgccatgttccaggaccaggtgatgcacctggggggcccggccacccacacagggtctctcagcatcctgcttagctgggccctgatttttacttctgtgtctcaacagcttgtggattatcgagtggagttcagtaaatggtggatcaacgaattcaagactatcaagttcccctcgcagggaacgatttttgactactacattgatcctgacacaaaaaagttcctgccctggacagataaagtgccctcctttgagctggatcccgatgtcccactgcaggtaactgtccccaaagcagggccaccgactggtgatttagaggcaggaatcggtgcagtaccctccacacgcctgcacggaatgtccaaacacaaccgattttcaacattaggacctgttcggtagaacatggcctgcacacccacgagaggcagaagtgtctgagaatcacagctccctccccttccctcccctgccccaggcctctttggtccacaccacggaaaccatccgcatccgctacttcatggacctgctcatggagaagtcctggccggtgatgctggtggggaacgcggggacgggcaagtcggtgctgatgggggacaagctggaaagcctgaacacggacaactacctggtgcaggctgtgcccttcaacttctacacgacctcagccatgctgcagggtgaggctggtccggccacgccctgcctacccggctgccccccgccagtccccgttccctcctgtcccctctcactgcaggcccaggcactcactagccactttgcacctcctcacttcccatgccccacccgctggcctttccttcctgagtcggagacagaggaggagcagccgggacccctctttctggtgctcccttgtgggcatggtgatggggttttgatggccagtcgaggcagcaggtcccccgggagtgtctcagccaatctaaggcgacccaaaggtgacggagagcaaggttcctgccaccctcgcctctgatcgctctgtttattcctggggctgtacccggtgccccctcaagggccactcccagggcaggtacctttggtaaacttggatcccagccaggtcccaccttctgtcctccggggaagcaggtagcgcccctccctacctaacaggctctggctcaggaggcgcaggcgggcagctgaccctctgccctctctaggggtgctggagaagccgctggagaagaaatcggggaggaactacgggccgccaggcactaagaagctcgtctacttcatcgacgacatgaacatgcccgaggtggacaagtatgggacggtggccccgcacaccctcatccggcagcacatggaccaccggcactggttagacggggcggggccggaggggaaggcgtggccccggggcggtgagggcggggccagggcggggcgcaggaagaggcggagccccagggcagtagggcaggactggtgtggggcggtggggggggtgctgcaacgtgggtagggagacacgggtcgtagctgggcccccaagtttgtggggccacaaggcattgaggtagggccagggtaggggagaggttctatcagtttcgtccatcacccatttcacaaacatgcagcagtggcctagagcccccgcggagggggggatcctccttccccccttccaccgaggtgtctgtcccgccgggagaggaagaagcacattacccggtaaaggaagagccctgaggaaaacccccagtgcagtcacagaggagcctcccagctgggagccccagcagagagatgcccctggggagatggtgcacagctggaagctggcagcagtgtcctgctggctgtgggaccttagagggagagcattctgggtggagagattgccacgtgtaaatgccctgccacacgtgaagaagcccaggaaggccggtgtggcaaggatgtgagagccagaggcagagggtgcccagggcagctgcagccagaatcccagggcctcgggacagagtgcagattttctcctaacggcaccgagaaaccaaaggtggcacgtttaggtttgcagtttggaaagatgagaacattcagttcagttgtcttttttttttttttttttttttttttttttgaggagaaatctcgctctgtctctcaggctggagtgcaatggctcgatcttggcttactgcaacctccgcctcctgggttcaaggaattctccttcctcagcctcctgagtagctggtaatacaggtgcccaccaccacgccggctaatttttgtacttttagtagagaaggggtttcgccatgttggccaggctgttctcgaactcctgacctcaggtgatccgcccgccttggcctcacaaagtgctgggattagaggtgtgagccaccgtgcccagccatagttgtctcttaaaataagcaagtagctcaggccaaaagagcctagaaactagtctgctcgttcatgaagcctggcctcatgccgagaaaggcaggcatggggggttaggtagtctacttgaggtcatggtcctaatgagtggcggagctgggttattattattattattattattatttccaagacagagtttcgctcttgctgcccaggctggagtccaatggcgtgatcttggctcactgcaacctctgcctcctgggttccagcgattctcctgcctcagtctcccaagtagctgaaattataggtgcctgccaccatgcccacctaatttttgtatttttagtagaaacggggcttaactatattggccaggcaggtctctaactcctgacctcaggtgatctgcccgcctcgggctcccaaagtgctgggactacaggcgtgagccaccacgctcagccagaactggattttgagttcagatatgtctgactccatcacttgccttttcctcactaaacgacactcccagagctcacgactataggaagcctactctgggctgcaggctgtgatgtggggacggaggcatcagaggtggctccctgggggaggtgacaaagctgccactctgaggagggagcctggagagagtttgacatcatttgaggagaacctaacgtggtgtggggtgggagatttgagggtacccagacaggagaggaggacaggtgcatgcatgagagcccacccgttcctctctgcaggcaggtctactgtgagggctgtggcggctcagcctcggtttccctgcaactcgcgaggccccttccaagggttgcacacggtcatgtgcccttgtaaaatttgtttaagatttttgctttcttttcctcaag

SEQ ID NO: 1886870 - DNA, 4001 bp, Homo sapiens; identical to SEQ ID NO: 1243944

SEQ ID NO: 1886871 - DNA, 4001 bp, Homo sapiens
caataaaaaataactacaacaactttcaaacatatagatagtataagatatacacagaaataacaaaaaattaaatagcaggggatgaatttgaagtgtagagtttttattagttttctttttgcttgttaggtagttcatgcaagcagtgtcaagttgttatcagcttaaaacaataggttataagatactacttgcaagctcatggtaacctcaaatcaaaaatcatataatggatacacaaaaaataaaaagcaagaaactaaatcatagcaccagagaaaatcatcttcatttaaaggaagacagaaaagaaggaaagaaggaagagaagaccacaaaacaaaacaaccaaagaacaaataacaaaatggcaagaattacttatcaataacattgaatgtaaatgaacaaaaatcttcaatcaaaagacacagagtggttgactggataaaaaaacaagacccaatgatctattccctacaagaaacacacttcatctataggcacatatagactgaaaataaagggatggaaaaatatatcccatgccaatggaaaccaaaaaagagcaggattagctatacatatatcagacaaatagatttcaaaacaaaatctataataaaagacaaagtttataatgatggagtcaattcagtaagaagatataacaactgtaaatatatatgcaccaacactaaagcacccagacatgtaaagcaagtattattagagctaaagagaagacagactccaatacaataacagctggagacttcaacaacccacttttggcattgaacaaattattcagacagaaaagtaacaaggaaatattggacttaatctgtactgtagatcaaatggacctaatggatatttatggaacatttacatccacgctacagaatacacatggatcttttcctcagcacatgatcattctcaaggataggtcacaaaacctaagacctaacatatgtcaggtcacaaaaacaagtcttaaaacattcaaaaaaaattgaaataggctgggcgtggtggttcatgcctgtaatcccagcactttgggaggccgaggcgggtggatcacgaggtcaggagttcaagaccatcctggccaacatggtgaaaccccgtctctactaaaaatacaaaaattagccaggtgtggtggcgtgtgcctgtaatcccagctgctgggaagactgaggcaggagaatcacttgaaccagggaggcggaggttgcagtgagcagagatcacgccaccgcactccagtctggcaacagagcgagacgccatctcaaaaaaacaaacaaaaaaaatttttttagtatttatttttttttacatgtgactttttgtatttatcatctctcaactttgtagagatgaacaggcagaagagtcagaattgaagcttggagcccaaacttgggattccaaaatggggtagaagccatatacgttaggagcttggcagcagccaaaatggactattctgtggccaacgaagtcatctgcagggaccttgatgttggggtacaggatgagctggaaagagggtacccgatgacccatgtacaccaggccaatcaggtgagcagtgttgggcaatctgggtagtgtgtctgcatttctcaggccgacactggtggtgactccaccctccggtattggcggttgtggagtttcttgtttttgctgaatatgcttttatttggctttcttgagttttgctctgtggttcttgaaccagacctggagtattgttgggtgtatgtctattttcgaggccatttatttctgagggcaggggtttgggtatgggttctcattgaacaagatgttcagatcttccagttgcttctcagtgaacacagttcatttcctgtgtgaatgcatctggtccttgcctttaggaagatcctctgagcctggcatcttctaatccagatgtgtgcctgggctcaggtgcaggcataagtagcaatatttttttaaggggaaacaggatgttgctctgttgcccaggctggagtgcagtgacatgaaaacagctcactgcagcctcaacctcctggattcaagtgttcttcgtacctcagtctcgcaagtagctgggaccacagccatgtgtcatcacacccagcttcttttttcttttttttttcattgggtctcatagcttcttttttcttttttttttaattggatctcaccatgctgcccaggctggtcttgaactcctgggctcaagcaatcctcctgcttctgcctcccaaagtgctaggattgtaagtgtgagccatgacaatctgcctgaaaaatttcttaaaataaattataatgggcctggcacagtggctcatgcctgtaatcccagcactttgggaggccgaggcaggcagatcacctgaggtcaagagtttgagaccagcctagctaacatggtgaaaccccatctctacaaaaatataaaaattagcctgggtggtgatgggcacctgtaaccccagctactcgggaggctgaggtaggagaatcacttgaacccgggagatggaggttgcagtgagccaagatcgtgccactgcactccagcctgtgtgacagaacaagactctgtctcaaaaaaaaataataataataataataataaaaaggaataacatagctaggaataaatttaatcaaagaggtgaaagacttatacacttaaaactacaaaaaaaaaaatcactgaaggaattatagacccaaataaaaataaataaaaagacattctgtgttttagggaaagaagacttaatattgttaagatgtcaatactacccaaagtgatctacagattcaacataatccctatcaaaattccaacagcctactttgtagaaatggaaaagccaattttcaaattcagatggaattgcgaggggttctgaataacaaaaacaatcttggggaaaaaaaacaaaaaacaaagtcaaagaactcacacttctctatttataaatttactacaaagttatagtaatcaaaatagtgtggtaccagcataagtacagacatatagaccaatggaataaaatggaatgtacagaaataaaactatacatttattttgagacagagtctcactccattacccaggctggagtgcagtggtacaatcacggctcactgcaacctcaaactcccagctcaggtgatttctcctacctcagcctcccaagtacctgggactacaggcacatgccaccatgcccagctaattttttgtatttttctagagatggggtttcatctctagatgaaactttggcctcccaaagtgctgggattacaggtgtgaaccacatgcctggcccagccaaatgattgttgacaaggatgccaagtctaatcaatggagaatagactcttcaacaaatggtaccaagacaattggatttccacatacaaaagaatgaagttggacccctaattcacaccatatacaaaaattaacttaaaattgaccaattacctaaacgtaagctaaaaccataaaactcttagaagaggctggcacagtggctcatgcctgtaatcccaacactttgggaggccaaggtaggcagatcacttgaggtcagcagttcaagaccagcctggcccacagtgaaaccccgtctctactaaaaatacaaaaattatccaggtgtggtggcaggcgcctgtaatcccaaatactttggaggctgaggcaggagaattgcttgaacccgggaggtggaggctgcagtgagctgagatcgtgtcactgcactccatccctgggaaaggagcgagacctcgtttcaaaaaaaaaaaaactcttagaagaaaacataggggtaaatcttcatgaactgagatttggcaatggatttgtaaatatgacaacagaagcacaagcaacaaaagaaaacaacagataaaaattaaatttaaaacttttgcacatcaaagga

SEQ ID NO: 1886872 - DNA, 4001 bp, Homo sapiens; identical to SEQ ID NO: 1243957

SEQ ID NO: 1886873 - DNA, 4001 bp, Homo sapiens
gtagccaaggtcattgctgattcaggaagtggcccctggaaccacaggatgatgtcaccacattgaggaagcgtttcactgctgttcagtaacaaggaaggaacttagctgaactagagaactggccactggacagtggacgctgaccctgtgctcagtgctggctccctagcccctccctcgaagtaggtcagcccagcagaaagcaaccccaggcctgttcctcggaggcctgggaagggccacgctttctgtgtgtgacgtggagggtggggtgtctgaaggagcttagccctcaggtggtctggtccccatggatggaggaaagagcaccagctcaggacagggctggaatccacagggaagagccaactgcatcccagcactcctgaccccttggtaggtcagttgtttacctcctcccacaggccccactgtcttcatttcactgatgtgggagcagaagctcaaagaggtcaggctatcacatggactcccactgcttgtcagcggtggggacaagatttgtccgtccagtgctctttccactatctggtcttcccttggctgacatgcacagggtgtgagaggtggtagcagtgcttgggcccacatggggtcttctcacgcccccaaggcctggcaacctttcattttttctgagttgtcagacatgcctgtgtacccagcattgccacaccaggcccagggacataggaaaaccaggacctcaccctgccttctccacagggtctgtgacgctcacgtaccagtgcagtcatgctgcccactgcacagagccatttgatggtagaatcctgtcccatgtgctgtaaaatgtaaaaatatactttggttttttttttttttttttttttttgagacagtcttgctctgttgcccaggctggagtgcagtggtatgatcttggctcgctgcaacctccacctgcttagttcaagtgattttcatgcctcagcctcctgggtagctgggactacaggcacgtgccaccacacccagctaaattttgtatgtttagtagagacagggttttgccctcgttggccaggctgatctcgaactcctggcctcaagtgatccacccccttcggtctcccaaagtgctgtgacatcattacaagcatgagccaccatgcctagcctacatttgtgttttttgtacttgccactttctttctgtttgacctatccatgcagattagaggaggctttttaatcagcactatgtgactggcagatgctgcttccatactttctaggaaaattgcaaaatgtagctgataagaatcaatttcctgtttttctaccaactcgattgccttctttcacagttacctgaaagtggcccactgaagcatctttattaaaaaatctttcaccctttgttttaggagcgcatttgggaaagggtgtctctcccccagcacagagtacaggcacccaggctctgccgggcagtccctggagcagacagggtggactcgagtgggagagacccttgtctgcctgagttgggagagttttcttggtcttctttttagattgtattttgagggaaatgttgggcttttctagccttcctactcagcctctcccccttaggctttttctcagctggtgtgacagactggaaaggatagaaataaggcctacctgtggttacagttcttgaccacagcaagtgaagacttggagctcttccagtggggttcataatgcaaaaggccgccttcctgggagaaggtccgtgcatttgatgcgactttagtgatgagcttaaactaacaattcccgttcttccttccagtgagtgtctgggaaagcaacctgcaacaatgagagagtggcacatcccccagcacttgctttttcccttggtccctgtgagctctgaaccttcagatcctcagagcagagccaaggccaggctcaggtggtcagaagggcccattcaggcctgtctcacaacgacgtctgtgttcactgtcatgtgcatgggcacaagaggccctttgtggagctgagttgctgtcaccaaggcaagaatatctctgctggaatcctccctcgaagctcagtcccgttgtgtgtagctcagctgatgttcaatggttggtggccaagaattctgccatctgcagaactgaaagctgtacatccgtttatgaaaaccacaacattcaggggaatacccattgtctttaatttctacattgatgtgacgagctatgatgtggtgagccagtatgtgccagctgtgcgttattctaacagtgtcagttatggtagacgtaaacatgtacatttgcatttgaagctattctggccttgcagatgtgctagaaagctcagaggacaaaggaggcctcacttctccagcaggtccagttcagagccccgtgcccactctccccctccaacctggctgtatcaggcactgtagctgtgcaactcagtaccagcttccctgccaggatggggcttgttttccagagcactttttttggggtggggtgggatatgagccttctacttgattcatttgtggtttccatttggtagtaaatgaaggatgtcgtaagtgcaatatttgctttatagcaagggttttgtgaaccaagcctcagagattccttatcaggaaagaggctgggaacaggtggctggagtggttaatgatttgggtgtgagtgccctgttcacttgagaagagtccccaggaactgtctggcttcctttattctcttccatgtggatggtgacatctttttgaacataggaaagcccaaacttgagagttctgattggcataggtgaagtttaggaacaaaacgaacaaaaaaatatactttttgttttggtgtattattaagaaatcaagttgttaaggtggattgaggacttttctttaccctctagctttatttctgaagagatactttgggaaatataattgagtgataacactaggatgggatttgacttgattttatttagaaaaatacatttatgtttttatagctgcaactttcttttttttttggagatggagtctcgctctgtcacccaggctggagtgcagtggcgcgatctcagctcactgcaagctctgcctcttgggttcatgccattttcctacctcagcctcctgagtagctgggattatgggtgcccaccaccatgcccggctaatttattttgtatttttagtagagatgaggtttcatcatgttagctaggatggtctcaatctcctgacctcgtagctagaatggtctcgatctcctgacctcgtgatctgcctgcctcggcatcccgaagtgctgggattacaggcgtgagccactgtgcccggcccgttccaaagtaaatttattgctatatgttttgtgtgtttttaagaatttcatgacagggtgatgcctctgcttggcaacctcacatggtagagaagttcccagtctcctgcccggccccacctcagccctctgcccagaagcagcctctttctacctcccctggttcttctgtggatcccgtctgtggcctgaattgcatttaggcctcttcccctgttttattcaccatagccatggcccagctatctgaaagcctcctttgtcaggaattattcctaaccttttagtttctctcaaagaggaaaaccctaagaagcaaatttagattggaaagtaaggcagaagcaacacctaggtgaatgaatcctgctagttaggtttcctaaaatagatgtaatgaaagaaggaagtaaactaatacacaattagaacatttatttattttttgagatgcagtcttgctcttttgcccaggctggagtgcagtagcttgatcttggctcactgcaacctctgccttctgtgttcaagcaattctcctgcctcagcctcccaagtagttgggattactggcgcccgccaccacacccagctaatttttgtgtttttagtagagac

SEQ ID NO: 1886874 - DNA, 4001 bp, Homo sapiens
catgtgcttacttgtctcccctgggactttcttctaaggaagaaagatccctgcaggtgtcagttaacctactgccaaaggggagccaggaagggctgactgcataggaagaaccaacctctaaaaaaaaggctgagcagacccacagaatggccactttatttgcaggacgagatgaccaggcagaggctcctgaaggggagtaggaggtccaccctcaagaagccacctaggcagcttctcccaggatctgagagccactggaacagacacagcagagctcaaattagatgtcacttggcctcctagaacttgatatgtactcaattttctaaaagcagaaagcaagtaccaaaacatacacaaggaatttaatttcttgttatcaacatgcccttatcatttagtctctgggaggagcagcctgtgggtgtagaatacatgggcaggtgaggaaatgcagtctttttaaagactgtgtgaagaaaagatggggtctggagacctggttttggctgttcctgccaatccaggaaaacaggggtatggcaaggagctgcacctccccctcagtgtagaggatcaaacactgtgacagcacaaagtgcaggcagcaacactccataaaggcaaatgagaattgttgaatgctcccctacctctcctattcctcaaagcagtcttacaaatgaccaaattatgaacagcattcttttaaaaatcatgccaaaatgcaaataacatgatgtggtagtgagaggagatgggaatccagggatcagggccaatgctgcgaccgctctgtagcaccaagaagccagtacccagggtcctcgcttctaaaatgatggaattaaaccagatgctcaccccaaatccttcagtcccaaaggcccccattctgaccagtgattcaattccctgccatctccatggtgtcatgagaaacccaagcttctgatcagcccagccacaggtcaccaactgagggagtagaattccagccacagccaagcagcagacgtttttgttagtctgtggggcttcatggtgggcaaaaaactagggcttcccttcagcctttggaaatgtgaaaagcagccttcagaacccttccctcctctgaggatggccgctgtgacccttaggcagagattccccatttctcacacactgtggctgtgctagagaaaacactggctgatgggagacgatgaagccaaccagagactgggtgcagtgaacgggagcctttgatggctactcacccccaccccacaggacaggccgagctatggactaccatttgatcagcataattttccagcttgagacatctgaaaaacatgcagagctgcatgggaaaatctacattcccatgatctcgtgtttaatttagacctggctggtggatgtggtggtgctaactgctgggctgtcgccatctcgcgaggagcctgcgagagtgtggaaataaaggaggggcagtggatcccctcaggcagggcctgctgactttgggtttcgggcacagtagtgatgtaacatattttctcaaagagagctccagatgctggccaaggaacaggtatttttacactgtgcatgtacaagtgcaagaccacagctgtgagaaaaacaagcggtttgctcacctctgccttcccacctgtgcctccaggaggtcacatctaactctttccatagtagcttcagaggaacacggtagatttctgaacaatgcagatttctgagggagttacttgcagggactggtggtagtgatggttgatgtccgctgagcctcatctaagcagcactgcgggatgggcagtgagccaggatcttagagaccacaagagcaggctcaccttagctgaagctcaaaggatgagctccttcatcccaaaggtgggctctggggcagagcaatccctgagggttaactctttatgtgccacccacatgctgcactctcatttccagtcactttccctatgaccggaagtggctcctgccttgcattctatgcacctgccatttcccccacccagcgtccttcctctatctgtcactagactggctccttgtcactcagatcgcatggcctcctcagaacccatcaggcactctctatcaacgtcaccagctgtcatctggaacagagcccctcctctatctgacatttcttatgtgcctgtttatctgtttctctcctgcccccacaccacccccctgagaccaaggcccagcctctttgccactgtctagaacagtgcctggcacacactcagccctcaacaaacaccttccatgtgacacagaagcaaaaaataagaacactgttaaagatacccattatctctctactcagagactgccagagttcacaccttgaggctgttctcccagttcctgtttccctttcggtctccatttcttgagttaaagggcaagtgctgtattgtctgcctaacaataaactgcctgggaacaggaacagccctaccaggtgcttaacacatgctccacacgaaccagcacctgccgaagcccaggcaccacggggcctgagaatccactcgatgccccttacagctggactcaggagcgacaccagcagcctgggcagcagcctagggctgaaatatgtagttctcactccggccacagggattatgtcctgcctttccagctgcatggtccgaggcaagctgagctttcctgagcctctatttccacacctctcaaatagaggtaacaggtgctgctcagcatggctgtgagggttggtaagagtacgactggcaaataagaggtgtccaaatacctgcctcctctactgtgtcctgccaaggtgcaatgtccacagggacatttctcagcaggttcctaaggacagctcggcaggagatgaaagcctacagaggcatccctatgagaacacactgggtgggaatcacctaccagaggggtgggtggcattgtccacaagcatctctctctagactatacacacaacctgttcaaaaccatcaacaatcttgcctgcccttctcctctgcagctggcatttccaagcaaagtctcagatgtgctctttgatactagtaacagaacagaattaaaagagcagtaagaaacagaaggggctctctaagaagaggctagtgaatactaactgagcaggtcacatgtgtccactgatggcatcttcataacaatcctatggaggagttattcttcttattcatatcttacagaggaggaaaagtgaagcaaagagaggctaagtaactgacccaaggctgcactgccagcaagaggtgggactaggatttgctctcagactctgacttctgatcccatcctcttaatccctattcttattctcattctttgtagctttagacaaattcagtgctcaaaatcgtaagaacaagaaactttcctttgctgaatctgcaggcctacaaaggtccctcttgtctagatgtttgaggccaaaagatggcatggaaacaactgttttccagcctcatgttttgtgggccataatggatcctttccccagtctctcaccaagtcaaacaagcaggagcaaagatgctacagctagaagggccttggaagtcaaccacgtgtagatgccaggacccagagccattcagtgctaagccaggacagaacctggcattcccagctcccttcagtgcagccagcaaaagggaagaggctttaacgctattcaaagaaacttttaccttgaaatgtggaaggttctacacgctggcaatacaatggagtcagtcagggtggaggtccaaaataacaacacagagactctaaaactattcctaaaaacgtgttcttcagaactcacatcctcaagaaatgatgcctctttggctattaacagtgtcttctactaaatcagtcacaccgactttaacaccctgagaaacctgcactgttcctttgaaatagctgttgtcatctga

SEQ ID NO: 1886875 - DNA, 4001 bp, Homo sapiens; identical to SEQ ID NO: 1243983

SEQ ID NO: 1886876 - DNA, 4001 bp, Homo sapiens
gccaaggctgtcttttaaaaagctaaagatgtgttggttcaagaccagtctgagcaatatggcgagacctcatttctactaaaaagaaaaaaaaaatcagctggctgtggtggcccatgcctgtagtcatcccagctacttgaaaggctgaagtgggaggatcgcttgaacccagaaggttgaggttgcagtgagccttgattgtgccactgcactccggcctgggtgacagtgagacctcgtctcaaaaagcctcggaaggagtggcctagggagatgagcaagcattttgtttctagtttctgaatggccctgtgcattgagagaggtcttcggcctcccagcctctctggctgaaggtggcgattctgcatggagtctctccaccacttggtggcattgctcacagtgacttcctacttctaaacaccattgaattggagcaagtagatgatttgccacatttttcccagctagtttggaggctgaatatagaattttactggggcacaccagaatgtgtacgttggggagcagcgatccccgttttccttgataatctgccgacagcttccttagtattgaaatcacaaagtcagaaatgcacacacctctatgatgagagatccatacagaagagagcaacaaaaagaggccttttaagtttgccagacttcctgaccagtgggaagcaagagagtagataagtgtgcaacaggcacaaacccaggcctataagaacctagttgggaacagaatgtaagagaatggggagcgatggggactctagtgtgttctgggcacgtgcccatctaaagtctccatgtgactgttgccctgcaggaatgtgggccccagtgttcaccaaacctttttgtttgtttgtttttttcccgtgaagagaagccagaaacccagatattgatacaaagtatccagtttagaagtgttggtagtttttttaattttgaacattgtgctgcccaaagaaggtatctgcaagccaggtacaaaccagcagttcatgccctctggtgagcagaaatgtcggaggtcgaattctagttctgctgttgcaacagctgtaaacgaaagtcttcagatttctaatgcccaatggaaatgccactttatttccaaaggttattaaaaggaatagttcatgtatgtaagtaggcacagagcttgccacctattaggtactcaaaagcattcttccttcacttaaggaaacaatacaggcataatacaacaataaagttacgatcaagttcattatcaggaggcatacacccaaacaataggggagtgagcacctaccacgtacagagctctctgctaggttctctgggggcagcagttcccaacctggcaattcatcggcatcgtcggaatcagccagcagcttgttggatatgctgagtccagagtcccgcccatattacacctaacgttctgtgcctattacacccagatttatgagatcctcctctcccatgcagtcaaagaatctgcattctaataagttcctcagaggaagctcttttgcagccagtttgcactggtctgtgggttggtcacttatggaaaccactgctccagggaatgaatcatgatttccagtctcattagggaaagatgatatgcatatgcacacatgtaaagaggagtgacagtaattagccaaaagctctgtggacataattgcctctgatgaagtgctgactgatgacatcagacagtaggctattgacagtgtaccccggggaaagctaaatgcaaaagagaagcgaactgcctcatgaagtgagatcaggattacacggtcagaaatgtggagagggtgattcagatggacaaaggagcagaggtaggattcaagtgatgtgtttcggaggcagtgcagcctgtttgtgctgagtggaaggtgcacgaggaacatagtagacggtaacatgaaggcaggagctgtgaaggcctttgaaggtcaggccagttgtaataaaactatttcacattgtcaggtatcttgcgatggttgccaaacatttttctatggtttgcataaatacatatctattttatttatgtatttatttattttatgtatttattttatttatttatttattttttgagacggaggttcgctcttgttgcccaggctggagtgcaatggagcaatcccagctcactacaacctccgcctctcaggttcaagcaattctcctgcctcagcctcctgagtagctgggattacaggcatgagccaccacgcccagctaattttgtatttttagtagagatggggtttctccatgttggtcaggctggtcttgaactcccagcctcaggtgatccacccatctcggcctcccaaagtgctgggattacaggcttgagtcactgcacccagcctattttagttttctttgagacggagtttcactcgtcgcccaggctgcagtgaagtggcactatctcggctcactgaaacctccacctcccggattcaagtgattctcctgcctcagcctgccaagtagttgggattacagggtcccttgaagcccaggccaaatggccctgctgtggccttgccccaacgcacccccccactttctctgggtcagccccaactcgtagtccagtcctcccagttcctctgcttctctgagtataacttgagctgacgtgtggtgcattccagttacctgacttacatcaagctgtcaatggcaatcaagcgtaatgagagcatggccaaaggtctgcagagggctctgctgcagcagcagccagaggatgacagcaagtgcttcccccggccccaggacctgatctggctttatgacatcatcttacagctgacccttgaggaccgggaaggcaagggcctgtcgttttcctttgcctgtgtcagacacaaaatgacttaactttgtatcatggaagggctgtgacaagcaggacctgttagtagctgggaaaagacaaaggtcttacaccagttccacagtctgtgagcccctacctctcagacatgctgatctgcagagaatagtgacctcagatcatcactgagcacttcacctgtgtaagatgctcccaggtgccatagagcatctgagacctgaatccatgccatctcggcccccagggagtttgtcagtcagtaggactgtgagacacacacagtcaaggcatctgagtagatgctaagcaaaataaaagctcagcgctggaacagatcccttccagctaagatgggccaagaagtctctgaaggcgggtgagctatgagttgagttgtaaagggcaaatctgtttccaagatgagaggggaatggaggcgacagcaggtgtggctgctgccaggtcacttcacaggcttttccccattgtattgacctcgggctttttttttctcaccattgtctgttcttacaaggtcttctgtgaaaaattcaacctaagatctactcttcatgaattttcttgttgcatctgttgtacagaatctggtggaattgctccagcttcctggtttagaggaagacaaagccttccagaaagagataggcctcaagattctggtgttcaaagcttacaggtaacgtcccatgggatgggcagagttttcctctgcctcccaggttctgtaagcattgggagcatgacccagcccacagcagatgggatcattggccttgagtgtatggttaccttgcctgtgatcagaggaaggtcagcccagcacgttcaaggggagtttctaaaggctgtggtcagcagtggccagtgatgatgactgccctttggccaggttggaggagtggagcacacacgttaaacttggcttcctcgctgggtgtggtagctcacgcttgtaatcccagcactttgggaggcaaaggcaggattaaaaacttaaatctaaaatgaaaacatattaaaaccttggacgataacctaggaaataccattgcggacataggacc

SEQ ID NO: 1886877 - DNA, 4001 bp, Homo sapiens
ccatgcctgtagtcatcccagctactcgaaaggctgaagtgggaggatcgcttgaacccagaaggttgaggttgcagtgagccttgattgtgccactgcactccggcctgggtgacagtgagactttgtctcaaaaagcctcggaaggagtggcctagggagatgagcaagcattttgtttctagtttctgaatggccctgtgcattgagagaggtcttcggcctcccagcctctctggctgaaggtggcgattctgcatggagtctctccaccacttggtggcattgctcacagtgacttcttacttctaaacactattgaattggagcaagtagatgatttgccacatttttcccagctagtttggaggctgaatatagaattttactggggcacaccagaatgtgtacgttggggagcagcgatccccgttttccttgataatgtgccgacagcttccttagtattgaaatcacaaagtcagaaatgcacacacctctatgatgagagatccatacaggagagagcaacaaaaagaggccttttaagtttgccagacttcctgaccagtgggaagcaagagagtagataagtgtgcaacaggcacaaacccaggcctataagaacctagttgggaacagaatgtaagagaatggggagcgatggggactctagtgtgttctgggcacgtgcccatctaaagtctccatgtgactgttgccctgcaggaatgtgggccccattgttcaccaaacctttttttttgtttgtttgtttcccatgaagagaagccagaaacccagatattgatacaaagtatccagtttagaagtgttggtagtttttttaattttgaacattgtgctgcccaaagaaggtatctgcaagccaggtacaaaccagcagttcatgccctctggtgagcagaaatgtcggaggtcgaattctagttctgctgttgcaacagctgtaaacgaaagtcttcagatttctaatgcccaatggaaatgccactttatttccaaaggttattaaaaggaatagttcatgtatgtaagtaggcacagagcttgccacctattaggtactcaaaagcattcttccttcacctaaggaaacaatacaggcataatgcaacaataatgttacgatcaagttcattatcaggaggcatacacccaaacaataggggagtgagcacctaccacgtacagagctctctgctaggttctctgggggcagcagttcccaacctggcaattcatcggcatcatcggaatcagccagcagcttgttggatatgctgagtccagagtcccgcccatattacacctaacgttctgtgcctattacacccagatttatgagatcctcctctcccatgcagtcaaagaatctgcattctaataagttcctcagaggaagctcttttgcagccagtttgcactggtctgtgggttggtcacttatggaaaccactgctccagggaatgaatcatgatttccagtctcattagggaaagatgatatgcatatgcacacatgtaaagaggagtgacagtaattagccaaaagctctgtggacataattgcctctgatgaagtgctgactgatgacatcagacagtaggctattgacagtgtaccccggggaaagctaaatgcaaaagagaagcgaactgcctcatgaagtgagatcaggattacagggtcagaaatgtggagagggtgattcagatggacaaaggagcagaggcagggttccagtgatgtgtttcggaggcagtgcagcctgtttgtgctgagtggaaggtgcacgaggaacatagtagacggtaacatgaaggcaggagctgtgaaggcctttgaaggtcaggccagttgtaataaaactatttcacattgtcaggtatcttgcgatggttgccaaacatttttctatggtttgcataaatacatatctattttatttatgtatttatttattttatgtatttattttatttatttatttattttttgagacggaggttcgctcttgttgcccaggctggagtgcaatggagcaatcccagctcactacaacctccgcctctcaggttcaagcagttctcctgcctcagcctcctgagtagctgggattacaggcatgagccaccacgcccagctaattttgtatttttagtagagatggggtttctccatgttggtcaggctggtcttgaactcccagcctcaggtgatccacccatctcggcctcccaaagtgctgggattacaggcatgagtcactgcacccagcctattttagttttctttgagacggagtttcactcttgtcgcccaggctgcagtgaagtggcactatctcggctcactgaaacctccacctcccggattcaagtgattctcctgcctcagcctgccaagtagttgggattacagggtcccttgaagcccaggccaaatggccctgctgtggccttgccccaactcacccccgacttcctctgggtcagccccaactcgtagtgcagtcctcccagttcctctgcttctctgagtataacttgagctgacgtgtggtgcattccacctacctgacttacatcaagctgtcaatggcaatcaagcgtaatgagagcatggccaaaggtctgcagagggctctgctgcagcagcagccagaggatgacagcaagtgcttcccccggccccaggacctgatccggctttatgacatcatcttacagctgacccttgaggaccgggaaggcaagggcctgtcattttcctttgcctgtgtcagacacaaaatgacttaactttgtatcatggaagggctgtgacaagcaggacctgttagtagctgggaaaagacaaaggtcttacaccagttccacagtctgtgagcccctacctctcagacatgctgatctgcagagaatagtgaccccagatcatcactgagcacttcacctgtgtaagatgctcccaggtgccatagagcatctgagacctgaatccatgccatctcggcccccagggagtttgtcagtcagtaggactgtgagacacacacagtcaaggcatctgagtagatgctaagcaaaataaaagctcagcgctggaacagatcccttccagctaagatgggccaagaagtctctgaaggcgggtgagctatgagttgagttgtaaagggcaaatctgtttccaagatgagaggggaatggaggtgacagcaggtgtggctgctgccaggtcacttcacaggcttttccccattgtattgacctcggggtttttttttctcaccattttctgttcttacaaggtcttctgtgaaaaattcaacctaagatctactcttcatgaattttcttgttgcatctgttgtacagaatctggtggaattgctccagcttcctggtttagaggaagacaaagccttccagaaagagataggcctcaagattctggtgttcaaagcttacaggtaacgtcccatgggatgggcagagttttcctctgcctcccaggttctgtaagcattgggagcatgacccagcccacagcagatgggatcattggccttgagtgtatggttaccttgcctgtgatcagaggaaggtcagcccagcacgttcaaggggagtttctaaaggctgtggtcagtagtggccagtgatgatgactgccctttggccaggttggaggagtggagcacacacgttaaacttggcttcctcgctgggtgtggtagctcacgcttgtaatcccagcactttgggaggcaaaggcaggattaaaaacttaaatctaaaatgaaaacatattaaaaccttggacgataacctaggaaataccattgcagacataggacctggaaatgatcttcatgacaaagatgccaaaagtaattgcaagaaaaacaaaaattggcaaatgggacctaattaaactaaagagcttctttacggcaaaagaaactatcaac

SEQ ID NO: 1886878 - DNA, 4001 bp, Homo sapiens
ccatgcctgtagtcattccagctactcgaaaggctgaagtgggaggatcgcttgaaaccagaaggttgaggttgcagtgagccttgattgtgccactgcactccggcctgggtgacagtgagaccttgtctcaaaaagcctcggaaggagtggcctagggagatgagcaagcattttgtttctagtttctgaatggccctgtgcattgagagaggtcttcggcctcccagcctctctggctgaaggtggcgattctgcatggagtctctccaccacttggtggcattgctcacagtgacttcctacttctaaacaccattgaattggagcaagtagatgatttgccacatttttcccagctagtttggaggctgaatacagaattttactggggcacaccagaatgtgtacgttggggagcagcgatccccgttttccttgataatgtgccgacagcttccttagtattgaaatcacaaagtcagaaatgcacacacctctatgatgagagatccatacaggagagagcaacaaaaagaggccttttaagtttgccagacttcctgaccagtgggaagcaagagagtagataagtgtgcaacaggcacaaacccaggcctataagaacctagttgggaatagaatgtaagagaatggggaccgatggggactctagtgtgttctgggcacgtgcccatctaaagtctccatgtgactgttgccctgcaggaatgtgggccccagtgttcaccaaacctttttttttgtttgtttttttcccatgaagagaagccagaaacccagatattgatacaaagtatccagtttagaagtgttggtagtttttttaattttgaacattgtgctgcccaaagaaggtatctgcaagccaggtacaaaccagcagttcatgccctctggtgagcagaaatgtcggaggtcgaattctagttctgctgttgcaacagctgtaaacgaaagtcttcagatttccaatgcccaatggaaatgccactttatctccaaaggttattaaaaggaatagttcatgtatgtaagtaggcacagagcttgccacctattaggtactcaaaagcattcttccttcacttaaggaaacaatacaggcataatgcaacaataatgttatgatcaagttcattatcaggaggcatacacccaaacaatagggcagtgagcacctaccacgtacagagctctctgctaggttctctgggggcagcagttcccaacctggcaattcatcggcatcgtcggaatcagccagcagcttgttggatatgctgagtccagagtcccgcccatattacacctaacgttctgtgcctattacacccagatttatgagatcctcctctcccatgcagtcaaagaatctgcattctaataagttcctcagaggaagctcttttgcagccagtttgcactggtctgtgggttggtcacttatggaaaccactgctccagggaatgaatcatgatttccagtctcattagggaaagatgatatgcatatgcacacatgtaaagaggagtgacagtaattagccaaaagctctgtggacataattgcctctgatgaagtgctgactgatgacatcagacagtaggctattgacagtgtaccccggggaaagctaaatgcaaaagagaagcgaactgcctcatgaagtgagatcaggattacagggtcagaaatgtggagagggtgattcagatggacaaaggagcagaggcaggattcaagtgatgtgtttcggaggcagtgcagcctgtttgtgctgagtggaaggtgcacgaggaacatagtagacggtaacatgaaggcaggagctgtgaaggcctttgaaggtcaggccagttgtaataaaactatttcacattgtcaggtatcttgcgatggttgccaaacatttttctatggtttgcataaatacatatctattttatttatgtatttatttattttatgtatttattttatttatttatttatttattttttgagacggaggttcgctcttgttgcccaggctggagtgcaatggagcaatcccagctcactacaacctccgcctctcaggttcaagcaattctcctgcctcagcctcctgagtagctgggattacaggcatgagccaccacgcccagctaattttgtatttttagtagagatggggtttttctccatgttggtcaggctggtcttgaactcccagcctcaggtgatccacccatctcggcctcccaaagtgctgggattacaggcgtgagtcactgcacccagcctattttagttttctttgagacggagtttcactcttgtcgcccaggctgcagtgaagtggcactatctcggctcactgaaacctccacctcccggattcaagtgattctcctgcctcagcctgccaagtagttgggattacagggtcccttgaagcccaggccaaatggccctgctgtggccttgccccaactcacccccccacttcctctgggtcagccccaactcgtagtccagtcctcccagttcctctgcttctctgagtacaacttgagctgatgtgtggtgcattccacctacctgacttacatcaagctgtcaatggcaatcaagtgtaatgagagcatggccaaaggtctgcagagggctctgctgcagcagcagccagaggatgacagcaagtgcttccccccggccccaggacctgatccggctttatgacatcatcttacagctgacccttgaggaccgggaaggcaagggcctgtcgttttcctttgcctgtgtcagacataaaatgacttaactttgtatcatggaggggctgtgacaagcaggacctgttagtagctgggaaaagacaaaggtcttacaccagttccacagtctgtgagcccctacctctcagacatgctgatctgcagagaatagtgaccccagatcatcactgagcacttcacctgtgtaagatgctcccaggtgccatagagcatctgagacctgaatccatgccatctcggcccccagggagtttgtcagtcagtaggactgtgagacacacacagtcaaggcatctgagtagatgctaagcaaaataaaagctcagcgctggaacagatcccttccagctaagatgggccaagaagtctctgaaggcgggtgagctatgagttgagttgtaaagggcaaatctgtttccaagatgagaggggaatggaggtgacagcaggtgtggctgctgccaggtcacttcacaggcttttccccattgtattgacctcgggcttttttttcctcaccattgtctgttcttacaaggtcttctgtgaaaaattcaacctaagatctattcttcatgaattttcttgttgcatctgttgtacagaatctggtggaattgctccagcttcctggtttagaggaagacaaagccttccagaaagagataggcctcaagattctggtgttcaaagcttacaggtaacgtcccatgggatgggcagagttttcctctgcctcccaggttctgtaagcattgggagcatgacccagcccacagcagatgggatcattggccttgagtgtatggttaccttgcctgtgatcagaggaaggtcagcccagcacgttcaaggggagtttctaaaggctgtggtcagtagtggccagtgatgatgactgccctttggccaggttggaggagtggagcacacacgttaaacttggcttcctcgctgggtgtggtagctcacgcttgtaatcccagcactttgggaggcaaaggcaggattaaaaacttaaatctaaaatgaaaacatattaaaaccttggacgataacctaggaaataccattgcggacgtaggacctggaaatgatcttcatgacaaagatgccaaaagtaattgcaagaaaaacaaaaattggcaaatgggacctaattaaactaaagagcttctttacggcaaaagaaa

SEQ ID NO: 1886879 - DNA, 4001 bp, Homo sapiens; identical to SEQ ID NO: 1244000

SEQ ID NO: 1886880 - DNA, 4001 bp, Homo sapiens
ctgttataaatcaactgctaaacatgtggctcagatggaaaagccttaacattttggagaagggaaaagatgaatctatgatgaagtagcctgaggacaaccacagtgaagaaggcagacttcagctggatcctaaagaacggggcagggagggggggtggtttggcttgaaggggacagggagggtactcctgcattaaggacaacatgagcactttgagaggtaggcaagaaacggatgtatctggggatgagagaggcaggttgaataaatgcactgttgaatgagaagacggaggcctctgggttggaagggaaggcaaattagtatgatgtcatctggctgggaaaagctgattgggagaggtaggtgggattataggggcagggttttgcagttcctatatatccctgtttctcaaactgtgatagtataccttgggtctggggtggggtgaaaaacaaaacaaacatggcagatttgggcgtgtccaattttctcattggtggagagttttaaaaattaccactttgggaggctgaggcagatcacctgaggtcaggagtttgagaccatcctggacaacaatgataaagccccgtctctactaaaaatacaaaaattagccaggcatgatggtgcacacctgtaatcccagctacttgagaggctgaggcaggagaatcacttgaacccaggaggtggaggttgcagcaagccgagatcacgccactgcactccagcctgggcgacagagcgagactctgactttaaaaaaaaaaaaattacttttctatcaaaataaaaatagatgtattatggggaaggaaataaaatataccacagggatttgaatccatttgtgatcttagtgattgcaatggactgaatgtttatgtttccttcaaattcatatgttgaaattttaacttccaaggtgatggtattggagatggggcctctggggagtgattaggttatgagggggtagccctcatgaatgggattaatgccttcataaaagagaccccagagaaacccctcaccccttctgccatgtcaggttatagcaagaagacagcatctgtgaaccgggaaaagaggcctcaccagaaatggaatctgccagcgccctggtattggacttcttagcctccagaactgtgagaaatacatttctgttgtttacaagtcacccagtttatagtatcggttacggcaccccaaacagactaaggcagttttgcttcaccatttctctcctatttctgacacccagaattaagtgtaatatccccagacgtgattgcccagtgcagaggagaatacggtaatcaccacccccattcatggcgttttccttgtatgaacgtaacccaagactgaaaatctttgggaaatcatgtcacgtatctctaagaaaacatgattttatggtaagcaggattctaaaactggcctctaagattccatgccctcatttccagaacctgtgactatgaagcactctcactccatgattatgctgcgttgatggcattgttgaatttagggaggttgtcaaggtgggcctgattgaatcgcatgagcccttgaaagtaaagttttttttctggctgttttcagaagtccaaaagatccagggcatcagaagcatttgacacactattgttggctttgaagacccactattgttgggtcaagtggaaggaccagaaagccaccatgaggagctgagaatgcttcccggctgaagccagcaaggaaatgggggcaaggaactgaattctaccaacaacgagaatgagcttgaaggaggacccctgagctgctgacgaaaatgcagccaaccaacaccttgattttaatcttgtgagatcctagcagaaaatgagtcataccatcagatatggtttggatgtttgtcccctccaaatctcatgttgaaatgtagtccccagtgttgaaggtggggcctggtgggaggtaattgtaacataggggtgggtccctcatgaatggcttagcaccgtctccttggtgatgaatgaggtcttgctcagagttcatgtgagatctggatgtttaaaggcatatggcacctccccgctcactctcttgtgctcctgctcttgccaatgtgatgtgcctgttctctaccaccttctgccatgagtaagttttctgaggccctcaccagaagcagcatgcttcctgtacagcctgcagaaccatgagccaattacatctttttttaaaaaataaattacccagcttcaggtatttcttttttccttcccttccttcctccctccctcctttctctttccttccttccttccttctttcgacgaagttttgctcttgttgcctaggctagagtgcaatggcacaatcttggctcactgcaacctctacctcccaggttcaagcgattctcctgcctcagccttctgagtagctgggattacaggtgcatgccaccatgcctggctaattttgtatttttagtagagatggggttttaccatcttggccagggtggtcttgaactcctgacctcaggtgatccgcccgccttgaccacccaaagagctggaattacaggcgtgagccaccacacctcgccagatatttctttatagcaacgcaaaacggcctgaaacattatcccagacttctgacctataggacaaatggggtgttgttctaagtgtctaagtttgtggcaatttgtactcaaaaataaaaaacgaatacgtactttgttcacagaaaggctcaaaagctaaatgctcttattttaagcatatgctttcatttcttttaaaaataaccctaagtaatattttttattagatctagaaaactattcatactctgcaataaaacttttattttccctcaaaagccatgccatagtattgccttctatttgtgttggacagtgaggccattgcctggtaacactggccttccttttaaggaaagagaaaaagtatatatcacaaaaataaagcacaaagtcttcatggctgttgctttcatcaacaaaaataaaaccttagttacaaatcacatgatcttcaggggagaagtagaaatcactttgctcctgactctgcaatactggaattttccttggaaatagtttcctaaaaagaagagtatttctttcagaaaaaaagagcattttaaaacgtttgattttacttattttttaagtagcaaatgcatttacatggctcaaaatgttaaatgtcaagactcttccatcctgtccctgagttaacccgcttcccatctccagaggcaactaatgttgctggtgtttttccccattgtttttttccacttttatttttataggtatgataatataaaatccgcactgttctgaaacttgctttattttcctgtcaataggttctggtgatttttccaattcagtacacagaaagctcctcattctttgttaagttcatcacatcatattccagtgtatgaaaatcacatcattaacctgctatggtctgaatgtttgtgttacccctaaattcatatgttgaaacctaatccccagtatgatagtattaggaagtggggcctttgggaggtgattgggccatgagggcagagccctcatgggtgggattagtgcccttctaaaaaatatcctgtatttttagtagagatgggtttcaccatgttggccagatggtctcaatctcttgacctcatgatccacccgcctcggcctgccaaagtgctggggttatggtgacatgcacctgcagtcccagctacttggaaggctgaggcaggagaatcgcttgaacctgggaggtggaggttgcagtgagctgagatcacgccactgcactctggcctggcgacagagcgaaactccatctcaaaaaaaaaaaaaaaaagagatttcggaatgctatctcatctctcccactatgtgaagagagaaggcttcatctatgaaccggaa

SEQ ID NO: 1886881 - DNA, 4001 bp, Homo sapiens
aggtgtttgggtgtccgagggtttgcaaaagaagaaggcatggagtctatggtggagtcacatggtggagatctagctaagtcagaggcctggagaggtgtcattctagctgggcggcaggtgacacacaatcatcccgagttgattggaaaaacacctgggattgacccggagtttgttctggaatgttttcactggaatgaaagctgagcggtccgcaggccatatagtattggagaaaacatagccctcattcaaaaaggctgccagagaaaaggtgtccacaaggaaattcaggggttttgtttgtttgttttgggattttttctggagacagtctcactctgtcacccaggctggagtgcagtagtgtgatctcaacctccaccttccaggttcaagtgattctcctgccgtagcctcccaagtagcttggattacaggcacccaccaccacacccagctgatttttatttttattttttgtagaaacaagatttcaccatgttggccaggctggtcttgaactcctgacctcaagtgatcctcctgccttggcctcccaaagtgctgggattacaggtgtgagccaccacgcccagccaggaaattcagtttctgaaaatacacctgtggatctctagccttgaacatccttgtgtgctgctttaaatggctgatcctcaatgcctcccttccaactcacacacgctcgctcccctacatcaatctcccagaaaaaggaacctattttattcttttcttttcttttttttttttttttttttttttagagacaggcctcaccttgttgcccaggctggttttgaactcctggcctcaagtgatcctccggccttggcctcccaagttactgagttcacaggcgcgagccaccacgaccagtgaagcctatattaagcccttttatgctcactctgcgatactgcagagagggcagggaggaagcagaggtgccctggcatcttcagctggcggtgagcagggcgctgagggtgggagaggccgggcgcctggggatgggaggcaggaccgcaccttcacagggatgctgccaccctaccccggaggtcagggcctctcgcccagctctggctctgaggtcctggagggagggagatgctgttgcgactcagaagatcaggggagggccacccccattcgagaaaagtgaaaatcctgagcctgaagcagaagtggagacggttggagcggaggcttcagagggtggcgttgggaagagggtctggcgccgccgtgtggactgttcgggctcacggggctgaaggctccgaagaccgagacctgtgaaccgtggggaggctccatgcggatgggggccacagcccccgccggagcccccacactagccctggacttctccaccggcttacgacatgatagctcaataagctccttatttaacgcactgttgtatcaggtccctgtcgcagccactggccctatagcctaataaaggagcgggtgcacgcattggattggtgagctaccgccacagcaacaagtcctaatcaaccatcccaaacggtggctggaacaaggttctcgcaggcctgtgcttgggcttgaacgctgggccggccgctgcgctctgtggctccctgcagacctgcggatcggccagggggctccgatccttttgggccgtggctgaagaagcagcggctgcaccagagaagtccttctgggtgaaggtggaagcgcacagggaccgcggaaccgcccaaggcgtcttccggcgtaggctcagaactggcaggctttcgtttctgcttcattccatggccagagcaagccacgtgggcaagcccgaaaccagggggcgggaaagtaccctccacccacaaggaaaccatggcaagcggtggttgcaggtagggctgaggaattggggccgatagttctatctatcccggtgagtgaggagacctgctttgggggttgcacagtctgggtctgcccttgcagtggtatctgtctctgtgaagactccaccacgggtcgccatcaggtcagagaccctgacaaggtaagaatttgcattttcctctgcacacaaccctgttcccttcccctccgcatgcctaacacaacactcccttcccccccatgcctaacagagagaaaggagagagacagttcttgagcccggttcttcctgcttgagcttggtgtgtcaaccaaaagagtcaaactctgtaaaatatttgaagggatttattttgagcctactatgcatgaccaatggcccatgacagccttcagcagatcctgagaacatgtgcccaaggtgatcaggccacaacttggttttatgtgtttcagggagacatcggacatcaataatatatgcgacatgtacagtggtttgatctggaaaggctggacaactggaatggggttggggaagtggacgacttccaggttataagtagatcgaaagattttctgattggcaattggtggaaagagttaaattactgtctaaagacttaaaatcaacagaaaggaatgtttgggttaagataagagattgtggagaccaaggttttatcacgcaggtgaagcctccaggtggcaggcttcagagagaatagactgtaaatgtttcctttcagacttaaagagtctgttctatcagtaagtccaaaaggagggatcgtataattaggcatgactgggctccccttcccatcatggcctgaactagttttcaggttaactttggaatgccctttgctgagtggagaggaggagtccattcagatggttgggtgagcttagaattttatgtttgggtttcagttggcatccagtatcccttcccccaagtttggggcccctcccaaaggagataggcctgggtctctcctcacatccttgggggtctcagaactgcagactcaaaccttttgcctcaaggaatccctttgatgatttgcataaacccttgggaggctgcaggggggctgctctggagctgagacacagcgagtcaatctccctccatcccccttttgtcttgttctcaccctgaggctgcaggcctcaagttttttggctggattcttcccaaagcaggttgggggtgcaggtactgtaatcacctgatgggttcttcctgcctactgcacagacaaaaccaatccactgagaccatggcattgcagtaaagaaagagtaattgacacaaggccgggcacacaggaaatagttattactcaaatcggtctcccccaaaacttgaagattagtttttcaaagatagtttggtgggcagggtctagggtagggtagaggtgctgctgattggttgggcatgcagatataggggtatggaaaatggtccttgaatgctgagtctgcttctggttggcagccacaggactggttgagtcacgagtctcgatggagccagaaatgcataaagaaacatctttccttatgcagatgttgatcagctgtgcttacacattcctttgtaaggacaggacagtctcccctaagttaggggacaaaagtgactcctactgatggcattagctctgcccctactctcagatgcaatgccagggactgtgaggactagagaccctggagctgctggctgggtgtggtcgggggccagttatcagcctctctgaactccatgtccttagtactaaacagaagccccttttgcagggtgggcactgggaagcactgttggggccatcctttgttggtggcctcttctcttccatctcctctgggttttcacggctttttcaggagcaggccttgccaccctgagtgccctccatgaccacagctaccttctgaggaaagaggcctcgggggtcctctctgcatgtagttgccgggcaggcctcgcctggctgtatatgggaatcacctggggaacgttacaaaccactattgtgttgccctgcctcccagagattctgcaccttgtatta

SEQ ID NO: 1886882 - DNA, 4001 bp, Homo sapiens
ggagaggggtccgccggtgacctagggccaaaccctcaggagtcctgtcttcaggacctccttgagccgacttccaccagtgaagagagagctcaagggcgcctgctggggtctcaggacgcctcttcggatccgaccttggacccctccaggtgaaaaaggatgggctcaccacatccgctgaccaggcagggcctcgctgcagcacagaatgttcccatgggcctcaagacgtagtgtcagctgaaaattcactgacccatgagccctctgcctccctcctcctttggaagagcagtggcctgccccgcttctaaaagccctggggctcctgcaagctgatactgctttccaggacacatgcaaacagggacggggcgattccgaggtggaaccaaggcgaccacgcgtggcactggtgtatcccagagcagatggtgtggatgtgtgtcaccgagggcatatggggtgatggcgaaacaagcaatggtgtccaggcatgtgcccaactgaaggggggtacaagtgacctttccatcaatgccaagcaaaatcaaagaacacctggaatccaggagggggccaaaagattcagggagtcagtccacccaggagcagaggagaggacatccctcaagaatgagacaggagatgcagaggaaatgcgacaccgcgcccgtcatagaagaaaaggccagtcatggtcgcttaccattgcttctaggcaatccactacccatgaggtgaaacatggagaccaaggtagcttccctgtctgagacacatatgaaagctaagagctccagggtcatcaaacctgcccaatcaagcagaaacaggtttggagagagacacaatcatgacaaggatgtccaccaactgtctccctgatggactgggaagtgatcttttttgaagacattcagccagacctagaagcatctaggcccctcagaaacaagggagacagagtaagagggaggacagagcaggggccagagcccaggcaggatacagcactgtgccaccgccacgggcataaggggaggggtgccaaaagggtaacttgttcagagaggccaccatgacagggcttgttgccatctcccattcctggcttcctcttcaagactgtatcgtggtgtggcttcacttctcagagaagagccgtgaaaacatacagccatcttcttggacgtgggcctgctcctctcctgcaggacagtgagctcctgtggggcttttatccttggctggagtgtggtcatcttgatcctagaaaagaggccactcaggatagggatgagatttcaattgctcggggatcgacgcatctcctcacgttgtcgaggccttcacaaacccaaagtggaaccgacaggaaaacgatggacaactggccacaggacccagggagagacgccgaaaaaggctcaccaaagaccgactgacatgcaagaaattgctttctggtgcacggggcacattcgtccaaacacacacacgcacaagggcacacacacacacacatacaaaccgacagagagagggaaagaaatagagagtgatagcgagagagaagagaatgggacacacacacacacacacacacacacacacgcacacagtcatacagcggtgtcatggaagcacccccacctcagccggcaggcaacccttgaggctgcagggttctgctctccacgcgaacgacactcgggtgagagagcagcccacggacacacaggcagacctgtcctccagatcacgggggcacgacttttggggagactcacccgaacaccctccgggcaggcctgaagatgggatgccgcgctgcttccccggactctgcctgtggtttcgtcatcctagtcggcccatttcaggtcctggcgtccggagacgttcctgtgtaccccgtggagaagtcaggccggagcctcggagccccgacaccgaagccctgctacggagggctcctgctttgcgaagcctcagggagtggtttctacgacaaccctgggaatcgctgtgatggggagaagcggctctctccttgcgcatgcgcattgacttggccaagtcttgcgtagctcctggaagtcaggctgaggtccctttaaacaatggcagctgcgcggaggcagtggggcggttcttgctgcagcagcggtggcggctggatacggggcccagtatggggcggcgtgggagaggggaccgcggacgtccagtaccaaaccgtgtcacctggagtgactggctctccaagggccagctggccatcgtatcctggagatggtcaacaaagctttgaccctgaccagaaaggaaaatgctggcagtgccctggactgaggacagccaggacgtatcacgcttacctgggaagggcccatacacaaacggtcctggagaagcacagggcctgtcaccaagatgaacaacatctggggattgtgaccctggggactggctatgtgggtgtactgtgtgagctgccccaaaatgccacccagaaagtggaaatggccctggaaagctgtagcagggaaacccctccctggtgagttattctccacctgcctccctctgttcctggcagccctgccccatctcgattttcaactccagttgtgcctgcctggagggtggcatggccagcgttagtatctccttctgcagctcagtgatgggctccagcagccctcaccatgcctcagaacctgagacccttagggaaggacaggacatgctgcaaacacaaacccggtgagagagggtcctccggccacagaggtcacaggtaggggtctatagactccagttctgagttcctgaccaggtttcaaccatgagcatgctctttaaccttattatttcttgtcattcccatctgtgacgtggggaaggcacccacctcagaggttttgtgagcaataaatgaatacgattaaagtgcctttcctggtgctacacataaagccaggcatgagtcctcatgcagctgccccccaacatccaggtcccacaggctagcccagaccccaacattgggccagttctcaacagatgcctggatgccaggcccccctggagatactgggaccctggcctgggcctggacagaaggtgttgctgtgccatttggagatgaccacataggtgaggactggggcctatgtggccctgtgaaggggtgtgccctaaggtggggcttgggtgcctcactgggagggcacaggatggaagggcaggcaggtgagacccaaggccactctataccacgttttgaacaaacccatcactctccacctgcagactcagctctgcatatttaagacactattgggcccttagttaaaaaatgatattttgcttgcacactcagcgttctcatccaacatcaatggggaatcaaaaatcttttatttggaaacaacaagtaagggaagtaatgctgaaaatttgtcatggctccataacccatatctcctctgaggattaattattttcttaaaatgcaacgtgtactgttagtttaaatcatcccaactgtgataacactctttaaatcttcagtaaaccttcacacttaaaccacctgcagatgagagtaaatccgttaggtgagaggagagtgagcactcagtggaggtgaaataaaatcaggtaataagaacttagattgtggtctctcgacacctcccgccctccccatcagaatgtggcagctgaacaaggagacatggcaggcctggccacagtgcccagtggggttgcccaccctagctcttaggaaactggatacttggggccagtggccacccagggcctgttgtccacctgggtcctaggggtaaacctaagacctgtgtccacctgtgtcttaggagtaaacctaagacctgtatttcccctggggcctgatgtccacctgaagactggagttcacctgtggcctactgtccaactggggcctgaggtcactagggtcg

SEQ ID NO: 1886883 - DNA, 4001 bp, Homo sapiens; identical to SEQ ID NO: 1244014

SEQ ID NO: 1886884 - DNA, 4001 bp, Homo sapiens; identical to SEQ ID NO: 1244015

SEQ ID NO: 1886885 - DNA, 4001 bp, Homo sapiens
caatgggaaagcatgaagagatgacaggaaataggttcagagctttgcaacattgtaaagtgttaccagcgttaacaatgttcttagaagaaagaaaaacattggaaaataaaaagagaaaggtggttggaggtataaaaaggagatggaggaagaaaagaatataccaactggaagagcaaaagttgaaaacacacaaacttatgagaacattttaactttaactgaggaatgttcagtgacacaatagagctctccccatctcttctccctttctcggtgctctttttcccccactatcttcttcccctcgccctctccccgctgtagtttgttcttcttttttgagatggagtctcactctgtcatccaggctggagtgcaatggtgagttctcagctcactgcaacctccgcctccggggttcaagcgattctcctgcctcaggcgctggagtagctggattacaggcgctcgccatcacgcccagctaatttttgtatttttagtagagactgggtttcagcatgttggtcaggcaggtctcgaactcctgaccttgtgatccgcccgcatcagcctcccaaagtgctgggattacaggcgtgagccaccgcgcccggccttgtcctcatcgtcttcttttccaccctcctttctcctcaccgttttcctccactgtcttctctaccacactgtcttctccctgcactttctccccactgtcttcttccccacctttctccccatcccactttccaaggtctttcccaccctctccgtcccctcctccccctctccccgcagtcttccgggccccactgcctttcgcccgcagccaacactgttcagttctgaggtagcggcgggggcgggggcggcggcagccgtgatggccctggcagcgactctcctgggtctcctgttggctgttggggcggagctcaggggcccagctcatggggctggctgggcgcacagacacaccaggcgcagggacacaggcgggcgcacgcgtggagcgcttctaggtgaaaggcagttggagagcgcgagaagggggtgggcaagaagacgatcgggggcgaagacggtggggagtggaagaggggagaagagggtgcggggagagaaaaacgcggcaggaagtcgctgctgcgagaaggtggggaggggaagaagatggcggagaataagaggctggggaaaaaagacgatgggagggggagagaagaaagtgggaagaagattgcgactgacagacgctgctgcgagacggtgggaggacatgggaagaaaacggtgtgaggggaagaaaacgggggagaaaacggttgtggggaaggcgcggggagaagacagtgaggagaagagggcgtggggagaggacggtggggaagaggaagagaagatggtgaggggagagaaaagcgcggcaggaagacgctgctgcgagaagaaggtggggatatggaggcggcaagaaaatggagaagaggctgggaaagaagacgattgggagaggagaagagggtgggaagaaggcgatggggagaggagaagagggtgggaagaaggcgatggggagaggagaagagggtgggaagaagactaaggcagacatgggaagaaaagggtgcgggatgaggaagaaaacggttggcggtaataggccgggagaagacggtgaggagggggaggggagaagagggagcggcgggaagacgctgctgggggaataggcgggaaggtggagactggaagccagcgggtggagagaaggagatggaaggaaaagctgccgccacaggaacccgtgctgcgaggaatgggagagactgaggggaagaaaacggtggggaaggggaaaaaaaaactgcgggggagaagaaggtgcgggaagaagacagtagggagacggcagaagaggatgcgggaagaccgcagtggggaagaaggaggggagaagacggagaggggagaaaaaggtgggaagacgttgggaaaggagaagggtcgggaaggagaggggagggaaagagcagaaggtggggaagaagactggaaaaggggtgaagggaagaaaaggatggggagggaggagggaagagggttggggggaagaagaagggagtggaaagcggcgaagacgaccttggggaaagagatggagaggggaaaaagattggtgggagagaagaggatgaggcagggaacgaggtggggaggggaagagaaaggcagaaagacgggctgagaagagtgctgggagaagaagggggagcggagggagggagaagggaagcggggaaagacgatgggagaaggtggggggggagaagaaggcagtgtgggagaagagttgagggaaaaagaaacaatagtgatgctaatgttaaacgtcgtcgtcttggagcaaaagaagcaagtgctgctttagactcccggcctaactttgttcaataaatccccacttccaaatatcttgtgattgcagtgtgggtcatttttagtacttagatccagagcagtctctgattgttagtgacagtgctgtcaaattgcatgctgttcaccagctataaacgaaaacatcacatttccttgaagtgcactttaacgtgtaattcaaagacttttccaagaggcttactggggaaaaatagaggtgtgtacctttggcattggacatggagtctctgattttagattgtagttgtttccccaaatctttaagattgtggcagaaacatgattgtgactacggcattcattttgtagggcagtgcgtgttattttaacaaagggtaaactgatatgcctataagaaaatgtaattcaatttaattcactcatacaaatttaggtttccttaatataaaaaaacccaaaaacagttaaattgccttagtcttttaacataacttcatgcttagagtcaagagaatttgtaaatgcaatcctgtaatgctggtgttgcgttatgcctatataaaatacatgttaaacctaaatgttgcttttttatttggcattatggaacttcatagaagtttatgtgtattaatacaagtgaacttgacataaattaattggtgaatgataacttattgcttgtaaaataagcagttaaatgtaaggatgtaaatacattttatattaccctatagtttattttaaatattttcttcttttgtattctagtttaaaatcctggaatacttactgatatcttatttccccatgaaaaggcttccgctaactatactgtatttccaagcaaatgtctgtaccagaacatcaagtgtagaaattaagcaaaatctgtctttcaggacaggtgcagtgggtcgcacctggaatcctagcactttgggagcccaaggcaggtgggtggcttgaactcaggagtcccataccagcccgggcaacatggtgaaaccctgcctgtacaaaaataaacaaattagccgggcatggtggtgcacatcttgtattttattcaatcaaattgaaggcttcatttacccttggaaaagaaaatgatttaatgtactcatatagaaaataattaacctcatgcccagaacgggttcacttacaggacacgttcatttattctgtcagacagtgggttaaatgtgtctgagcaccgcctatgagtcaggaacacaagtcagtatccgcactgaatattacccaagctttttccatctgttatatagagtagcatagataacttcatggacatcatctctttaatttgttgtggaatacttaacatgacctcctcgtatataattatcagtgctgttcttaaatagatgttatcatctggatatttactagacttaaaacaatgacttactgcagaaatgtcatccatatctaatgtgtactatgctaactaagtctcacatggtggttttggttttaaataagctcttggaaatcaggcggtttgcgttttgttttcatcttattgtactatgaagtaaagt

SEQ ID NO: 1886886 - DNA, 4001 bp, Homo sapiens
tagcccaggcaggatacagcgccgtgccaccgccacgggcataagaggaggggtgcgaagcgggtggcttgtccagagtggccagcgttccagggatggggcttgttgccgtctcccattccaggcttcctcttcaagactgtgtggtggtgtggcttcatttcgcagagaaggggcgtggaaaggtaaaaccatcttcttggacgtgggtctgctcctctcctgccggacaatgtgctaccgtggggcttttgtcctgggctggagtgtggtcctctcgatcctagaaaagaggccgctcaggatggggatgagacttccattgctccgggcccgatgcatcccctcacgttatcgaggcctgcacagacccaaagtgcaaccgccgcgaagacgatggacagctggccgcaggacccagggagagacgcagaaagaggctcaccaaagaccggtccacataaaagacatccctttttgacgcacagggcacattcgtccaaagacacacacacacacacacacacacacacacacacacacacacagagggaaagaagcacacagagggtgagagacagagagagaagggagaatgggagacacagccccagccccagtcccagcgcagtccctttgtttcctgacattcgttacagccaaaagatccagggagtctgtccacctgtgagcggaggagaggatgtccctcaagagtgagacaggaagcgcaggggaaatgcacttgtcctagaagacaaggccagtctcgccggcctagcgctcgctcatcctaggcaatccacccacccatgaggtgaaacacggagaccgaggaagcttccctgtctgagacacgtatggaagccaagagccccagggtcatcagacctgcgcaatccagcagaaacaggcttggagagagaaacagtcatgacacggatctccaggaagtgtctccctgatggacggggaagtgatcttcgtagaagatattcagccagaccgagaggcatctaggccgctcagaaacaggggagacagagcaagagggacgacagagcagaggccatagcccaggcaggatacagcgccgtgccaccgccacgggcataagaggaggggtgcgaagcgggtggcttgtccagagaggccagcgttccagggacggggcttgttgccgtctcccattccaggcttcctcttcaagactgtgtggtggtgtggcttcatttcgcagagaaggggcgtggaaaggtaaaaccatcttcttggacgtgggtctgctcctctcctgccggacaatgtgctaccgtggggcttttgtcctgggctgcagtgtggtcctctcgatcctagaaaagaggccgctcaggatggggatgagacttccattgctccgggcccgatgcatcccctcacgttatcgaggcctgcacagacccaaagtggaaccgccgcgaagacgatggacagctggccgcaggacccagggagagacgcagaaagaggctcaccaaagaccggtcgacataaaagacatccctttttgacgcacagggcacattcgtcaaaagacacacacacacacacacaaacacacacacacacacacacagagggaaagaagcacacagagggtgagagacagagagagaagggagaatgggagacacagccccacacacagtcctaccgcggtggccgagcaatacacgcccccaggcaacccctgcggctgccgggttctgctctggaggggaacaaccctcggctgagagaacagccctcgggcacgcaggcggacctgtcctcgagatcacgggggcacgacttctcgggagactcacccgaacaccgtcctggcaggcctgaggctgggatgccacgctgcttcccccggactccgcctgtggtttcctcatcctgctcggccccttgcgactcctggcagccggagacgttcctgtggaccccgtggagaggtcaggccggagcctcggaggcccgacacccaagcgctgccacggagggcccgatgcatcccctcacgttatcgaggcctgcacagacccaaagtggaaccgccgcgaagacgatggacagctggccgcaggacccagggagagacgcagaaagaggctcaccaaagaccggtcgacataaaagacatccctttttgacgcacagggcacattcgtcaaaagacacacacacacacacacaaacacacacacacacacacacagagggaaagaagcacacagagggtgagagacagagagagaagggagaatgggagacacagccccacacacagtcctaccgcggtggccgagcaatacacgcccccaggcaacccctgcggctgccgggttctgctctggaggggaacaaccctcggctgagagaacagccctcgggcacgcaggcggacctgtcctcgagatcacgggggcacgacttctcgggagactcacccgaacaccgtcctggcaggcctgaggctgggatgccacgctgcttcccccggactccgcctgtggtttcctcatcctgctcggccccttgcgactcctggcagccggagacgttcctgtggaccccgtggagaggtcaggccggagcctcggaggcccgacacccaagcgctgccacggagggctcccgcgttgccaagcctcggggactggttcctaagacaaccgtgggaagcactgtgaagcaaaaagcggcgcacgcctcgcgcatgcgctttggctgggccgactcgcgcttggctcctggcagtcaggcaggctgcgtcccctttaaatacgggcggctgcgcggcggcagggggcgcgcctgctgcagccgcggctgcggctggatccggggtccagtttggggccgcgtgggagagggggccacgggtgtcccagggccgagcccccaggagtcccgtcttcaggacctccttgagccgacttccaccgatggacggggagcttcagggcgcctgctgggttctcaggactcctcttcagatgtgattttggaccactctgggcgagaaaggatgggctcaccacatctgctgaggcaggcagggcctcgctgcagcacagaatgatcccatggccctcaaggcctgctgtcagcggaaaattcactgatccgtgagccctctgcctccctcctcctttgaaagagcggtggcctggcccgcttctaaaagccctggggctcctgcaagccgacaccgctttccaggacacgtgcagacagggacggggcgaatcccaggtggagacaatgcgatcacgcctggcactggcgtataccagagcagatggcgtgaatgtatgtcaccggaggcatgtggggcgagggcgaaagcaacagtggtgcccaggcatgcgcccggtagaaaggggatcaagtggcctttccctgagtgccaagggaacacaaagaagacctgggaacctggacggggcttgtgcctcagccaagccacatgttgaaatgcctgccagaggaccacagaggtttctgcaacagtcaccccacccccaaccctccaccacccagctagccctgacgcaacctcccctgcacgcagccccagcgccagtcccagcgcagtcccttttgtttcctgacattcgttacagccaaaagatccagggagtctgtccacctgtgagcggaggagaggatgtccctcaagagtgagacaggaaagcgcaggggaaatgcactttgtcctataagacaaaggccagtctcgccggcctagcgctcgctcatcctaggcaatgcacgcccccaggcaacccctgcggctgccgggttctgctctggagaggaacaaccctcggctgagagaacagccctcgggcacgcaggcggacctgtcctcgagatcacgggggcacgacttctcgggagactcacccgaacaccgtcctggcaggcctgaggctgggatgccacgctgcttcccccggactccg

SEQ ID NO: 1886887 - DNA, 4001 bp, Homo sapiens
gagcaacagactatgatcccatgtgagagatgagaaaactgagccccagggaggagaagggctccaaatagattccctgactgagtctaggctctagagtcagacacacccaggttcaagtcctaggtctaccactcaccaattctccttggcaagtacttgacctcttggtgcctcggtttctacatctataaaatggggatgataataactaactcgtgggagctgggagggtgaactgaagtgatgtatgttattgttgagagtgctgcctgacacacggctgcttgtcattcttgttattttgtatgcctgtcattcttgttattttcagagtatttcacacttctatgaaatatccacagaggcgtgtaatggagagtctcctctgggggcaggcaagatgtcagccaaccctcatcctagcccttccctcccctcaccaccctcaacctttcttgaaggtcacactaggctggttctctcccagcccccaagaaactccctgccactgcctggccccaccttgaagctgcccggtggccctggcagatgaattgcatctcctggggccgcacccggcatgtggtcatcctgcctctgcctgcggcagggcctggagcccggacatgcctggcaggcttccagggcttctttggtaggacgccccgccactccctctgggcccctctattctgggagctgtaatttagacagccttctccgccccaattgctatctgtgacagcagtccctgttccccagggccctgcccacccctccttgcctgccttttcataaacagctcccgggctgccctgttatcttgggcactgtggctctggggaggaggccctgccaccctgaagatacaacgaatccctccatcccagggagaagctgacccaatgcagacagaggtgggataaagccctcacccaccaaagcccaatatagcagccctcagaacctgaccctgaagtctgctggatggggtggggtgcagagaagaggataggctgtcattattcccccaacaccctggggactgggtcagccggggctatggtctccctaaaggcccctgcctcagccatgcatgttcagccacaggccacaaaatgtgtgtgtgtgtctgtgtgttgagggtatcaataatagcaacaaaagtgatgtttctaaaatgcaaatgtgccgatgtttctaaaatgcaaatatgccaatgtttctaaaatgcaaatgtgcctggggaggctaaggggagagcatctcttgggaccaggagttcaagaccagcctgggcaacatagcaagactccatctctacaaaaaaaaattaaaaattagctgggtatggtgaccaattagacctagctacttgggaggctgaggtgagaagactgcttgagccagggaggtcaaggctgcagtgagctgagatcatgccaccgcactccaacttgggcaacagagccagaccctgtctccaaaataaaataaaataaaacataggccaggtgcggtggctcacacctgtaatcctagcactttgggaggccgaggtgggtggatcacttgaggtcaggagttcaagagcagcctgggcaatgtggtgaaatcccatctctactaaaaatacaaacaaattagcctggcgtggtggcaggcacctgtaatctcagctacttgggaggctgaggcaggaggatcacttgaacccaggaggcggaggctgcagtgagctgagatcctgcttctactgcactccagcttgggtgacagagggagactccgactcaaaaaaatcaaaatcaaaataaaataaaatgcaaatgagattgtgtcactccctgactccaaaccttcagtgtttccccacagcccttacagatgaagctcaaaagaccctccaagctctgccttttctaccacttctctcacctcagtgccttggcacgagcttccccggcccctgcctggacatcgttctcctcttcacctaactcctgttcatcctgcaggtctcagcttataagttattgctcatggaaccctcctgtgacatcacagacactccctccctggtcctccctttggactgggatgggtgtccctcctgagttcaccagaagcaccacgcccttgtctgtgcactggtctacttgctgccagctataagtgctcccagggccgaagcttcctcttatcgttattttttagtcgctagcctggtcctggcacacagtaggttttccaaatatatttgttggaagaatgtgcaaatgaatacatgaatgactcctctggccctccaggatgtatgggtgtcttgagaggtatttgactactttgtgccttccattttcttttttgtttgtttgttttttgaggcagagtctccctctgtcactcaggctggagtatagtgacacaatctcggctcactgcaacctctgcctcctgggttcaagtgactctcctgactcagcctcctgagtagctgggactacagacatgcgccaccccgcccggctaatttttgtatttttagtagagacggggtctcgccatgttagccaggctggtcttgaccccaagtgatctgcccgcctcagcctcccaaagtgctgggcttacaggtgtgagccacagaacccggccatgccttccattttctttttttttcttttttttgagatggagtcttgctttgtcacccaggttggagtgcagtggtgtgatcttggctcactgcaacctccatctcctgggttcatgcaattctcctgcctcagcctccctagtggctgggattacaggcatgcaccaccacgcctggctaatttttgtatttttagtagagacaggatttcaccatattggtcaggctggtcttgaactcctgacctcaagtgatccaccacctcagcctcccaaagtgctgggattacaggcgtgagccaccacgcccggccatgccttccattttctaggaaagcccagatgtcccttcatcctctaagtataacttcaggcttgctgcactgtctgtccatcttgatttggtcaatatggtagctatggccatgggtctgctggcggggagccccagcaggctctaaggatgcactctaggacaaagcaggcatccttgggttgagggggagaagggcataggaggagggcgtcctcaggccgtgggtcacttatgagcaacaagtctgttaccaggaggaaagacaagccaaatggacaggtcaagtccttattttggcattttctgctgtgctatggagacacactttgtatgttgcttgctccaaagagggaaaccagaaataacaacctacaactacagccactaagctggagttagattgtttaccggttatcccaataactattggaagacctctgaaatgtcagtattcctgcatgcaaattgcaattcctgtggtgccagctactcaggaggctgaggcaggagaatcacttgaacctgggaggcagaggttgcagtgagccaagattgcaccactgcactccagcctgggcaactgagtaagattccatctcaaaaaataaagataaaaataaataaaaaattcgctccgcatggtggcgtgtgcctgcagtcccagatatttggggagctgaggcaggagaggatggcttaagcctgggaggtggagggtgcagtgagccaagattcagccactgcacttcagcctgggtgacaaagtaagaccctgtctcaaaaaaaacaataaataaataaataaagcctctctcatgtctaccccatttccctgctttaattttctccaaagcacttactgctctctaatacactgggatttttgtggggtttgtttgtttttttttttccaagatggagtcttgctgtgtcacccaggctggagtgaagtggcgtgatctcggctcactgcaacctccgcctcccaggttgaagcaattctcctacctcagcctcctaagta

SEQ ID NO: 1886888 - DNA, 4001 bp, Homo sapiens
agggaaaagccaagctgggaactggcttatgcaaacctgcttcccatctggttcctaaataagatagctattacacaaagataaaaaagctacatccctgcctctacctccatcacatgtaaaatgtgtattcagtgaacgctgaccaaagacagaagaatgcaaccatttgcctctgatttacccacacccattttttccacttcttcccctttccccaacacccacacttctcccctttacttactgaggtccccagacaacctttgggaaaagcacggaccacagtttttcctgtggttctctgttcttttctcaggtgtgtccttaaccttgcaaacagatttcttgaaatgattgacactcaccttggttgtgttctttgatcagcgcctgtgacgcagcttcaggaggtcctgagaacgtgtgcacagtttagtcggcagaaacttagggaaacgtaagaccaccatcagtacgtaggagttgtgcattggtttggtctggaaggaggaaaattcaaagtaatggggtttacaggtcatagatagattcaaagattttctgattctcaattggttgaaagaattattatctacagacctgctatcaatagaaaggagagtctgggttaagataagagactgtgcagaccaaggttcttattatgtagatgaagtttcataggtggccacccttagagacaatagatggcaaatgtttcctgttcagacccatagaaggtgctaggctctcagccaatgtcttcaggatcagagaaagacctggaaagggaagggattctctacagaatgtaaatgtcccccacaagagacagcttggcagggccatttcaaagtatgtcaaagaaatatattttgaggtaaaatattgatttcatggcctctgtctgtcatgtgatgctgcactggagtcaggttggaatttggtatcttattgctagagagccttgtcagtcttcagatctctgttttaatgttggttctggtcagttctgcccaaattccaaagggaggagggtacaatgaggcctgtccagcccccactcctcctcatcacggcctgaactagttcttcaggtttctctggaatccctttggcccagaggcggggtccacgcgatcggctgtggggcttagaattttattcttggtttacggcagctttagggaggtgctctgagacccgaaactagactcgactttaacagacacagacgaccctgaaggtgagactgtctgctggtgggatgctgggcgagttgcttaatgtccctgagctgctatttgctaactgtgaagtgggatcctggtccctgacaggcaagattttggcacacggagagctggtgcacgtgggcggctgtcccctaaactcgcgtcccttctttttaatcataccccactggctgcacctacacctcctcccaggcacacaccgaagaggatgagctctggtcctcgaacctcttgtctgctcccaccaggcagattctctgttccccgtgcccaggcagcagtggtggacaccagcatcccggaatggtgtagaaaggctgaccccatcatagccaaagcctggggtttcctgtttccctcctcctcctccccactcctcccccgacccctccctcctccacttacccccatcccctgcataatgggtttctagctgcctcctctgcctgcccaaacaggacaggcaggaaaaactggcttggttctgagtaggcagtttcagggccttaaggagaaattcatcggccattaatcaggaccttccctccggggagttggcagcttcaggtgtggtctctggaaacaagccccacaaattattatcagagaacctctgtcttgggtggcagaggcagcctggttggggtgggcaccccggctacggaaaggagcagctccctccactttccttccggctgcatgtggagaggctcgagcggggcacagtccatgacgagatattaatcttgtgtttggatttttccttttttttaataaagaagaaagataaggtattgtgctcatcttgtaaaaatcaagcacacagtacatcagtctattctacaaagaaacacaacctaagcaaagatttgttataggcagtggccagttacagaaacagtaggacttgcattaggggttttgtatgggaaagaaagggagtcagacacagacgtgatggtggagacaggggcaggaagacagagcagctgacacttccagaaatagctggccagaggccagcaggagggaaacaccaacccgaggaaagagagacggggattgggagagaaattcagaagagactgaggcacgcacacagacagacgcacccacccacacacagatacggattcaaagagacacgcacactctgagtttctgagagtaagccactgtcagttcctggggtgagccaccagccacatggacacaatttcctctttttggtaagtctttgacctgtctgaaccccctacttaattacctataaaatgagtcattgcaaggatgacaaagacgctctccttgaccaaactccactcaggctcctttgagccttctccttgatgaagcctcatccttggcctgctgagctcagtgctagcaaggaatgctgctaaggtccttagtgagaatcttccccacccttgctaactaaccaagctcctttcaacaacttttcatcacctccctcaccctgctcattggctatccccacttgtctctgttgtattgagagttgaattcagtctctctctctcctcttgcaatagttttttttttttttaagagacagggccttgctctgtcaaccaggctggagtgcagtagcacaatcacagctcagagcagcctcaaactcctaggctcaaaggatcctcccacctcagcctcctgcgtagttgggactacaggtgtatgccactgcaccaaataattttttaaaacattgtagagatggggtcctgctttgttgcccaggctggttttgaagtcctggcttcaagtgatcctcccacctgggcctccaaaggtactgggattacaggcatgagccaacctatcagcctggtaatcagcctggtaatcacgtaaaacagacacatagaccagtggaacagaatagagaacccagatataaatccacacatttacagccagctcatcttcagcaaaggcaccaacaacatacgagcgaaaggacggtctcttccataagtggtgcaggggaaactagataaagatatgcagaagaatgaaactagacccgtctctcttaccatacacagaaatcaaatcagaatggattaaaggtaaaactgagacctgaaagtataaaactactggaagaaaacattagggaagtgctccaggacattgttctcagcaaagactttttcagtagggccccaaaagcacaggcaaccaaagcaaaaacagacaagtgaaatcacaccaagctaagaaccctctgcagaccaaaggaaaaagtcaacaaactgaagagacaacccacagaatgggagaaaatacttgcaagctacccacctgacaagggattcataaccaggagctcaaacaatagcaaacaattaatcgaattttaaaatgggcaagagacctgagtagacatttctcaaaagaagatgtacaaatggccagcaggtacatgaaaaaatgctcaacatcactaatcatcagagaaacgcaaataaaaaactgcaatgaggtcttctctcacctcagttaaaatggctttcgtcaaaaacgcagggaataagggatgctggcgaggatgtggagaaagggggaccctcacacactgttgtgggaacgttgattagtacaaccactatggaaaacagatggaggctcctcaaaaaaccaaaaggggccgggcatggtggctcacgcctgtggtcccagcactttgggaggccaaagcagggggatcacaag

SEQ ID NO: 1886889 - DNA, 4001 bp, Homo sapiens
tgtaagtgtgcactgtataggcacaaacggatatgtgtcagtgtacaagtgctgcttgtgcaagtttgtggctgtgtgtgcaaatgtatgcgagtgtgtctgtgcctgtatgcaaatgggtgtatgcaagtgtgcaggtgtgtcacacaagtgcaagggtgcatttctgcaaatgcacatgtgtgcaagtgtgtggacatgcgtgcaaatgggtgctagtgcacaggtgtgtgggtgtgcaagtggatgcaaacgcatatatgtgcacatgtgttcaatgcatgtgtgtgcaactgtgcacatgtgtgcaagtgtgtgtgtgtgagtgccctggaaaagagagagggagaggaggagggaaggaagagcagaaaaatacctatggtaaaagccagcactgcccagcagacatgtccaatggagagcaccaagaggcagaaacagcctctctttgttcctgtctcagtagcgggcatagtagcagtacaatgacttgtgctgcctgcctggcagatcacacaggtcacagatgcctcctcgtcacaggatgtggtcgctgcaccctgtcctaactccagtcctttccctcaccttcaccagctaaccccttccctccaaaccccctcccctgattgctgtcaaggtcagcaggccccgccccatccatgagcgagccaagggtagtatctgctcaatgccgtcactccgtgtgggccagcttctcctcgcccaggaacaaggggatttcctgactgtctctttaggcagggtgacgtaagctgttttgctagtgtagagccaaagagccttccaggccttcatttatctagatgtggagtcctttgggaatgagcatagcaggcttgttcctgcccagcatcttggaagatctcggactagtgctccctgcagatgattgggacctaagaaacagagccctgcagaaggactggcaagaccacatgtcccggggtggccagtgtttccagcagtgacacttgggattgaaaccaacctttgcagagcgagagaccccacagtaccagctgtgccactgactgggaagtgcccagccttggccctagagtgggaaaatggcctggacatgaaatgtgtggggacctgacacctgtgctggcccctgcagcagaggcagaggcccaggcaggcggggacctgcttttcccagggctctccagggagtccctgcacagccctcaagagcctgccctgcgttatcatcctcaaggtcaagaaacttccttgggggagtctccagagacaggcagcctggccatgccctggcggacccacccactctactccaggacctccggatttggtctgggagtctcggcacaggggagtctgccatcgaaccagccacctgcatcagagccgggtccacctcctccgtcccgctgtggctctttgagcctcagtttcttcatctgtaaggtgggaggtgaggatgaccaattcagtgtctggtgaagacaaaatttatccccttgtccagggctggcctggagcagaccctccccttcctcctcatctcggccccaggacaagcatggcttccctccctagccttcctcccttggagctccaggcactgaggactcctggcagatctcattcatctctctctctctccctctctccctctctctctctccccgacccccccccccccgccagaaagccacgtagatatccctctctcctggaaaactttcctgcccccaagccccggtggggtgcctctcctacggccttgcatgtatcccaaactttccctaccttcccatcaatcgtggtgagctggaattacctgataatctacctgcctctctcttggactacagtccccttgagagtgagactgggtccagtagactgttgtctgcccagtgcccagcacagggtagatgtccatgaaatatacatggaccagtgaccgactgagattgagacttgactggaagcatcttccaaatggctgctgggagagcagcccatccggcaccccagctcatgccccatcccccactcctccagctcctctcctcccaagtccctgccgtcacagccaagctcgcgctccaaggcagctctgccatcatctgatgcagactcgtcagctgttgccatggagaccagccagcagtgagctctgtgccctcctgctgcaggggccgagcagagcatgggggcaccctgaagcgtgcagagagaacccatcaaggaggaggcggggggaacgcgtggctctgcatccaggcaaacctggagttgggccccatctgcccctactctccttcctacacctgtgacacctcaggcaagttgcttcatctccctgagcctcccgtgaaatgcagaagatcccagccacccactgttattgaaggatgggatcgacccattagggcatggagctgtctctgtgtcattttggtgtgccaacccctgccttggctttctgggggctgttttgagtgttctctccccttgaactttgtgtccaactctccccacctcaactcagatgaggctgaaggaaggagagattccattcctacaatagcacaaaaagattttctgtgacatttgaaaacaagaagaagcctacaggtttgttaaccaaattttgaacttggtctggctctgagggctactaatgtgggggccacattggttgcttcctgcagtgagctaagggctatgggcaactctgctcatgaagagcttaaggtggcatctcacttgcaggacagcctccaggtctcactggagtcagggaaagtgatggttgtcctatctccttgttgctttaaatggtagctatctctgaagatggctgaatgtccctgtgcccactggggactttgggaacagaaacatgccaagatgctacaaccggccctgggcacaaagccacctctccagctttccatgcccagcattagtcctggcatggagctgaacacctgtgtctgaggcaggcctaggccctgatgcaaaatgtaccacccacctccttctgccaaatgtcaactcgacccagctgcaaggcagagaaaacttggcagtgttcccaaaggggacaggagattgtctcttttgttaaatgaatggatggatggatggaggatggatggatagatagatagatgggtggatgggtgaaagggtgggtggataggtggttggatggatgggtggatgattggatggatgggtggatggatgggtgggtgggtgggtggtgaatgggtgggtgggtagataactggatgggtggatgggtggttgaatcggtggatgactaggtgaaagaatggatgaatggatgggtgggtggatgaatggatgggtgggtgggtaggtggatggatggatgggtgagtgggtggatggatggatgggcgggtgggtggatggataggtgggtgggtggatgattggagacaggaaagaaagagagagagagagagagaaagggagggagggagggaaggagggagggagggaggaaagaaagaagggaaggaaggaaggaaggaaggaaggaaggaaggaaggaaggaaggaaggagagagacagaaagagagagagaaagaaaagaaagagagagagaaggaagggaggaaggaaggaagggagggagggagggagagaggaaggaaggaaagaaggaaggaaggagagagaaagagagagagagaaagaaaaagaaagaaagaaagacacaaagagagagagaaggaagggagaaaggaaagaaggaaggaaggaagacagacaaagtgaggaagattgcaccaggattgcctcagatgggtcttgctatgaataaaattcaataataccaagaagagctttacaaaaagagagagagagataaggtcaaagagacttttatgtgcttcatgaatgaagaacactaaggagaaacgttccagaaaatttagaggaaaaaaaaagtggctgaaca

SEQ ID NO: 1886890 - DNA, 4001 bp, Homo sapiens; identical to SEQ ID NO: 1244026

SEQ ID NO: 1886891 - DNA, 4001 bp, Homo sapiens
tttgcatagactggctgacaggagactgctgctggtgtttggctgacccaaggctgctggactcactcaagcccatgttgctgacagaattcgacaaggcacggctgccaccaagagcgccctgggtttggtgctggtggtggagcaagttctgattgaccacacttccctggttaggctgggcagcaaaggacatcatcggatcattgcgaagcatcacgttccggcgggaattctgggcagacacagcggtgctggcctgagacatcaaggggtccgactgtgtcatcatgacatcgctgtggctaagtgagtccgaagtgagcaggtcctggagtgtctggttaccatagtgtgacatggaagagaaggtagctggcttgttctcttggatggtctgcatgggagactggcgtagggagttcagagatgaaggtccaaacaccgtgctgttaaaggagctggttggggagctcaggcccgagcccttggtggtatacgggaagctagaactccgctgcatgagtcccccagtgggcgatggctgggatggcgggagcgtgatgttatccagcaggtcgtccatgaggttttcagtcagccccatcattcagattcatggtgcctgccatgtcagtcagccgtagcagttccaccgtgcacggcttgcttactgaaggtgacaggctcgctgagctgctgtagagcatgggcgagagaggcgcatcgtcgtcctggacttcatccaactctgtgcttgccatgatgggcgacaggcggccactgactgtgctggcgttagaattggtgcgtgaacggaagtccgtccacgcatccagctcatcactgctgcgtgacgtggggctgccagaccacttggagagctgggagggactgtcgtcagctgattcgggggctgtctgcagggctgccttcttcttggctgtgcggccacggctcttggtatacttgttgctattgtccatggagacagcccgccgccggggggcttttccgctcttccccccatcagggttgatgatccaccaagagctcttgccagttccctcattctggacccgcatgaatcgactatgcagtgacaggttgtgccggatggagttcttctagccggcagagctgttgctgttgcccttatccttgaagtagggcacgcaactcaccatccactcgtagatctgggacagagtgagccgtctgtccggggagctctcgatggcgcgggtgatcaggtccgcgtaggacaggtttccccaggcgttccgccgcgacgaacatttcctcggctgcccggagcccccagccgcccccggctgcggcggtggcagcggttgctgaggctgcagcagcgcctgtgtacccccgctcagcccgcccgccgcggtggctggcccagacccggggtcttgccctccgggtgccagcacccggaccgagtcctcaaggagcagcccggagaccagcgtgcggctcccgccgccgccgccgatcgccatggccgagccggcccgtcccccgccgtcctcgtcgtcttcatcgtcctcctcctcggggatcatggagtcggcggccgtctcccccgagggcttggcagggctcgcttggagctccggcctttgcaggggccacgtacaggatcgcggacggctctggggctcgaactccgggtccagctccacttcgagcggagaaagcggggccggggaagccggtgcctctgccatcttcgccgcccgcccggccgcggctggggttctcgcgctctcctctcgcgccggggcggggtgcagcgggggagggacgtggacgccgcgaaggctccggctcccgggcgccgccgccgccgccgccgcctggggaagcacgagagaagagagaaggagagttggttatccccggccggagccccgtcctcggcgagtcctcgcccgctgccgccacctcccagtcttgccgcgcccgcctcccaggaacaggagaccatacttcttaataacactttttgtttaaagaaaataatgttttttaataaaaaaatatactgtgctaacacatgacatgtttataattttttatttctatttttcttttaagagatggggtctcactttattgctcaggctggtctctaactcctgggctcaatcgacccacccaccttggcctcccaaggcactgggattacaagtgtggaccaccacatccggccaattatttttaaatgaattagctaatagcttgaaatttttctgttttaacttgtagtatagtaactattggtagatataacctacataaatgaaacatctttagggtctttaacaatttttatagttacagtaggtcctctgatgccaaagcattcagaactgctacactagagcacagagatggaagaagagtagttgtgaaatgaggttgggataatgagtaaaagccagatttcacaagattttgtagacctccaggattttgtctgttaccgtgaaggcagcgagaagccattcaaatgttccaagcagagtgatgacaagacgagatttgattatgaaaatatcagtctcactacaatgttgagaatgaagtatatgagggcaaaggcggaatcacaaagattatcacagtaatccaggaaaacaaaaaatatatgaaggaaaattaacagtgaagaaatacttagaatataattaggtaaatacagtgatggataaaggagagagggggtgatgtaaagactgtgcgtagatttccaccacgtacaatttgatgacaataagtaccattaaaacaattactggaaaaggatgttgttggggagatgggaaatttagacttattttagacattcagttttaaacatgttgtattgaagtatcgttgacataagcaaacaaaggaatcaaatagttaagatgttgagaacagccctgaggagagctctaggatggaaataccaatttgggactcatcttgatagaaggtaactggttgtgggaatgatgagactaatgaagtagtaagtagaggctgcaaacagttgatcagttggccaaatcagaccttagacacattttctttgggccacactttttatacaaacttttaaaactagttatacacagttaaaaatagggagattattgctggacgcagtggctcacgcctgtaatcccagcactttgggaggccaaggagggcggatcacgaggtcaggagatcgagatcatcctggctaacacggtgaaaccccatctctactaaaaatacaaaaaaattagccgggtgtggtggcgggcacctgtagtcccagctactcaggaggccgaggcaggagaatggcgtgaacccaggaggcagagcttgcagtgagccaagatcgcaccactgcactccagcctgggaaacaaagcgagactccatctcaaaaaaaaaaaaaaggggggggggagattacagacaaatgcaaatttagggtttctctcttgaaaaaaactggaagtgtactgaacgacaaccaccatttagagcagggattggcaactacagcctgctgcctactttgctaaataaatttttactggaacatacccattcatgtatgcattttctagggctgctttcatactactgtggaagatcgaatggctgcagagacaccatgtcccacaaagcgtaattatttactgtctagccatttacataaaaagcttgccagccattgagctagagctactcctttcagttgaggcctgtactcctctggttcaccagtttccactttgcttgcttaactcagtgatattacctcctggcccatgtaagtactcaagtttatgactccaggtatacaaaaggaagggagattaaaatcaaattttgagtaattagaatatttaattgttcaaaaaagaaggctaagaagatacactcagagaagtaagaagtaattccaaatggattaagaacctaaagaaaaaatt

SEQ ID NO: 1886892 - DNA, 4001 bp, Homo sapiens; identical to SEQ ID NO: 1244036

SEQ ID NO: 1886893 - DNA, 4001 bp, Homo sapiens; identical to SEQ ID NO: 1244075

SEQ ID NO: 1886894 - DNA, 4001 bp, Homo sapiens; identical to SEQ ID NO: 1244090

SEQ ID NO: 1886895 - DNA, 4001 bp, Homo sapiens
ggcgggggccgggccggagcgggctccagagacatggggtcgaccgactccaagctgaacttccggaaggcggtgatccagctcaccaccaagacgcaggtgcgccacgggggccccggcgtccccatccacctgccgggctgggggctgggcagggccgggggtacgcgaacttggctcgtcgggagatggggggacgggcgggccccgagcgtaacgccaaggccagcgccggaacgggaccccgcggcctgtacctggaagctccatcccctggccctagtcccccaccctcagcctcctctcctgggaacacccctctccccgaagccgctgctgccaccttaggctgacgtgtgcctactccccgagccggcgacacagctgtccgccccctgtcccgccccgcggcgtccccagcttcgcatctccagcctcccgccgcccccacccacccatccaccgtccgctcccctccctgcccctcattgcccgcgggtcccggacgcacagtccctgttgactcaatgcaaacaaagcctggctggcgtccgcccgggtcggagaaacagctggtgtgcgcggcagcggcctcgctgggccctggtcgatgcccgtgggcagggaaggcccaggtcttcctgggaacacgcaaagagtggcgggcagcgaggcagcctggtggggggccctgtccccaggcctactgagcacagcctcccagctggggacctctccaggggccttccccgaggccctgcaagggaaaggctgttagcctgtgtgctctgttctctggctcagggatggggacccgcaggatggccctcagtcagctggtgaggggcctaaggaccctccagcctagtccatgctcataactctcctgtgagtccacaagtggcccaatagccacctccttataccacctggccccagcaagactgcttctctgcccaccccttctctcctggctttttgaatcaggccaccgtggccacagagatgctcggccctgactccccatgtcccccattttcaggggacacaggacctgctgccatctgggatcttcctctttcctggcccccccacctcctgctctccagggctctctcttgctgctggaggttagagtgggatggaggaagccagctcccacagccagctggtcacagctccaggggccagaccttgctccctcacccctttccccaccctggaagggtcaaatgtgcagcaaatgcccagggcctctggagagtccaaccccggctgaaaggctcttgatagaaaccagaccgcacttctctccattccctacggctcctgggtcgttctggagcttggcttttttaggatggggttttcgttctgtgggtggcagggaaggtggcaagtgggctagcccctcagtgtagggctgcagggagaggagtggggaggcagggaggaagggaggctcccatgtttacctgcctggggaagaaactccttgttggaggattgcactgtgggctcggcagctggggtcctttgccaggccagtggggccagctcagcagagtaccaaaggctctggagtggcctagattcctacctgctcaggccttttccccaaaatactgtgtccctctgtctttccctggctacagccctatgatgggccacttgagatggtgctgttctgtttcccagctgagtaggcttggaatagaacctggataggctggagatcagaccagccttctggagagcactgggtcctgtaggcggacgggggcctgggctgcccggggggagaggccttcagaggctgaagccttggactctgtgtaagtgacctgacttgggtagcttgggtgtgaggatcagaacccagatgatcatcactgaccttaccacttggagtccccaaggagattcaggccagttgtccataggatgatatgtggttccaggctcttacagggtgtggcttgggcagtagacaggcagaactagccccttttcctgtggcctgggcctgtatccctgctgctccaccttcctcgccttcctgccctgcatcctgttttcttcctgccccatggtccagtcctgggtcaggcctgaccctggtcctaagagccagccgctttggctgtgtttcctggtgcttcctcatagtaggtggggctctggagggagacagtcccagacctggaaccctctcccagatcctgcctgtttggaattctctgctgcaggccagatgaacctggcgggtgcatatttacatgtgtatacatgtatgtgcatgggaatgcatggtgacacagtcctctagagcaggcttagcaggcttgaggactaggggaccttccccctgcacaccctgagagtcaaaagatacaactgctcccccaggtctgagtgggggtctagtccgagcaggggcctggaaaagctgggttaagaatatctgattttgggccgggtgtggtggctcatgcctgtaatcccagcactttgggaggctgaggtgggaggatcacctgaggtcaggagttcgagaccagcctgagcgacatggagaaacctcgtctctactaaaaatacaaaaattagccaggcgtggtggaacatgcctgtattcccagctactcgggaggctgaggcagtagaatcgcttgaccccaggatgcagaggttgcggtgagctgagatcatgcttctagcttgggcaacaagagcgaaactctgcctcaaaaaaaaaaaaaaaaaagaaaaaagaaaaatctgattttggccaggcgtggtggctcatggctgtaatcccagcactttgggaggtggaggcaggaggatcgcttgagcccaggagtttgagaccagcctgggcaacacagcaagaccctatctctaaaaaataaaaaaaattagctgggctgggtggggtgcgcctgtagtcccagccactcaggaggctgaggcaggaagatcacttgagcccaggagttcaaggttacggtgagctatgattgtgccactgcactccagtctgggcaacggagcaagaccctgactcaaaaacaaacaaaagaaaaagaataaggggagaagaatacctggatttttaccagggtagctcagtttctgtggccctagcagcaggggcctgcctacctccagcaaaaacacttccttcaaagatcagatattggctaggtgcggtggctcatgcctgtaatcccagcactttgggaggctgaggcgggtggatcacgaggtcaggagatcgagaccgtcccggctaacatggtgaaaccccatctctactaaaaatacaaaaaaattagccgggcgtcgtggcaggcgcctgtaatcccgggggctgaggcaggagaatggcgtgaacccgggaggcacagcttgcagtaagccgagattgcaccactgcactccagcctgggccacagagcaagactcggtctcaaaaaagaaaaaaaaagatcagatattagaagcttccttgggcgggctgggtggaggccaactggggtcattgaggcaggcgctgagccacgtttctcccattagaagcctaaggggcctcagtgaccctgactaatgcctgtagcatcagcttggcctgggcaggtggtcaccaaatccgaatgtccaagccacagtgggaccaggagaggaggcccaagctgaggaaacagggaggcaaagtcctgttcctaaagttcaaggctgagatctgtcatggctgggatctctcctctgcttccagaatgggctagtaagtctctttcttcattttggatttagtcccccggtgacactgcctgatgaactaggtcagaggtcatgcctgcttgtgcttagtttctgccctttgaagggggtagtagctacctgggaggtgggaaaagtgtcagggatggcggcttcccagaggcactcccagatggctctgtgggtttcctgggatgtccttccttaccccatcc

SEQ ID NO: 1886896 - DNA, 4001 bp, Homo sapiens; identical to SEQ ID NO: 1244114

SEQ ID NO: 1886897 - DNA, 4001 bp, Homo sapiens
gtggggcccctttctaggcaacttggggcttgagacctgcctggcctggcaccaggagggcattgtggataattgcacacagacctccactcacattggagccctggggcaccttggggcgaaacccagagctgggctaaccctctccttcacttttccacaggctgaagagagacctggctacctccgagtgagtaaaggaaagctgggggtggggtgggagcccacctagacagttgttggaccccgccaccaaactatgccatgaacagcagagacaaaataaataactccagggtgatgctcaccccttcccttgacctctgtaatcccagcactttgggaggctgaggtgggaggattggttgagcctggaagtttgaggccagcctgggcaacacagtgagaccccatctcaacaaaaaaaaaattttttaactagccaggcgtggtggagcatgcctgtggtcccagctacttgggaggctgagataggagaatcgcttgagcctgggagattgaggctgcagtgagccgtaatcgtgccacggcactccagcctgggcgacagagtgaaactctttcccccaaaaaagaaaagcctgttgtgacacaggggaatgggacctgctgccactctgggggaaagggcttgagaagcaacttaagagactcccagtatcagtatgagtcagacacctgcggtccaggccaggctctgccacacaattactctgtcacccttctttctggcttcagatgctccacctgcaagatcacgaggttggactagctggtgtctatgagtgcttccaattctgccagccctttccaaatccttcctctcttattttggcctggtttcccctactcatggccttacccctcctatgtgcccccagccctcttcctctcccaataccctgaaccctagattccaggaggcagatgtgaaataagttatgttccttttattcccactgcactgagccaatggcggtcttggcacccctgactgcttgcctggcctgcctcattaattgcagtggcacttggccacccttcgaacccccttgataagccgcttgtgcccctgtttggagcccagtagtgacctgtgctgtccaaaggggcgctgcccagagcgccacctctgctgtcgttgcctcttgaccttgagcttggacttggaggcctgcttcttgcccagggtgaaggagcctgaggcccccctgccggtcacctgctgagcccttgtccaccagccccttgagcacacgcttgaagtgataggcatttcgggccatgtcgtagcccgtggtggaaacagccttcttcagggtggccagggacacatacttgcaggtccccttgtccgccacagccctcaggatcaccttggacgtgctgggcttctggcagggtttggcacaggtgcgttgcccagtcgctgtcttgctagggacacgctgccctgctggcctccacccatggcagtatttgagttcaacagcactgatggagacagtggcgaagtgcctttctgcttctctccctggggtaggtgaagtgtcttgggtgcaaggacctccagggcggctggaagtctccactgggctgcccctcacaggatggctgaggtgtgtcccggttcctggtcctcgctgaggcttcctcttgagctccggccctcacctttacctgtgtggccagaaagaggatcaaggacggtcacccacggctggcctccacagacttgtgctcttggtgcaggggttggtgaggttatctctgtggtgacctcagaggctaccagaattctgtgtgggtcacagtggccccattgtttcctccggggaggggtggaccggagatgccagatggtggaggcatgtaacatgccaggtgtcctggggaggagggctgcgcttgtgggccagacagcgggcctgcacggtgcgtgcacatatgcatgtgtgtgtgcacatgcctgggcggattttattttttaaaaaatttttagagagagggtctcactttgtcacccaagctggagcacagtggcataatcatagctcactgcaacctcagactccctgggctcaagcgatcctcccatctcagcttcctgagtagctgggactaaagctactgcacctggcctggcccccagttttaaactcaccattttgatcccaccatcttgacccactgggtttttgagccactgggttgaagaatacaagctttgcaggcatcagggttataccaacatttatgaatttttatggggaatatagtttccaaagtgaacagagatgtacgctaagttgacttacgctaagttgacttaattcctcaagcaactttctatacaaagcagttaaaaggctttgcttttattttctgttttcaattttatagaatttttccccatggggatcagtgatttttcatgtacatttcactaggaagattttattcctcaatttttttggactgaaccaaatttaaacactaacatctactggcactggggatattctcttgtgaccagtatttcctccacatccagccttccccgggtcaactctgtagctctgatgttgtcagaaaaatctgctgcctcagtcaatgtgaaatcaataaccgttttaccatgtgcaacgttagccttggctggtttggatttcacgttgatgtatttctacaaaatccaatttttcacttgttcaatgtctgccacttttcagattatccacaagttatgattctgctgcctgcttttcacctagatcagatttcagcggtcacagagtcctccaggccccacgaccctctcctggggatttctgtgccagaggcagtgctttcgggactgtgtgttggtggtggagtgggtgtgggtgagacctaggccacgtgtgtgtgtgtctgtgcgtgtgcctgagtgtgtaggaatgcctgccgtttgtctgtctgcccaagtgctgatgtggaaggaccgtggggaagccactgcggggtctggcctctgctcttgctctagaaaaacatccccagcacatttttccacctgtgtgttgccagagtaatgaggtccagatgtggggctgggaataaggagggggcccactgactgaggccttcctctgccagggcctcacctgcccagctgtctctatctcagcatccacacactggttgctttctttcccctcagtctccccttgcctgggaatagaaaattgggtttcggacaactcagctcactgaattccagactcaagagctcatcttgaccctcccctggccttagatggtgactccacctcttcctgctggcctccccgcaggaggagcatggcccattcagcgtgaagctaggtcttttctgcagtctaaactgtcaggctctaaccggagtctgtgtccactaattgggacctgaacatgggtggggatcacttctcctccctcatctcatcagtaaccaagtggcaagtggggtcgcttcagccctgcctggggccccagctcctctaagaaaaccaattcttggctgggtgcagtggctcatgcctgtaatcccagcactttgggaggcagaggcaggagggtcccttgaggccaggagttcaagaccagcctgaacaacatagtaagacacctgtctctacaaaaaaaattttaaattagccgagcatggtggcttgcacttatagtcccagttactcaggaggctgaggcaggagtatcgcttgagcccaggaggtagaggctgcagtgagctacgattgtgccactgcactgaagttggcgacaaagtgagaccccatctcttaaaaataaataaataatataaaaacataatataaagctcagcaaacactggcttctggaagaatatggcccctgtggatgtctattcatgtctccatatcttgtgagcgcttatcacgtggtgggcactgttgtaaacactcagccacattttctct

SEQ ID NO: 1886898 - DNA, 4001 bp, Homo sapiens; identical to SEQ ID NO: 1244116

SEQ ID NO: 1886899 - DNA, 4001 bp, Homo sapiens
taaaaatcttcccccagatcgacttttcattttctgctttgaggcctagtttcccaccaattgcttggggctcagagtcttgtgccctctccccatagtaaattacaacactctaaacttcagactatcttggtctcctcaaaataaaataaattttaaaaacattttcccccagcagccagaaatggaatatcatctcagtggtcattatttccacccctaccatcttcagggaattcttccttgtcagggattcttttttttttttttttcttttttcttttttaactagcacaatggcaaaaatgggagggaaagtctctttgtcctaggggaaaatctccccaccacactcatgcacacacataacgctgatctgaactttgagagtgctctaagttaaaccaatggctacctcagttcttgttcatgtccctggatatggatacagatacaagcttgaggcttgagtgggtacatgcacatcttagactctgcctgtttttgggggatgtcacagagaagcatggaagcctgaaagtgaggaaagcaggggtacataaggggcagaggcagtgctgcaaacactgggcagagaagagaacccagaccatacagcgatggaggccagaggcccaaaaatgccccttatgctccatctcactcctatgtgtctgcctgggagttcctgtccatttcccaagatttaactgttgtttttggagggtaacagggatagtggtgtgatgattgtaaatctctttcttattttcaccttaatactgacctttttcaaagagtggaagcctctttcgactccctcttcctccaacgcggagatcctcactcatcttttcctggggaaggggagaagggaaggggatgctgctggccacgtaaagaaggccttaatttactctattaaaatacttggaaaagaggaaggtttctcccttagagtctcttcttttccaggcttctgaaaccttctaaccttcgaaggggatgaggaaaaggttcctctagcttttctggagaaacggaggcattggggagagagcatgtgaggcactggtgtaggaatgggggctcatggtgtcctggtcgtggtcctctggtgtttttgaatcaattaaaccaaataatgctctctgttttccaccaggcccagacgagcgattggcggaggccggtcccgtgaccacgaattccctgtaatttcgctggagtcctgggtttaatagagagagtccccatacgcttgtatttatcagcaatatacaattataaaggcccaaaattaaaaaaaagagagaccgaaatctccccctcccaaaatcgctccattacataaatcggggggggtgcaggaggggggtcccttccgatcctccctcctgacgccccccccagcagccccctcccccaccattgaaagccatgaattttgaatttgagagggagattgggtttataaacagccagccgtcgctcgccgagtgtctgacttccttccccgctgtcttggagacatttcaaacttcatcaatcaaggagtcgacattaattcctcctcctcctcctttcgagcaaaccttccccagcctccagcccggcgcctccacccttcagagacccaggagccaaaagcgagccgaagatgggcctgctctgccgccgccaccgccgccgccactccccgctgcccccccggcccccgagttcccttggatgaaagagaagaaatccgccaagaaacccagccaatccgccacgtctccttctccggccgcctccgccgttccggcctccggggtcggatcgcctgcaggtcggtaagcgtggtgggggtggggtgaggggcagctagaagagggggagaaaaagcagtggaaggaggtttaaaaaaaatggtggcgagcctgttggggttccttaccccctccattcctgggatggggaagtagaatatcccactggggttcaggcctggccgctaacagcgtctttttttttttctgtctctctctctctttctctccctatggctgattttggaagctggttggggaaacgcctttttttctgctagaagaaaatgatttgattgaggttttcacccgtatctgtgtaggggaatgagtatgttgttgctgggatagaccctagaagcagaaaagattcggtcctttctgccccaactctaggagaagaggaagaattcagagctagggaggaagaggggtgaagaacaatctttctgaccctcgctccggttgagttggaaagttccgaattgaggggtccactgggagggcttgggagggggatctgaggttccggcgccgaagggagccgctctccgccccctgcgtggcccgtgggcggctctgaatgctttgccctgacccgggccggggctgtagactagagagggagagaagaaaacccaaaagcagtaaagcgagcggctttggggtgggggcgggggtggggtggcgaggaaggggagaggtgatactggttttggaggatggggtagtccgaactgaggttgggctgagtacacggcccgctatgacgccgagcctgttttccctgcagatggcctgggactgccggaggctggtggcggcggggcgcgcaggctgcgcacggcttacaccaacacgcagctgctggaactggagaaggaattccactttaataagtacctgtgccggccacgccgcgtcgagatcgcggccttgctggacctcaccgaaaggcaggtcaaagtctggtttcagaaccggcgcatgaagcacaagcggcagacgcagcaccgagagccgccggatggggagcctgcctgcccgggagccctggaggacatctgcgaccctgccgaggaacccgcggccagcccgggcggcccctccgcctcgcgggcggcgtgggaagcctgctgtcacccgccggaggtggtgccgggggccttaagcgcggacccccggcctttagccgttcgcttagagggcgcaggcgcgtcgagtcccggctgcgcgctgcgcggggccggcgggctggagcccgggccattgccagaagacgtcttctcggggcgccaggattcacctttccttcccgacctcaacttcttcgcggccgactcctgtctccagctatccggaggcctctcccctagcctacagggttctctcgacagcccggtccctttttccgaggaagagctggattttttcaccagtacgctctgtgccatcgacctgcagtttccctaacctgtttcctcctcccggtcctttcgacccccgcgctccttggccgtctactggaaaaatcgagcctctcccaccctcagtcgcatagacttatgtgttttgctaaaattcaggtattactgaattagcgtttaatccactccctttcttcttcttctaaaatattgggcactcggttatcttttaaaattcacacagaaaaattccgtttggtagactccttccaatgaaatctcaggaataattaaactctagggggactttcttaaaaataactagagggacctattttcctcttttttatgttttagactgtagattatttattaaaattctttaataataggaaaaggggaaagtatttattgtacattattttcatagattaaataaatgtctttataataccaaaacgagtgtttgtgttgggacctaaactctttccccgcggccccaaggccggtcctcacccctccaggacctgtgcgaagttgattaggttcagcggcccatatggcagcaaagcctccagggccggcgaagtccgggtggtacaaaggtgacccgattgatggccgcttcgcccacggctccggcaaaagtcgggagtttgcaggaagctgggtcacctccccgcccctcagcagagggtctttggtcctgagcgggtggttctggggcctctgcttggaaatagagatgggcaggtcgagggag

SEQ ID NO: 1886900 - DNA, 4001 bp, Homo sapiens
cgtatacccgctaccagaccctggagctggaaaaggagttccacttcaaccgctacctgacccggcgacggcgcatcgagatcgcccacgcactctgcctgtccgagcgccagatcaagatctggttccagaaccggcgcatgaagtggaagaaggacaacaaattgaaaagtatgagcctggctacagctggcagcgccttccagccctgagcccgcccagaggagcccagcggcccaagagcccgtgccacccccagccctggcccctccaatcctccccgctctgccgccgcccgctggggaccggttcccacaagcctgcctcgccttgtgttacgatatttcgtttggtcttaggtcttcctgtggctccctctctcctggactggttatcttgttattattgttaataataattattattattattttccttccatgctcccaactcccttctgcttgtcccaaatccgccagtgtttctgaatgtttgtgtctgtggttgcagtctttcccccaggaaaaaaaaaaaaagaaattcgcatgtttaatgtgaactctcccctccccatctgtgttctaacttatttataaaaagatgatcgctgtattttgagtttcagctggaaacttctgtaaggggcagcagttgaggtggggtagtgccgcagtggggtcaagctgagctggcttcggagatggagtcccttttcattctcctcctcctccctcctcactccctaggcccaagtctcctaggggcttggtcctagggtgggaaggggctagggaggaccaaagggatggtattgagaagagagaaagaagatagtgagatttaagttcctgctgcctgggtaggccccacaaggcctggtctgggagtatacggaaacaaaaatgatcctcagtgcaaaatgtcttgtgtatttctctgtgaatccatgggtctggctagagggcccaaagcttgtaaatatggggatagtctgggtcagacccatctctcccttacccatcttgcttccaagaccatttgtagtgagcgagtggatgctgtgctacgtgtgaaatctgtctttgcggggcctgtctcagtgattcgcttttggtatttgtttgtagctttcctggaagtcaaataaatgtttcccccactccattgcccttccacttgtcttttctccgaggggtctgcctctcccatcccgggcacaccctgcaccattctcaatagatctggggtgcagggaagaaaaagtaggctgctccccaacaactcttctcagccatgtaagtcactggcttggtcaacagtgcttgggccagggaacagaccttcatgcctgggggactccaaggcccagaaaccccatgtggggctggggcagaggaaaggctgagctagacttcatcctggtcttccactagctggccaaggaagcctctggaaaactcttctgggaaagtaatttgggcctaagtcctcagcaggaggctcctggccttttgggagtggtagaggcctgcccagccccctgtctcctactccaagtcccaattcagctctgccaccaactaaagcaaaaaaaaaaaaaaaaaaaattcagctggatttcaaaggatttctctcaccctcagccttccctacccttatcaagggctccttctctccaagggcccaactgatcttccctcttgattaggagttagggtcctttcagaaagacccctggttccctttcagcctggcccagggctagggcccagtctacctccatccaagtcagcctccaccctgagcacaagagtcaagtctggacacttacccggtcaatcccttccagcttggcccaacttcttactggacttggagggagggggagctggtgaggaggaagccgagggtcgtggaggctctacttggccctcctttcccttcaccccttgactttgtctccctttgtcgatagcaaactatcccaaaagtcgctatgacatttagatgtcaaatggataggggttttatctcgaagttagatcgtaaaaatcgccgagaagtcagacagatacccctcactggctcgagaaagtcacgtgaggtccataaagttagttttatggttttggggagttgacaccgcgcagtatatttcacattctccagaatgttaagtgacactttaactgctcgctgtggtggggaagggggcagaggtaggtgagcactctcccagcctggagcagccggaccagcccagaaggcagcggcggcccaggccagcattcccgcagtaagtcgctttcagctttcgcttttaccccttgcaattctggggcctgggactgggggaagaaaacttgtttccacctggggctgtggggtgatgtaggggaaatttagcctgttttatgcacccagttctaagggactgggtgcctgaaatgagtgctctcagtttcttaaggcctcatcggtcgggggtgcctgatttttaccaacaggagtgtctgactttgtggggaaaagggtttgtgtgggggatccatgctccctcagtgccagcggaaatttagggaccaggaaggaggggtgtatattgctgaaagaaggggccattggtgggggccacttcactgctggatatcttcagacaactatccccccatcctccggaaagaaactttatgacattcatttgtcggaggtgtgtgggggtgcaccgctgggcacttttatctggatacatctgagctgagaaaaagcaccgggtaggcggctgctgtgggctaccttgccctggggtgatctctggctttccgatctttgaagcccataaaaagaggtccctccggttatctttggcttcatcaggcttctctgggatggggagcacagcgctgcttttgcctccaccttcagcctgttggtctcaagctaatctttctccttggctcgaagtaggatcctgaagtcagactagggagcagacagagagggcaattcccccaattcaaaacctaattcctgaaccaggagtgggggaagggaagagcttcttctcttgcctagaggtgttaggtgtttaagtagaactctggcaagccctcctcaaataaaatcagctcaagaatacaaatccctcaactgtcgggaggaaatagattcaggagctggaagagaaaataggaaaggtgctcttttttcctctctttttccctcttcttttctgggcacaccctcaaagtcccctttgttttgtagaaccataaaccagagagacttcaggatttgatccccaggggttctgttattttctagggaaaagtcacccttctaaaagtcagaggcttcttccccaccaaattgacccccctccaatttaacacccgtggggctaactaccctgtcactcctactttcaccagcctgccatcccttgattcagctcaccaactgccataggtagtttctgggattggatatgtggcacctcgaggggcttctgatctttgggacaaggatggggtcataagactccctttttctcattaagggacattggagttctccccctgtcctctttctcctgaagccactttctattccctgagctctctatccactgcccaagcctgacttacaggaaatccttaacaggctttaagagcagagtcaccctggtttgaagacatatcatcccaagaatgatgagggcatttgtatcccttagaaaggagacacaggtcatctcccaaaggatccccagcaccactgaaaatataaagaagtgctggaggcacagcttccacagtcttccactctacaaggcaacggagttgacagacatgcagacaaagagctctgcaagggagagtctgacctgggtctccaggggaaccccattcctattgtgcccctggcctcactctaatatacttccctttctgaaagcccttctggaagctagaaccccagatagtaaggcctgctcctga

SEQ ID NO: 1886901 - DNA, 4001 bp, Homo sapiens
ccaaagttaaaataataacgacaatgatgatgtagggagaaagaaccaaatagagaggctaaccccacccacaagaaagtgggtaaaaagcccaacccctgctctaaaaggctcaaccctgtggctgagccttggccgggtttctttctctcccggcgactgcagggagcctgcagggagccagcagggaggcagccgcccgccgccatggcggtctcacgcccgcgctcccgtcggtcgccgggaggtggcgcgctctgctcagaggccaaagccaaccttctctctgtttctcccccttctccttttttccccctctctcggaggctcgcattgaatcggccctaacgattctcggatcgtcattatttgtaaccatagagcatgaattacctcttgaggtcatcagcgagaatttacgactggtcaacaaaagcacgtgattccctaacgccccccaccccccttccaaccccccccccatatttggccgcatacatagcaaaacgaagtacagtgcatcgctataattcattaatacatcataaatcgtgaagcacagggttataacgaccacgatccacaaatcaagccctccaaaatcacccaaatgagctcgtactttgtaaactccttctcggggcgttatccaaatggcccggactatcagttgctaaattatggcagtggcagctctctgagcggctcttacagggatcccgctgccatgcacaccggctcttacggctacaattacaatgggatggacctcagcgtcaaccgctcctcggcctcctccagccactttggggcggtgggcgagagctcgcgcgccttccccgcgcccgcccaggagccccgcttcaggcaagcggcttcgagctgctccctgtcctcgcccgagtccctgccctgcaccaacggcgacagccacggcgccaagccctctgcttcgtccccctccgaccaggcgacctcagccagctccagcgccaatttcaccgaaatagacgaggccagcgcgtcctcggagcctgaggaagcggcaagccagctaagcagccccagcctagctcgggcgcagccagagcccatggccacctccacagccgcgcccgaggggcagactccgcaaatattcccctggatgaggaagcttcacatcagccatggtaattctctctctcttttttgtcttctcggctttccttctctgcgttttggggtgggatcggggggacaaggagagcttggctttaccctaaatatagattcatttttctaagggggagaagtatctaagaggggcctcatagcttcgtagacagagccaaaaagggtctctctgttaagaggggggtatttttaataatttgtttccagcttcggcttaggtttttattagcgcagctgaaccagctttaggataaaggatggggttcatataatgtggggaagggtcctgcttacccctgaaattttgagactgtcgctagcaaagaaggggtgaacagtaaaaggagctttccggggcaaaagtgcaaccgctctcctccctcccggggcgagcggccgcctgagcccagccaagggtgaggcactaggagcgagcaagagacaaagccgggcgcactggctgcctgcagaagtgggggatgcagtagaaaggggtgcagaaatcgagcttgaatgtgggcatctggagtagagaggattggagctgtggtgagctgggtgccgggacgcctgggtcctgctcccccgccccctcccacccagtgccccctcccttaaccggaataatgttgccttgcggctttcctctatctgctccagatatgaccgggccggacgggaaaagggcccggaccgcgtatacccgctaccagaccctggagctggaaaaggagttccacttcaaccgctacctgacccggcgacggcgcatcgagatcgcccacgcactctgcctgtccgagcgccagatcaagatctggttccagaaccggcgcatgaagtggaagaaggacaacaaattgaaaagtatgagcctggctacagctggcagcgccttccagccctgagcccgcccagaggagcccagcggcccaagagcccgtgccacccccagccctggcccctccaatcctccccgctctgccgccgcccgctggggaccggttcccacaagcctgcctcgccttgtgttacgatatttcgtttggtcttaggtcttcctgtggctccctctctcctggactggttatcttgttattattgttaataataattattattattattttccttccatgctcccaactcccttctgcttgtcccaaatccgccagtgtttctgaatgtttgtgtctgtggttgcagtctttcccccaggaaaaaaaaaaaaagaaattcgcatgtttaatgtgaactctcccctccccatctgtgttctaacttatttataaaaagatgatcgctgtattttgagtttcagctggaaacttctgtaaggggcagcagttgaggtggggtagtgccgcagtggggtcaagctgagctggcttcggagatggagtcccttttcattctcctcctcctccctcctcactccctaggcccaagtctcctaggggcttggtcctagggtgggaaggggctagggaggaccaaagggatggtattgagaagagagaaagaagatagtgagatttaagttcctgctgcctgggtaggccccacaaggcctggtctgggagtatacggaaacaaaaatgatcctcagtgcaaaatgtcttgtgtatttctctgtgaatccatgggtctggctagagggcccaaagcttgtaaatatggggatagtctgggtcagacccatctctcccttacccatcttgcttccaagaccatttgtagtgagcgagtggatgctgtgctacgtgtgaaatctgtctttgcggggcctgtctcagtgattcgcttttggtatttgtttgtagctttcctggaagtcaaataaatgtttcccccactccattgcccttccacttgtcttttctccgaggggtctgcctctcccatcccgggcacaccctgcaccattctcaatagatctggggtgcagggaagaaaaagtaggctgctccccaacaactcttctcagccatgtaagtcactggcttggtcaacagtgcttgggccagggaacagaccttcatgcctgggggactccaaggcccagaaaccccatgtggggctggggcagaggaaaggctgagctagacttcatcctggtcttccactagctggccaaggaagcctctggaaaactcttctgggaaagtaatttgggcctaagtcctcagcaggaggctcctggccttttgggagtggtagaggcctgcccagccccctgtctcctactccaagtcccaattcagctctgccaccaactaaagcaaaaaaaaaaaaaaaaaaaattcagctggatttcaaaggatttctctcaccctcagccttccctacccttatcaagggctccttctctccaagggcccaactgatcttccctcttgattaggagttagggtcctttcagaaagacccctggttccctttcagcctggcccagggctagggcccagtctacctccatccaagtcagcctccaccctgagcacaagagtcaagtctggacacttacccggtcaatcccttccagcttggcccaacttcttactggacttggagggagggggagctggtgaggaggaagccgagggtcgtggaggctctacttggccctcctttcccttcaccccttgactttgtctccctttgtcgatagcaaactatcccaaaagtcgctatgacatttagatgtcaaatggataggggttttatctcgaagttagatcgtaaaaatcgccgagaagtcagacagatacccctcactggctcgagaaagtcacgtgaggtccataaagttagttttatggttt

SEQ ID NO: 1886902 - DNA, 4001 bp, Homo sapiens
ggctacggccgagcggcgccctgcgactacgggccggcgccggccttctaccgcgagaaagagtcggcctgcgcactctccggcgccgacgagcagcccccgttccaccccgagccgcggaagtcggactgcgcgcaggacaagagcgtgttcggcgagacagaagagcagaagtgctccactccggtctacccgtggatgcagcggatgaattcgtgcaacagtgagtgagacttcccgtcgccgtcgccccggctcccctgggcgcccaccccgggacacagaactagtgagcgccccctgccccaatctcccacagggtgctgggtgggcatctcagttaggagatagaagaagattgggcgccggccgggggtctctcgctgtgtcccctattaggcaggagttacaaagtttgcaaagtcccagccgcactgggagccatggggagcaagtgtgctctcctggggcgcctggccagagccggggttccaggacagggaagggagcaggagcctgcagtcactggcttggctttactttgagcccccaacccccctctcccagccctggtagggttccccaaccaaagacggctccattaaaaacggagtgcgtcatgcaagggggtagggggtgacgctgaagagaaagagttgagtctgtctgggactgtgtttccctgtgggtggggagctggggcaagatgaggcaccaggaaaggggtggtagtcagaggagggaggaggaataaggggaaggaagagagagggagcaggcggagcgagagagggagaaacaggcgcggggtctcaggttggattatttgttggccttaagtcccaactgatgtccattagccggactcgaaagtgaggagccgttaatgtggactatggatcgatctacgtcattacggattaacggcctggatttatcattgggttggggggatgacggggggtgggaacaagatggatggaaagggagggaaagacaagatgcaactaggaagagacacacctgaccagcccctccccccaggctcaggtgggagttcaaactgctcctcccctcccccatctagagtctagacagacggcacaggcctaggagactaggagggaatctggagggggcgctggaggagtgcgaaacgggggaagggagccggcagaatagagggcatcccggtactggctggagtctgtgttcgagggtcgactaggggagggggtcctgggcccggtgaccgcaggcctcagcatctccactctgcgtaacaggttcctcctttgggcccagcggccggcgaggccgccagacatacacacgttaccagacgctggagctggagaaggagtttcactacaatcgctacctgacgcggcggcggcgcatcgagatcgcgcacgccctgtgcctgacggagaggcagatcaagatatggttccagaaccgacgcatgaagtggaaaaaggagagcaaactgctcagcgcgtctcagctcagtgccgaggaggaggaagaaaaacaggccgagtgaaggtgctggaaagggagggaggacgcgaggggaaaggcctgtggggagccgagggcgtcagagagacccgggaaggaaggctctcgggtgggggagccaggagacctgctctccggcgcagacaggcggggcccagcgctctcctggacgcccccgcccgcacagctcccggcgggtgctctgaggcctcactactcgagcccacccagcatcccgcgcgcccttccttcccgaggaactcgcctcagcctgatcaggcttcctggtgagaactgaggagcggactcacttgatgtttcctggaagcagagcaaaatgctcttgtccctgtcgcgtctcattttgtccatgtcccccgtgcacggttcaatggtagattcgctgtcccctcagcgggggccttgaagactccctgatcccagacctgtcgtctctcccaccccctccccaaagccactggaaggagcacatactacctagaagtaagaagaggagcctcagaagaaaacaaagttctattttattaattttctatgtgttgtgtttgtagtcttgtcttagctctggacgtgaaatacttcgatgatgatgatgatgatgatgatgataataataataataataacaacaacaacaacaataataaagatgtgaaaactcgacgctcggtcacctccaatcctcccctgccattttttcctctctcctcaacccccagcctctccatctttcctgagccagaattcttcagcaaaggcgagagccctggcccgccgaagcgagccctgttcgactgggaagttacagctgagataaaggctggagcgatcagtcctgcccaggccccagcgctgcgtttccctggtgctgaggctcacagccgcttctccccgtgcagacttgggggatggagaggtgctgtgtccctctcattctctagcctttcctcgtgtatacacagcactaagggagccactgaggcccctaaagctctctggcggagacggagccatagtctgggggcctctgcagcgcttttctgtcctcaccttcgcagcgacccctggtctttggcccgtccacatggccaggttttttcgccagccttggccctccgctcctggcctgtggctctggagactgaaaaatggggccactgggtatctctcaccctgcagctgaaggctccaggtgccccttcccacctcaagtagcagatcagcctcaagtaggagatcagcctcaagtaggggaatgtaaagccaccagccaggcacaggccgaaggccacaactttcccttgctccttggagaccccagggcaggaggccaggtgatggggcttttagtgtcatcctctcaacccagaatggctcattctctctctgcttgcaccggcacccagaaggcaagctgcggtcactgttttcctttattcctccgccctctcgcttcctttcttatttttaaagaaaatagtcccctcctaataggagaccagctgcggcggtctctggccgcccagcgtgctcagcaaagcatgcgggtccttggaaccccttttccgggaaggcggctgccaccaggcaaattctcaaactgcctagctgcgagtgagggacctgtagtggggcctccgaatgcaatagccgaggaggaggggaagggatcccgctttacaaactctcagacacatgttactactcaaactaagcagcagacgcggtggccgctgcagtcttttcggcaactaggccgcttagccccagctgtgctcggtttctggggtccctgtcctgctctgtcactccccacgcctgggctaaggaccaccaaggaggtccggaaggggatttcgaacttccaagtggcccaggagaagtgaacgcttctccttctttttcaagcctcccgcccagccctgccggctcggcctgggcgctgtggaccggtaacagcagttccaccaggatgcaggccggactaagctcctggggaaaacccgttgcaataattgtttttcacacacaacttccaacccttcccccatttccgcctccaattcggagacttgcaaagcccaagaaagggaaaagcaactctatctttgatcttctcatccaaagttaaaataataacgacaatgatgatgtagggagaaagaaccaaatagagaggctaaccccacccacaagaaagtgggtaaaaagcccaacccctgctctaaaaggctcaaccctgtggctgagccttggccgggtttctttctctcccggcgactgcagggagcctgcagggagccagcagggaggcagccgcccgccgccatggcggtctcacgcccgcgctcccgtcggtcgccgggaggtggcgcgctctgctcagaggccaaagccaaccttctctctgtttctcccccttctccttttttccccctctctcggaggctcgcatt

SEQ ID NO: 1886903 - DNA, 4001 bp, Homo sapiens
agatggggtttctccatgttggtcaggctggtctcgaactcccgacctcaggtaatcctcccgcctcggcctcccaaagtattaggattacaggcgtgagctactgctcccggccttttctttctttagagacagggtctctctctgtcaccctgactggagtgcagtggcatgatcacgactcactgcagcttcgacctcccgggttcaagcgatcctcccatctcagtgtcctgagtatctgggaccaccacgcctcactaatttttgtgtttttttttttttttttgtagagatgaggtctcgccatattgcccaggcctggcaggtgtttctgatagtcacaaagcccctgctactggggaaagagaaaggaaggcccagctaagacccaattaagaaaatcccagaaccaagaacgaattgactgttcggctttggtaatctccaacgtgtccaccaggtggtgctgtccagccacgaatctcccagctttgatctcgggctttggccgagggcacctccagggctggggtctctcatcgtgttgtccccactttattccaacgtccaccccaggcctgggggagcccagggaggaccgagtctcctgggccccgcagggcgcacagaggtgagtttggtggtgccgtcccgacctcgacaagcatcccagcgaagcaggctgagcgcccggctggctccctcaggtcccctcttccgggccttctccgtcctgttgatttgggtgttttaatgcaggaaagtaggacactggttgtcacctgcctgctcctacaaggaaaatgcatgtttgtgtggttatccgtggccacccccaccagggcctgcggggggcccagtgcagtggaggtggggaggggactcgtgggctccaggatccgtggagagtgagtgtcagcgggagggcgtcccccgaccttggtcaatggaagctgctcttcctgggggtcctgcgggaggcccgtgatgggggtgggggaggaggggtaaacaccgggccctgattggccgcctgtccttgggtctttgctggtcctaagagggaacggggagcacagctggggtcacagcctcagctgggactcctgccctccagcacctcagcatcctccctgcgggtgctctcctgggggctgctcagggcaggtggcaagtagggggctgtgggaccagagacagggggtggacatgcccagggcctgcccttttggcctgccgtggagacccacccaggagcacctgggggctgaccctcccctgcagagagcagggtgaatcccagccctgccctcacctaacagccgggttcgaggggagcgtaatttataatgaaccccactcctcccccaacacccgccacaggcaggagccagcctctctcctgacaccaaagtcatgctcctgaccctgcaggccacagggtgaggaggacccagaggggcagcagggtgggggcgtttcataagccagggagagctgcccctgtacatcctcaggcctcacagtggagtgaggggcgggggtcgcctgcgtcctccacaggagctcctgtcattccacctccgggggtgcacttgccgacttaccccagccctggactcacaggctgtgctgctgtctgcccagggcctggcgattgctgcgcccatgatgggtcccacaggcaggccctgccctcccatcgctggcttctgagcaggggctttggggctgctggacctcagaggcagagccggggcttctggtgtccctatgtcttggatgcctggtgtcctgaggccagcgccccccagcttgcactgggaccgtccatggaagcaactcctctttcatctcaggcactgggggtcccagggccagggaaggggctgcgcagcacctcaggagcccagaagagctgcccgccagggaggaggagctggggggagcagaggcctggaccagctgggatgttcccatcggcgtgtccctcccgcccaggccacgtgggcaggggaggaagaagggaggaggagcggaggggcccttgtcttcccagagcctctcccttcctcccctccccctccctctgctcatctcatcatgagacagctggcaagggccttcggctgccctggagtgcccctgccctggccaagctcttgccgcccccttcttctggaggtgccagatggggcgggcccaaggcagtggaggtctgggccctggctccagctctgtctcctcctgagggccctggaggagccaggaggagggcctagcagggccgggcagatggtgggccgggaggaggggctgcctgggtagacggaccgactggcaagacagatggtggaccaggcaggggtccggagcccgccccatctgctccagtccctggtgggacttttcttgtccacctcgggctgaactgggatggactgtgtgggtggctgtggcccaggccggattctgtcacactgggtcctctgtccctggggcatggccagccgggtgctcatctggggtcttgaagcctcctcctggcagctggcacgtggctggaggtcatcatgtttcgggggctcctgagggtctgggggccatgactgagcagagcctggggcgcgtcccgggaatgaagccaccgctgcagatgaggggctttgtaggtgggtgggtgactgtagcccctggaggggctgcctggggcccaacgctgatagggcccgggacaggaagatgcttagtcacgtgtttgcgctgcaggtgcacccccagcccaggcgacatcaacggccagccccacacacgtgaggagggattgtgggcccaggggcgctcaggatggggccgggctgcttctcagaagaggggacgctgagcccaagcaggctgcactcctgcttggacggaaggtggatgggtggggtgggaaggggtgggaaacgcccagccctgatgggcttgcgggagcctgcgggagggccttgcgtctagctaaggcgtggggagcacctcccgtggccccgtccttagacccccgaggggtggggcgctgcgggtggatcctgggggtctgagggtgccaggaggatttctcatgttgagttctagtgttgatgatgctaatccaaaaaatacctgaaccaaaaaccaattccaaagaaaatcccgtgcagcaatggctttcgatcggctgcggcttctgtggaacagcttcggtgtctttggcgtttggtgttttcggacaggctcggaagtcacgctccccaggctcaggaacccctcctttaaaggaggtcggtccgtttcctcaagtcacaggagcagacgcagggtgggggcgtggggcgtcatggggaacagcaggcggggtgccagggtcaatgttaaggtccaggtcactctccaaggagcccgctgagggctcagggctcagggctcaggtggccctcctgcccgccccacctcttgctccctccagcaatgtcttcctgctgccagctctgggagccggaacgctgccttcaaggctgggcccatcacgaggacagctgcgcactgtcccctgctcacttcctgtcagtctcttcctgatttcctccttacactcagttctcttgtccccttggcctcttagtggctgggtgaccttgggtaagtcactcaccgtgtctgagcttcggttccttcagctgggaaaaggcaacagagaagttcccacctcatagggtcctgcagcaattcactgggtcaaagccctcagaaccctcttcagctcagagtgagcgcctccggagtgctcgctgccattattgttattattattattgttattattattgctatttttgagacagggtcttgcttcatcacccaggctggagtgcggcggcacgatcccagctcaccacagcctcaaccttccagcctcagtgttcctcccacctcagcctccccagtagctgggaccacaggtgcgccaccacacccgc

SEQ ID NO: 1886904 - DNA, 4001 bp, Homo sapiens; identical to SEQ ID NO: 1244146

SEQ ID NO: 1886905 - DNA, 4001 bp, Homo sapiens
aaagtacaagtggatgcctaataagaaagatgtctgattttagataagaatatacaacaggttgactgatttaagtgccataaaccctgtgaactcttgactcttgcactaagcaatgagagaaaggggaaactggaatttatagttcccccaaatacatggttttaaaaatgagcattttccagttttctcctaatccattagaaaaatatatttcatataatcttgcttatttggttgcctaattaaatctgacagttcagtcttaaaaatttggagcagcagtaagattattttgttatggtgtgtctgaatttaatatttaagtatacgctgcaaagggctttgccttatttggtatttttcattctgctaatttagatttcaggagcctcagattggggctctagttcgccatctgttggtccaatacccttctactgtattttgtggaattactatttatgtgtgtatgtgtgtacaataaaaaagtcaaagtttttccccagggttgtaaattaaaaatccaagactaaagacctcttttggatgtgtatacaaatattagtttattctttgtgtaatttgaccctatgactccaaactgcctgcctttggtatttgagaactatgactatgcttgagagtgtgattttaggagtacaaatggaaattcgcagaaacctaggtgcagatgttgcaggggcaggtgagttagtgtaactttgtgggaagactaaaaccgttctgtaacgactgtgagggtgttttttgataagcagaagtgacgtataatgccggatattggttctggtaagccacaaaaaagtgtgaagcattttgcgtcttcctttttggtagtagagcatacatacccttcttatctgccgaatttgatgatttaatgatttgaacgattttttcttcagtcatttaagccagttttgatgaatcctagattagtcttttaaatctcaagatactccactcatcttttggcaactttaaagggtggtagaattacactttgtgtgacactttgtattacattatgtttatgaattctttaagtctaggaaaggttccattattttaaaggtcctattttggggacaatataaagttctgtactgataaactggtcatgagaaatgataaggtgccaccactttaaaccaactctggtaacgaggtgggaagttggctttttgttgtgagacttgtgtttctttatggagttctttgttaaacttttagcatggcagtgaacttccttttggtggcggcaggaagcataaatactcattgtgtaatgccatttgcctgttttggcggatctgccaagccatgacacccaaaacaagacgcgtgtttcttcacgaaaactacagttcccagcgggcccggcgccggcggggccatcacttcccctctggctcccggctgtcccttcccgggctggcccggcgcgggccctggctggggcctgcgcagtgactacgtgcaccctccccaccccgcccaactctggtggctgcggagcgcggtgctggggctagtgcccagccgtgctgcagtatacggaggctggctgctagggacaaagggcgggcggcggaagccgcttcactggtcagggagctttctgcagggttagccttggaatagtgtggtgccgacggccttaccctctttactacacagtgcaaacagttcctcgctcacgtcctctcgctccgcggcgccggcccgccctgcccctcaactggcgagccgcaccgccggccccagcacggagggcatgtgacggcgtcagtgcctcaggttagactcacctcggccgcagcgagggctggcttccccctgccgcagtgctgcgtgccgtcgccgcacgtccggggcagctggggccgggcgccgcggcctccgcagatggaggtacaaaaacatcggccacggcgaggagccatgactgaggcggcggcggccgcgcctcctggcggcccgcgggggcggcgcggcgggcgccccctggcggcgcgccggggtggagcggcccttcgccgccgcagccgcagccggcggaggcgctgctgtccctcctccccgtgtccccggcgctcgcccgcttgctcgctcgctccattctccctccgcttcagattaaagggggggagggaaaaggagctcggccgccattttcccagtgccgccgccaccgccgccaccgctcgccgagccggcgggagaaccgagcaccgtagcgaagccgactcgtctcgccgcggcggcgcggggggcggctgaagcgcgctccccggctggaaagaggcggccgggggtggcggcctgggtgcgggttcgggctgcagacggcggtgcttgtttgtgcggggcgggggggcggtttcactctctgcccccgcccgcccgccctcccggccgggctgcggtctccagccgtgctcgggccccgtcggtgcggagcaaggccgggaaagggcccgaaagagaagaaaaagcagccgctccccgccgccgccttcccctccccctctgcctcgcccccccgcccggaaagtcagggcggctccgggcgtcggggggaggagagcggcgggcccgggccggagccgccgtcgcgcgcccccgcccgccgctggccctcggcgcccaggccggggggctgtttgcaaactgcgcccattttgtggggctgaatccgcccgggctacgctcctccatcacgtggtaggtgctgctgctgctcctctcctcctcctcctgctgccctttctccttctcctcgctctccctgtggctcccatttctctctctctttgttagttgtaactagaaaggcagggcagggtagaaaaatcccccggaactttaaatggcctctccgggcttccctgctgcgggtccgggctgggagtcgccccaagggcgggggtgtgcgggggcccttccccaggagctgccgcctcgttcgccagcttttcctttggcgttctatttaaaaaggcggcctgaagaacatgatttattcccgtaaaagaaccccccaaacaaactctggctctcgccttgaacttctcttgactgcaaaaggcctttctctgctcgaaacacacatcttggcgcgttgcacggtttgtatcacaactctgattgtttcatttattatttttgttgcctgtaaattcaggtcacttacgttttcagatgtagtctccctcaggcggactttttttttttttaaactaaagaggaagagggatttatttgcttttaagtgagttggaatcttaactgcctttttgggggcctgttttccggctgacggtcttttgattcttagcaaatagtttgttttccatacgataaacagcgctactcccgtgtcttacttaaaaatcctcgttttccaatgttggaatcccaatgtggatttatagagaaacgtgctacttaactattgcttactgattgctttaggggagaaggggtgacatgatggcgccactttaaattgctctctttccttttcctcggtcccccccacccccctttatcctggaggtcactggagcattttctgtgacttattaataaaactgtacttgagggtgttagaagcacaactcgtaggggctggagtttagtgctcctagggtcggcagaccgactgccgcggtccccaaagttccgagaaatctctcttcctccagcctcgcctccctcccctccattcacaatcctggtgttgccatctcctttgtcacgtggctagcaatcattgtgtttttttgtttgttttggggtgtgtgtttatatttttaaattgcagctcagaggaacctttccttttcgctttggagagatcaaaacgttttacttgttttagttttagagtcggagaacattttaaaataaacgataaaattacataatctttgccttgcataatcatgatatagttatagattgctactgaa

SEQ ID NO: 1886906 - DNA, 4001 bp, Homo sapiens
tcctttctttaaagattttcctatcatatgaaactatttcggcctgtggtgtattctttctaattagagtagaatactaaagcaaaaccatttcaatccaagttgcataaaaatgccatccctttccgagtgactggttttcaaagcgagctcattacctggaaaaacaacaacaacaaaagtgttgcctctctgaattcacgtggtttggaaaattcttagccatctacagatgcaccaactgaatcataataaagaagagaaaatctataaatgattaatttcctttttctatttaggcttaacatgttttaagggataattaaacttttggcctgtttcttagaagtccaggaggaagcatatttcagaagaagcttattgaactgagcggtgaactcattcattatcctttggttaatacagagtgaacttgtctaccctcaggttcatttagctttaggctacagcctagattcttagacatccgtctattttacagtattaattcaagctgtttataaataacacatgactaaatagatgttaaagaagacctcccttggggcaggcattattcccacgtgcatggcaacagagttcgtaacagggcttggtgaacagtataatctcaacacattaactgggaccacatcgccatttggctatcagagcagccacaccgagtgcatcatctcttgcacacccttttaatttaagtaccttgctcagtgctaagaaaaaaggcacacttgttaaggcaggagtaagtgcggatctgcgaaacctaagcaagcatatttcaccagcacctcctaggggccacgtgtggatatgaggatgggaggtggggactcgcacagaacctttccttgaattgtcagtttcacctctcctacacacaaaaatccaccccgactgcgccgtccacaataccagctagtttgctgaattagttcagcgactcaaggaggccttacgaggtttaaataaactgcacaaaagacacatttgatcgctcgagaaaataaacatttaaaaaactcagtggaaagaaagactcctaaaatatatcctgtcctttaggagcaaagcttcgttaggacaccgaagtactcagaaataataggcacttactcttcggtttacacacacacacacacacacacacacggattagtttataaagttccaggatccagacccggttaacactgaagttgctttttaggggtctgcgcgctctcgcctggctgctgggaaggagggctgggaggcgctgaagcgagggcagatctgagtgtctgtaggagttgctattccaaaaaaaatcattactctctaattgttctgattttagatcagcaaagcgtgccgggcggtggtggagagactgagggcggacaaggcgagagggaacgagccgtccacccttcggagaagcctaggcgccttgtaagtaattcgcgaacagtcgggagaacaaacagccaagcggcgctgcagtggccgcacttgcgcgcgtctcaatcctgggggctctgcgcgcccgccccagtccctcgccccattgactcagtggcttctccgggcgctgcagcctccgcggggggcttcgaagggccgaggggctccggcagagagggagtggagagggagacgcgccgggaccgacgaacaatcctgcccctgcggcaaaggtctctacccggcgctggcacctcgcaggcccctcgaggagcacgcagggcaagcggcccaagagcgggggaaccgggaagtgtgtggggctccagacggagtaggaagctttgcccaaggccaggctgcaatcaggcagccgcaacagccgggcgcggagcttcccacctgctgctgtcccagctgggccgcaacttcctcctccccggcccgggcccgactccccggccgggctccgagggtggagggggacgaggcggcggcaggttccctccgctggcaacgcctcgcagcatcctcccctccccgccgcggttcccggggccggccgcgcggccaggcgcgctgcgattggccggcagcggccgggggcggggccaggagagccggtgtcgcacggaccgcctcaaaagagcccaggatattgcagagcgcactggagccctggccagcgcgcagccttcccggcgccggcgggctgggtcttgggaattctggtttgctttggctcactcgctttttacaaaccactggatcttacatgcctctgtaccccccacttccactccatgtccccatgctcctgcgccagcaacaggtaagggctgctgtgttttcttccttttcgctcgctgccggtgtgtcctggggaatggactctggccgccgtcccctaccctaccctgccccgctgctccagaggtgcccagctgtcacactgctgtagcgctcacccacactccggagtcccagatcatgcctatatagtttgtgtgcgcaccagaacatccccagagctaaaaatactgagacatgcttggaacagttgagcaatagaaacagatttctctgcagcatctgtttgtgctcataacttccaatgcaccagctgtagcgagatactgggtttggaggcaagggcgagagcgtctgtgttcggttctcactctaagtggggaaaaaaagaaagaaaacgtggttgcgggtttgggggtgcgtcttgagccctggtcttaaaccttggcaaagcttgggactcagcactattcttgatccttggctttttttttttttcgtcattgcttcaagtatagctgtgagtttcaaacagagtgagtgtctcaaagttgccttcctgaaagaagagcgggagcccgagttggatttgagcctgaggatcgcaaaactttcacattacatatcactctcccctaaccaatttgttattttcagtaataatggtattaatacctggcttgaagacagtgtggttttaggaaagcaaaatagtcaaaacgacttgattctgcaaaaagattgcatcatagcgtggattcatcatgacaattggaaaaaaaatagggatagggaatgggcagtttaatgtctgtgtctgggtaaggatatcataggatgatcactaggataaaaggctgtgaattccgacgattttcataaattcagattttacctgttaggaaataaggtgttatttgaaaacctcggatatgcaaagaaaccatattgcgttttatcatttgttttcttttcacattaataatcaataggctgccagatttcctctcgccaaccaatgttgtgtgtctgctgtacattatctgtacacttgttagcgttttcctgctcacttccaaatgtttcatttctatttgccattatctggaaaaatcctggtgctcagaaggggtaagagatgttaattgaagcatggtggaaagggtgaggataaggtcaaggccattttacttagcttcctcctctctcatattttaatgacactttattttttaatgttcttggtctccataagaaatatttgatctaaactcatgtgaattttgcttttaaaaaaaataaaagaacacagtctttctacatcctttggattcctgagttgtagaatctctggttagctgtagcgtccttgtatgacttttgcgtagcctgaaagattgaaaacagctacctgcacagattaagtgtttcagatttttttaagtgtatatttttatttaccaaacatgtctgtttttcagcgtatgcaaatgctgagcagtgctacaagccaagtgtcgttgagtataaatgttagacagggggctcacacgtagatagatgggtatccccctcccctccccacttccccctcctcctccctcatgtttattgagcttctaagaggctgctttcctagcagttgtgctcacatagcaacatgtgcccagagcacactcaggctgttctatatggcgtcagctggggaatagctgctctaaaca

SEQ ID NO: 1886907 - DNA, 4001 bp, Homo sapiens
ggccgtgtttgggcactatggttgaacacctatcaaggagcacgtgggtttagcgtcttaccgcgccccagtggcctaatggataaggcactggcctcctaagccagggattgtgggttcgagtcccacctggggtgtcgagaggggctgtgctcgcaaggtttcttttggtgccggcagccagagacctcagaatccaccaccacctgcccgctacctgcttgcctctgccctgtttgcgcccctcgccttctcttgcaggaccctctgtttgcagtcgcggtggtcatttacctctggttctccggggctgccccgccaggtggagctggggtgtcctgggaaccctttgggcaactttattcttacgagtttccccagcttcgaaattgtggggccctacccggacgaaagctgttcattcaagggcttggcaagacccgagcttaccggctttaggcgcttggaggaggtggctcctcctcaacacgttgcacgggagtcgaactagagaccaaggtcgattccagcatccctgagaagggaagagaaaagaaataaaaaattccgtaaaaggaactttcacctctaccccaggtgggactcgaacccacaatccctggcttaggaggccagtgccttatccattaggccactggggcttggggcacgtggccgtgccatcccttcccctcataagcgagtgtccccttttcctagagaaggcctgacagaggcgcgatccatggagtgggtccgtccctgccgcgcgcacttttggtgagcgggcgggaagataccgcggtgcgcagggacctgcccccatccttacttagcgagcaccagcccccagcccccggcactgggacgccccatggagccccgagggtccgcttggtggttgcctggacacccggaccatggggtatgaagactgaggtttggaggagtttccttcctaccgccctgagccttgctgtccgcctctacagaactgataaaaaatccaggaattttaggaaaaagtagcgtaggaagtgaaggagaacagacaagtattaatcatgaatattgaaacataaacactgaaaatcttgcttatcatgagggaatgtacaaccagggggaacaagttcttccagttgtaatagtagaaatatatatatactagatactacaagtatagatagaaaggaaaatcagccaagtagatatttcaccctaattctaacaaagaataagcacattttaaaatgttacacacatttaaaatccattattaaaggctacagaccgggtgcggtggctcacgcctgtaatcccagcatcccagcactttgggagggtgaggtggggggattgcttgagcccaggagttcaaaaccagcctgggcaacatagcgagatgcagtctcatttgaaaaaaagaaaaaaaagaaaaaaaattattaaataaaagtctactcacatccgaaggatttaacagaagaagttcagccaagggcagcgtcggttaccattgtgcttctcttgggaccttgccaatctgccccagcatcgcagggcaaaggagacttggggacattcttttctgtttctctccaaaatgtagagtctgcagaaacctgtctcctccccttaatagcagcaagaaggatttaacccacttggctccagtttactgccttgaggatgcccccctttaagttaactaacttgtccgttgctgggatccagcactctgccccagggccaacctgcagggatgccttctctgctttcctgctgccgccctctagctaggcatgttcccccaacccgcccgcccggggctcagccttgccttgctcagctgttcctattcgtccccagggtcctcttgtctccctgggtcttggatcttacagctctaacctcactcccagctccaggtttccattccctctcctgggcatcaccactgggcacccctcctcgaaggcaaaaccacactgatcagctgtcctcccaaggccactccccttcatgacgttgctgtgtgagtgcacagcatcatccatgtcacacccccactcccacactacccaggccaattttctgtcctcataatcctccagcatccagtatttcctccccatccctgctgccgccgccctagttccagaacgtgtccctgactgctcacagggggtcagttgccagccatgcacactttcctacagtctcctcgttctgtcgtgggcagagcagtcttcctgccacagcctctgtaggggaaagactaaatgtcttagctgtcacttttaagtcctttcttaaggatcccagtcaatgtggcagactcatcttgcacagctccttgccctctgggttccagccaaattgggctacaaatcatggctgacattccccaagtactagctcagtgccactaaccacgtatttattcactgaaatcccacaataaccctatgaggaaggcgctaataacataacctctggtttaggctgaatgcagtagctcacacctgtaatcccagcactttgtgaggttgaggcagactgatcacttgaggtcaggagtttgagaccagcttggccaacatagtgaaaccccatctctactaaaaatacaaaaattagctgggtgtggcgggcacctgagttcccagctacttgggaggctgaggcaggagaatcgcttgaacccaggaggcggaggttgcagtgacccgagattgcgccattgcactccagcctgggtggcagtgagactctgtctcaaaaaaacaaacaaacaaaacaaaaaaacccccctagtttataggtggggaaactaaggttcagagaggttagatagcagctgggggaggtggacggatgggagctgaccctgagcagtttgcttcagagcccattctctcaatcacaagtttcctgtccagacgcaggcaggcctcggagttgccattttcctagcctttgctgttggccaccactggagcctccaagtgacatgctgttaccctgccagttctcccctcccttcaggcccatctcaagcacatcttctccaaccctccagctagaactagtcactcctctgcctccagcaatctactgagacctttcttatgtcattcatcgtgcttcaggtcctgctactgtaagaggaatcaatttttcctctcagcttttgttatcacctgatcaaatgtcaattatctggaagaatattgctttgttcacttctgactcctccccaccccacgctgtgagtgcctggcattcacttagcatttgctgaattactgaatgaactaggaaattttgtacgtcctgcatatgagcctcagccccctcctaggctctgagtcccttgaggacagggaccacgtctttactttaaaggagccatgctaatcttctctgtatcattccaattttattttattttatttttgagacggagtctcactgtgtcacccaggctggctggagtgtggtggtgcgatctcggctcactgcaagctctgcctcctgggttcacaccattctcccacctcagcctcccaagtagctgggactacaggcgcccaccaccacgcctggctaattgtatttttgtattgttagtagagatggggtttcaccatgttagccaggatggtctcgatctcctgaccacgtgatctgcctgcctcagcctcccaaagtgctgggattacaggcatgagccaccgtgcctggcattccagttttagtatgcatgctgctgaagtgagcaaatttttgtagtttgtaagtcatttatagatgaatttccccttgtttagactcatgtactcatataaaatagatcaaaatcatatagaacagtttaagaaatttatacatgccagagcaatctactactgcaatgctagcctgagacgactgcaaaaatctccttccagttccaacttactgttcgtgcctctaaaatccactgcctaatgcag

SEQ ID NO: 1886908 - DNA, 4001 bp, Homo sapiens; identical to SEQ ID NO: 1244169

SEQ ID NO: 1886909 - DNA, 4001 bp, Homo sapiens
gaaaggtggaactaaattgtggcttgttgagggggtggtggccattactggtgacctgggggctgctgctgtgccgggtccttcatactatgctgagctgggactgcagctccatctccaggccctggaacaccctctggagctccgtcacctcactgcggctgctctgtaccagttcactgctggaggccacttttttgttcagctccttggtctgagacaggaaagcagagtgaaaggtgaggctctcccaaagcccccagctgggaagtgctgcaggcccactgagggcccaagccccaccttgctcaggaaccaggcccagcatctctgtggttgtgctttgccatctgctcgtactggttgcgcatctcattcaggatgcagctcaggtccacgccaggtgcggcatccgtctccacgttcacttctccaccggtctgacctcgcagagcaagcatctcctgggaagggatggcaggaggcggtcagctcagcagactcctctcctggccctgggtgcatctggcaaccccaccaaaccagcctcccatcccggaagccagcagcaaccacacctcctagtggttcttcctcaggtaggccagctcctccttcaggccttctatctgcatctccaggtcagtcctggccagggtcagctcgtccaacacccggcacaggccattgacgccagcctccacagtcagccgcagggccagctcgtgctcctaactggcaggacagaggtcaggtccttaggctgcagccctgaggattctgaggctcggggtctgctggccctgctgggtggacagctccactctttgtcccttgccctctgcccccagcccaccatgctggctgctcacttggtcctgaagtcatcagctgccagcctggcattgtcaatctgcaaaatgggctgcgcattctcaatggtggccgcaatgatctggagtggggatggaggacaggagccctggtcaggcaaggaccttactacttgagcgtgaaaggcagaaaggggcaaaaggaacctcctcaaatctggaagtcttctggctggcagggctggcatgccttctccaccagctcagggtatgcagggatgcactccatcccgatcacccccttcctgggcccaaggcagggaagcggaacttgcagctgaacccttgcaggaaataagagattcagggtaacagccccagtccgggcacagagatgctgaaaagggaccctctgccaccacttccctggatgatcctggctactccccaaaggtgcccagtctccctgtttgtaaagtgcaattgctaaaaagaggtatcccaagggacactatagccccagcctctctcagtgctccatacaccaaagtcacccaccttgtgcctcaggtcctcgatggtcttgaagtagggactatagtctttgatctcactgggccgctgcctctggtaccagtcacggatcttcacttccaggtcggcgttggcctcctccagagcacgcaccttgtctaggtaggaggccaggcggtcaccgaggtgctgcatggtcaccttctcactgcccaccagaagcccatcaccaccagcaaagccaccacccaagccagcacccaagccaccaccgaagccagcaccaaggccaccaccatatcctcccccaaagccactagcaaagctgctgctgctgccgaagccaccgccatagccgccccccagcccgcaggctcccccaaaggagaagcgagagaaggagacacacaggcccccccgtaggtgctgggggcatggcaggaccctccggccaggacagaggagatgcggctggagccgcccccgatgctgcccccgatgctgcaggagcccttcatggatctggaggaggtgaactggtggctgcaggtgctcatcgtgccaaggagggaggtgagcgagcgagcagttggctgaaaaaagggaaggtgctcaggaaggctaagagcatgctgtggctgcctccaaccccagagacctttatatgcacctggggaaggcggggccctcctaactgctgactccaggttcccctctggatttcatcactcccagtcccgtccaactcctcactctggattattcagcccaggatcaactccgctgtgtgctggctcagagttcccacccagctttgagagtgtggagctgagagaaaaacacacaaatgcgagtcggtggtgactcaggctaggtggccgggaatcaggctcccgttcctggagcccttggggccagtggggccttggcacaggtggctttgtggcaactgcgtccccaggcagtgagtcagcccttcagaagaactccctgccccacagtgacagccttggctgaaagagacctcagtgatgccatcctgggctgtcttggggagcagttgcggggatcctacatgtcccactctgggcaggggcagagttcgtgtcttcactctgcttgctgtgtggcctgaggctccccacctcccacctctgggcctgtttcccctcagtggtgaccaggctggactgggtgattgcagagtcccttctggttctaaaaatcctatgactctctttcccctcttggatctaattccagttccggaggctgccttgagcccccgggatctccagaagtgtgtgcaccatacaaacagcactggccatggagccagacaggcggcactgagtccctgctctgcccttaccagctgtacagcacaggctggtcttacagccccttggtcctcagttttctcatctgtaaaaggggatgacacaccactagccacaaagaaacatgtgcgaagcgccccactggcccttccccaagggccagccctgcccctcatcctcctcatcctccccctccagccacctgctcctcacactcacctctacacactggcaccctcccgaaccgctacgcggggccctgcgtcccccacactcccagcagaagaacaccacagccccacacctagctcctccactcctctaccgccctctcctaatcacaggcaccccacctgcaggccggtgggagggagccccgtcctgccactgcagccaagtgtgacccctgaccccgccgtgggcctcagagttcccccctaccctgtagaaacaggactggctggggatccgttcccagcagttctctctcctgtgtccacagatcccacgctgggcctggcagctccattcatccagctgagctgggggagagcaccggtcatgggcccactcaggcacgcatggagagcctggtgtgtgttgtacggttctgtgagcagggatgacgggggcgttattcctgccaccagtcctcaggtgagggagctgggattcagggaggataagtgggcttcccaagacaccaggcactggaagctgagatgtgaacctgcctgcctgttctccttgcctaagcctgttctgtcatcctgagccctctctctgtgcatctcaaatttatatcattttcttgatcagaggggacagaggggtaaccagagacaggtggagattcactcaaagtcactctgctttaagctgcagagctgcaactagaacccagacctcagccctctccaggctcccaccatgcctgcaggcggggccagtatacccaactctcacccacctccccacgatcactggcatgaggtctgcccagggtgggcgtggccttggcctgagaggctggtgcagcaccgaggactggagggaggaggagggatctgggcaccaagacggggcctcctcagggtgccgtggggcatcccttggtgctggccactggccttgctctgcagtgcctctgttgaggtgaggagcccagagacagcctgcctctgcctgggctccactggggcaggcaattccttgtctcagcagaaccagggttttgttgctgctacatctcccctggtcactctgggatcagaggtaagagcagaatggatgc

SEQ ID NO: 1886910 - DNA, 4001 bp, Homo sapiens
ggtggaactaaattgcggcttgttgagggggtggtggccattactggtgacctgggggctgctgctgtgccgggtccttcatactatgctaagctgggactgcagctccatctccaggccctggaacaccctctggagcaacgtcacctcactgcggctgctctgtaccagttcactgctggaggccacttttttgttcagctccttggtctgagacgggaaagcagagtgaaaggtgaggctctcccaaagcccccagctgggaagtgctgcaggcccactgagggcccgagccccaccttgctcaggaaccaggcccagcatctctgtggttgtgctttgccatctgctcgtactggttgcgcatctcattcaggatgcagctcaggtccacgccaggtgcggcatccatctccacgttcacttctccaccggtctgacctcgcagagcaagcatctcctgggaagggatggcaggaggcggtcagctcagcagactcctctcctggccctgggtgcatctggcaaccccaccaaaccagcctcccatcccggaagccagcagcaaccacacctcctcgtggttcttcctcaggtaggccagctcctccttcaggccttccatctgcatctccaggtcagtcctggccagggtcagctcatccaacacccggcacaggccattgacgccagcctccacagtctgccgcagggccagctcatgctcgtaactggcaggacagaggtcaggtccttaggctgcagccctgaggattctgaggctcggggtctgctggccctgctgggtggacagctccactctatgtcccttgccctctgcccccagcccaccatgctggctgctcacttggtcctgaagtcatcagctgccagcctggcattgtcaatctgcaaaatgggctgcgcattctcaatggtggccgcaatgatctggagtgggaatggagaacaggagccctggtcaggcaaggaccttactacttgagcgtgaaaggcagaaaggggcaaaaggaacctccccaaatctggaagtcttctggctggcagggctggcatgccttctccaccagctcagggtatgcagggatgcactccatcccgatcacccccttcctgggcccaaggcagggaagcggaacttgcagctgaacccttgcaggaaataagagattcagggtaacagccccagtccgggcacagagatgctgaaaagggaccctctgccaccacttccctggatgatcctggccactccccaaaggtgcccagtctccctgtttgtaaagtgtaattgctaaaaagaggtatcccgagggccactatagccccagcctctctcagtgctccatacaccaaagtcacctaccttgtgcctcaggtcctcgatggtcttgaagtagggactgcagtctttgatctcactgggccgctgcctctggtaccagtcacggatcttcacttccaggtcggcgttggcctcctccagagcacgcaccttgtccaggtaggaggccaggcggtcactgaggtgctgcatggtcaccttctcactgcccaccagaagcccatcaccaccagcaaagccaccacccaagccagcacccaagccaccaccgacgccagcaccaaggccaccaccatatcctcccccaaagccactagcaaagctgctgctgctgccgaagccaccgccatagccgccccccagcccgcaggctcccccaaaggagaagcgagagaaggagacacacaggcccccccgtaggtgctgggggcatggcaggaccctccggccaggacagaggagatgcggctggagccgcccctgatgctgcccccgatgctgcaggagcccttcatggatctggaggaggtgaactggtggctgcaggtgctcatcgtgccaaggagggaggtgagcgagcgagcagttggctgaaaaaagggaaggtgctcaggaaggctaagagcatgctgtggctgcctccaaccccagagacctttatatgcacctggggaaggcggggccctcctaactgctgactccaggttcccctctggatttcatcactcccagtcccgtccaactcctcactctggattattcagcccaggatcaactccgctgtgtgctggctcagagttcccacccagctttgagagtgtggagctgagagaaaaacacacaaatgcgagtcggtggtgactcaggctaggtggccgggaatcaggctcccgttcctggagcacttggggccagtggggccttggcacaggtggctttgtggcaactgcgtccccaggcagtgagtcagcccttcagaagaactccctgccccacagtgacagccttggctgaaagagacctcagtgatgccatcctgggctgtcttggggagcagttgcggggatcctacatgtcccactctgggcaggggcagagttcgtgtcttcactctgcttgctgtgtggcctgaggctccccacctcccacctctgggcctgtttcccctcagtggtgaccaggctggactgggtgattgcagagtcccttctggttctaaaaatcctatgactctctttcccctcttggatctaattccagttccggaggctgccttgagcccccgggatctccagaagtgtgtgcaccatacaaacagcactggccatggagccagacaggcggcactgagtccctgctctgcccttaccagctgtacagcacaggctggtcttacagccccttggtcctcagttttctcatctgtaaaaggggatgacacaccactagccacaaagaaacatgcgcgaagcaccccaccggcccttccccaagggccagccctgcccctcatcctcctcatcctccccctccagccacctgctcctcacactcacctctacacactggcaccctcccgaaccgctacgcggggccctgcgtcccccacactcccagctgaagaacaccacagccccacacctagctcctccactcctctaccgccctctcctaatcacaggcaccctacctgcaggccggtgggagggagccccgtcctgccactgcagccaggtgtgacccctgaccccgccgtgggcctcagagttcccccctaccctgtagaaacaggactggctggggatccgttcccagcagttctctctcctgtgtccacagatcccacgctgggcctggcagctccattcatccagctgagctgggggagagcaccggtcatgggcccactcaggcacgcatggagagcctggtgtgtgttgtacggttctgtgagcagggatgacgggggcgttattcctgccaccagtcctcaggtgagggagctgggatccagggaggataagtgggcttcccaagacaccaggcactggaagctgagatgtgaacctgcctgcctgttctccttgcctaagcctgttctgtcatcctgagccctctctctgtgcatctcaaatttatatcattttcttgatcagaggggacagaggggtaaccagagacaggtggagattcactcaaagtcactctgctttaagctgcagagctgcaactagaacccagacctcagccctctccaggctcccaccatgcctgcaggtgaggccagtatacccaactctcacccacctccccacgatcactggcatgaggtctgcccagggtgggcgtggccttggcctgagaggctggtgcagcaccgaggactggagggaggaggagggatctgggcaccaagacggggcctcctcagggtgccgtggggcatcccttggtgctggccactggccttgctctgcagtgcctctgttgaggtgaggagcccagagacagcctgcctctgcctgggctccactggggcaggcaattccttgtctcagcagaaccagggttttgtcgctgctacatctcccctggtcactctgggatcagaggtaagagcagaatggatgcacat

SEQ ID NO: 1886911 - DNA, 4001 bp, Homo sapiens
agaaaggtggaactaaattgtggcttgttgagggggtggtggccattactggtgacttgggggctgctgctgtgccgggtccttcatactatgctgagctgggactgcagctccatctccaggccctggaacaccctctggagctccgtcacctcactgcggctgctctgtaccagttcactgctggaggccacttttttgttgagctccttggtctgagacaggaaagcagagtgaaaggtgaggctctcccaaagcccccagctgggaagtgctgcaggcccactgagggcccgagccccaccttgctcaggaaccaggcccagcatctctgtggttgtgctttgccatctgctcgtactggttgcgcatctcattcaggatgcagctcaggtccacgccaggtgcggcatccgtctccacgttcacttctccaccggtctgacctcgcagagcaagcatctcctgggaagggatggcaggaggaggtcagctcagcagactcctctcctggccctgggtgcatctggcaaccccaccaaaccagcctcccatcccggaagccagcagcaaccacacctcctcgtggttcttcctcaggtaggccagctcctccttcaggccttccatctccatctccaggtcagtcctggccagggtcagctcgtccaacacccggcacaggccattgacgccagcctccacagtcagccgcagggccagctcgtgctcctaactggcaggacagaggtcaggtccttaggctgcagccctgaggattctgaggctcggggtctgctggccctgctgggtggacagctccactctttgtcccttgccctctgcccccagcccaccatgctggctgctcacttggtcctgaagtcatcagctgccagcctggcattgtcaatctgcaaaatgggctgcgcattctcaatggtggccgcaatgatctggagtggggatggaggacaggagccctggtcaggcaaggaccttactacttgagcgtgaaaggcagaaaggggcaaaaggaacctcctcaaatctggaagtcttctggctggcagggctggcatgccttctccaccagctcagggtatgcagggatgcactccatcccgatcacccccttcctgggcccaaggcagggaagcggaacttgcagctgaacccttgcaggaaataagagattcagggtaacagccccagtccgggcacagagatgctgaaaagggaccctctgccaccacttccctggatgatcctggccactccccaaaggtgcccagtctccctgtttgtaaagtgtaattgctaaaaagaggtatcccaagggacactatagccccagcctctctcagtgctccatacaccaaagtcacccaccttgtgcctcaggtcctcgatggtcttgaagtagggactgtagtctttgatctcactgggccgctgcctctggtaccagtcacggatcttcacttccaggtcggcgttggcctcctccagagcacgcaccttgtccaggtaggaggccaggcggtcaccgaggtgctgcatggtcaccttctcactgcccaccagaagcccatcaccaccagcaaagccaccacccaagccagcacccaagccaccaccgaagccagcaccaaggccaccaccatatcctcccccaaagccactagcaaagctgctgctgctgccgaagccaccgccatagccgccccccagcccgcaggctcccccaaaggagaagcgagagaaggagacacacaggccccccagtaggtgctgggggcatggcaggaccctccggccaggacagaggagatgcggctggagccgcccccgatgctgcccccgatactgcaggagcccttcatggatctggaggaggtgaactggtggctgcaggtgctcatcgtgccaaggagggaggtgagcgagcgagcagttggctgaaaaaagggaaggtgctcaggaaggctaagagcatgctgtggctgcctccaaccccagagacctttatatgcacctggggaaggcggggccctcctaactgctgactccaggttcccctctggatttcatcactcccagtcccgtccaactcctcactctggattattcagcccaggatcaactccgctgtgtgctggctcagagttcccacccagctttgagagtgtggagctgagagaaaaacacacaaatgtgagtcggtggtgactcaggctaggtggccgggaatcaggctcccgttcctggagcccttggggccagtggggccttggcacaggtggctttgtggcaactgtgtccccaggcagtgagtcagcccttcagaagaactccctgccccacagtgacagccttggctgaaagagacctcagtgatgccatcctgggctgtcttggggagcagttgcggggatcctacatgtcccactctgggcaggggcagagttcgtgtcttcactctgcttgctgtgtggcctgaggctccccacctcccacctctgggcctgtttcccctcagtggtgaccaggctggactgggtgattgcagagtcccttctggttctaaaaatcctatgactctctttcccctcttggatctaattccagttccggaggctgccttgagcccccgggatctccagaagtgtgtgcaccatacaaacagcactggccatggagccagacaggcggcactgagtccctgctctgcccttaccagctgtacagcacaggctggtcttacagccccttggtcctcagttttctcatctgtaaaaggggatgacacaccactagccacaaagaaacatgcgcgaaggaccccaccggcccttccccaagggccagccctgcccctcatcctcctcatcctccccctccagccacctgctcctcacactcacctctacacactggcaccctcccgaaccgctacgcggggccctgcgtcccccacactcccagctgaagaacaccgcagccccacacctagctcctccactcctctaccgccctctcctaatcacaggcaccccacctgcaggccggtgggagggagccccgtcctgccactgcagccaggtgtgacccctgaccccgccgtgggcctcagagttcccccctaccctgtagaaacaggactggctggggatccgttcccagcagttctctctcctgtgtccacagatcccacgctgggcctggcagctccattcatccagctgagctgggggagagcaccggtcatgggcccactcaggcactcatggagagcctggtgtgtgttgtacggttctgtgagcagggatgacgggggcgttattcctgccaccagtcctcaggtgagggagctgggattcagggaggataagtgggcttcccaagacaccaggcactggaagctgagatgtgaacctgcctgcctgttctccttgcctaagcctgttctgtcatcctgagccctctctctgtgcatctcaaatttatatcattttcttgatcagaggggacagaggggtaaccagagacaggtggagattcactcaaagtcactctgctttaagctgcagagctgcaactagaacccagacctcagccctctccaggctcccaccatgcctgcaggcggggccagtatacccaactctcacccacctccccacgatcactggcatgaggtctgcccagggtgggcgtggccttggcctgagaggctggtgcagcaccgaggactggagggaggaggagggatctgggcaccaagacggggcctcctcagggtgccgtggggcatcccttggtgctggccactggccttgctctgcagtgcctctgttgaggtgaggagcccagagacagcctgcctctgcctgggctccactggggcaggcaattccttgtctcagcagaaccagggttttgtcgctgctacatctcccctggtcactctgggatcagaggtaagagcagaatggatg

SEQ ID NO: 1886912 - DNA, 4001 bp, Homo sapiens
tgaaggcctgatcacccttcccaactgcaaacccgaccaccacccaccatgctcttcaccctgtggctgatggactcacacagtcatcggaaccagaaacccagggccatcaatgcccactccttcatatgtgttcacccaacgcttactgagtcctgaccgtgagccacgcttaccctgagatccaggcatccagtcctgctgttttgagctataacctctcttctgcgtgcaccaccttccttcccctgcccccccacccagcctccaccccgcaagacttctctggccagactccctgctctagccccctgacgcgtctctctggccccaccctgacccctctgatccatttctccctctgtagccagagtgaatgttctaaaatatcttgatgttcattcccttcttctgctccaaatccctccatggctccccattgcctacgtgatctagtccagacgctttaacttggcagtcaaggctcctcagtcagactccagcctgcatcgtcagtttcacctcctgcaaaccccacaggttcccacattcacacctcctgaactttgctggtgctcagacaccaacttctccctgggtgaagtgggcccccagcccgccccagcaggtacctgggtgcacactcactgggcgtcctcaacctctagcaagcggctgtaggtggcgatctcctgctccagccgcgtcttcacgtccagaaggacctggtgctcgtggtcctggtgctctgcatcacagcagagctcgcacagctgctgttccatgcttctgatgagcccctgcagctgggccagctgggtcctgtaacacacctccgtctccaccaggctgccctccagcgatgctttctgtgggccaagagataggtggtgcgatgagatggacgtgggacccttccccatggcagagcactagagaggagcccctcctgtatggagctgtgggtgctgccggcacagttgggtggtagtgcacccagccactgagtgtgaagggacaggctgggtggggactctggttctccaagcaggggtctataaggctgcgctcaccctggggtgacaggtacagggtggggaggggacaggggccctaccttgctgagctgggacggctcaggttctgcacagagatgtagagctccacatctccatcctgccgctctgcagggcctctgtgttggtggccaccttgcagttcagcccctctctctggaaggcagagtgggccacaggggtttatggagactttcacaagtggggcacaggaaaggggctgttcctgagccctcgcctcccagaaccatcccctaaaccctccctggcctctatggggccccaaaagcacctgcacacaaagactctctgcacccatgttggaccttggaggaattcaacctgctctgcggtcgtttgcatttcttactcctaccgaactacagcacctcaaagacaggcactgggtgttattcttttgcacctgttgctgtccctaggacaccggacacactcagcctgtgcttgccaagggtatgtgtatgtactcaaatacacacatcctgtaaacagctgtggtggaaacccaagaccagacttgcagagaacgggatctattttgcaggccacagtgaagggctgtgtgagcttgagtcctctctgagcctcacattttacatcgaagacatgaagggctggtccgactggtttccaaaagtccttccaactgggacagcctgtgaatctgccggtgttccaactgcaccagcacacggcgtatgtgcccacacgtgtgcacacctgcttacacacggccacccaccacgctgaagaaccagccctgggcatccttgcagctcttctccaccagtttcttgtcctggtcacgcatctcattcaggatgcagctcaggttcactccaggcacagtgtccatcttcacactgacatccttgtccacctgacctcaaagggcgttcatttcctgggcagagaggacagtaggaactcacccaaggccatcctggggaaagaccctggggcctgccttctctccctgggagagacaggtacggatgacagacagacagacagacagacacagataggccaacagctcctcaccctgaaggtggagatggatgttgtcattactcaaacatacagggctatgaatatcagcaacctcccccaacacacactgtgactcgggactggacttcacccatccccaacaagtgctaagccccaagagatgacaaccccccagcacggcagagaatgaccatgggcgacctcactcactgccctggcctcgcccctaccaccgccttgcccccaccaccaaccccacagcacaggcatgcaaaaagcaaccttacgctgctgtcaccgcgccaggccctgttagcaaatgttaatctgctagaggaaaggaattgtataaccagcctcaacgccagggggaaacaccttccgggtgtcctgcttctcagggagtaggctcccccagcttagagcagcacagagctcagctgagaaggaagccacaggacagggcatgtaagacctcctgaccgccccggcaggaccttggatctctatccttgggttggagtccctgggacctagaaccttctggaaaggaggggcaggagaggggcagagaggtggggtggatacgagtccgacagacctgaaggagggtccctgtgcagccatagatatatcccttaacctctctgagcctcagtttcttcacaggtcaaaagaaagaaacagtacctttctcccagtttttgtatcagttgagataatggctgtgagtcacttgtagtgctgggcagaagttccttgttttaatgactatcactattataattaattatagtaattagtattgtgtgttcttacactgagttactcattagttagttaactgcagtgagctgagcctcaagggacaaatgaagtctatttgagaagagggctcctccaggcctcacccagggtcctctgagggtcagagctaggcatccataaaggatgggaactggactggaagcatggcccagcccagggaggttctgggccccagcctcgcttgcttccaggtgaatttctgctgcattccctgagctgaactcacctcctcatggttcttcttcaggtagaccaggtcctccttgaggttctcaggctgcatctccaggttggctccaggcagggtcagcttgtccagcccctggggcagctccagagacccagcctcacttggtgcagaagtcatcggcagccaggtgggcatcatccacctgtagccagtatgaagctggaattaccgatcacagccaccacgatcggggagagacgtgggctccatgagaaaatgcccttggcggcctccaggagaccctccaacatccttcttgcagcctttttggaagtgagccagggtgggggtgatgagagtccccgtggtcttctctgaccctcctgggaatttctgggacccagccaaggccctcgggggttaaagggtgatgggggtaggatgcccaggcatgggtaaagacggatgccaggagagagacccttatgcagccgtctcccactatgggggtcatggcctaagctgcctaggcctcactccctcttccccaacgaaattcacctctaggctcagctgccacctcctccagaaagccctcttggattacctttctgtgtctcttttccgggccatacctcctgccttctccagcccgggtgcacactcactgggcgtcctcaacctccagcaagcggtggtaggtgtcaattagttcaacttctatggaaaaagtagggaggtatctcaaagaactaaaagtacaactacctttcgacccagcaatcccactactgggtatctacccaaagggaaagaaatcattacataaaaaggcactgcactcccatgtttatcgcagcataacttacaac

SEQ ID NO: 1886913 - DNA, 4001 bp, Homo sapiens
ccttaactgtttcttctctttttttctttctttttttttcttttgagagggagattcattctgttgctcaggctggagtgcagtggaacaatttcgactaactgcaacctccacctcctgggttcaagcaattctcgttcctcagcttccagagtagctaggattacaggggtgtgccaccacgcccagctaatttttatatttttgtagagatggggttcaccacgttggccaggctgctctcaaattcccgacctcaggtgatccgcccacctcgaccccccaaagtgctgcaatacaggcatgagccactgcacccagcccttaactgtttctaatggaacttaaaatttttttttccatattctacttatgtaggaacatttcatacataattatgttgctcaggaaaggtgaatctataaaggatcaaaatacattttactcctttattcaattcacaaaatgctaaactttaacttgttaccttcaacaaaatattagtatgggccaaaaagatgtttttcccccatcaaaattctaatgtgtttttagattgttttggaccgatttcccaacatattaaatattagattacatcccaaactctatctggttactgtatggcatggaagaaaacaactctaaactgtattggttattaataagtttaacttcattcacattaagtgtcacacaaacactacctacctaactggctaagacccgaaattaagcaatgatccatcttatggattctgtaggcttgtcaagtgatgcttgttcagtttccaagtgtccttcgtcatgttgatcaaagtgattaccctgaaaaaaggatgatcacagctatttttcaagagcaataaatgtcaaatttattaacagcctaaccaaactaagagttatttttaagtttgtttttttgttgttgttgtttttttttttttttacctaaaaggagactgcaatcattctttttcagtagacaatcaaaaccacaccacaaattccaactttaaaaaatttataaaaacgtattagggctgggcacagtggctcacgcctgtaatcccagcactttgggaggccgaggcaggaagatcactcgaacccaagagttcaaaaccagcctgggcaacacagtgaaaacctgtttctggaaaaaaaaaattaattagccacacatggtggtgtgagcctgtagccccagctattcaggaggctgaggtgggaggatcacttgaacccaggaggtcgaggctgcagtgagctgtcatcaagccactgcactccaagcctgggtgacagaacgagaccctatttcaaacaaaacaaaacacaatttattaggaatctaggcccagtaatctgaacttttcttctaacaaatgttgaaattgtaaactaaaacactatcaaccatttgggacaccaattgtcttagactgactacattaggaagactatggactcttatgagctgcggcagagcgcgacccgttcccccagggccctccaagctcctcctgcccgggccggcaggtgagctggaggctccgggacaggcggcgccctccgccctgcacacacctagggccctgctgtgactgccccctggccagacccaggccttgaagcgtccccaccccatctcggtgactgacggcggcatcggcctctctcagccgggaccccgcccggccgctggatctcctggcccaagcctgccgggcctcgacgaaactccaccaagccgccggcacgcagcgcctttgggtggcagcgggagtggcgggccgggaagcctggcggccgcccgaacaccacccaacggaggacctgagggtgcagaggtcccgggaaggcggcctcgggacgcaggcaggctcggctgcctggttaggcctcggagccgcgcaaacccggtccccgtgaccgctctgtccccattggctgagaccacctagtcctgacctcaacggacaaaggccttaactggcctagaaggagaacggagttccgaacgacgaccggtagaacagttagcggccatcgggcggttggtcttagtgctactagaccttgctgctggaagagagaaatagtagaatgacaggccatgtttggcccgttggaaatgcccaccaccctttgggaagatttactggccgtttatagaaggcctgtgtatataatatgaaaaagcttctctcaactccaccccaaccttttaatagaaaatatttgccatatttagcccttctatagatggaaaaagccacgctgttttacttttataagcaatattgcattaaatttttaataatgaagaaaatccttcctgggtcgagtggggacttagagaacttttctgtcttacaagaggtttgtaaaatgcactcccaggcttttcaagaaattaaaaacaatctcttgacagtttccaaagcaactattcatcaagatgatctgcctagagagataaacatacccatataatactgtatttgatcataagcaagttgtcactgcaactaaaataagtaaaaacagtttcaacaaatgatagttgcagacaactaagaagttctctctaatcatagttttcacagatctccctgcttcattaggaaggaatagctcataatttggttctaaatcaaaatgtcaattttctggttcccttcttgcaatacagtatagggcatgaggatttgtgagtcccacaatgacctaagtcaaaagactaaagacttcagtcttttggtctagcctaaatgaattcagtgtgtggaatgatacgataaccggaatattaacaaaaagttactttgctttctcaaggtaaaattaaaattctaattgaggaattgcacatgtaccccagaacttaaagtataataaaaaaaaaaaggaaaaaaactggacttccctggggaaaaatccatttgatgatgtggcttcatcgagtattcctttgtgaattcctggatgaaattttcaaggcaaacaggaaaagcactgaaattgctgaatgggtgagcattgtatgcctgattcattaaatatatgcattggtaaatatataaaaaaattctaattgaataaataaaattcagtgatggggaactctagcatgtaatttgccacattgtatcataaatgttaagtttctctcactagactctgaagtcctcgaggacaagaactaagtcttgtttatcctttacaaacctaatacttaatatggcagccaaacactagggaacaattaggtgctaacattaagtggcaatgatgaacaagttctagaacaagatggtggtggtgatggtcatacaatattgttaatgtacttaatgccactaaactatatacttttgctttaagagaagggggtctcgctatgttgcccaggctgtcttcaaactcctgggctcaaggatcccaggctcagcctcctgactagccggaactacgggctccactacacgtggcttgaattatatactttaaaacagttaaagtgataaattttattacgtgtattttaccacataaaaataataaaaataaaattgtatggcaaagtctatccaaatgaagaaagggggaaaaaaggagaaaaatggaatagcaagggacaggagtatgttttccaaagaccaaaaaaaaataaaaattaaaaataaaaaaataaaaaaggacttatgagtagttatttcaggaataagaaaaagcactcatcaacaaatgatttttaaaaaatttaaaatagctattaatcctgaaagtctgtcttaaattaacctcaatattttgtccaatgattttttttaaataacacctgcttcttggcattttaatttctactacatttaaaattttaagttaatttaaaggtgttaattgcaaagtacttctaaattactaaataataaatattcaaatactgagattagctcaaaccttattatattatagaacaccaatgtaca

SEQ ID NO: 1886914 - DNA, 4001 bp, Homo sapiens
gaggagagaaccccagagaccctcattccacccctagtcccctgtcactaagacccactggggtcctttccattcacccctcagacacagagcccctgtcacctgcagggcccttggaggtcacagatctcctgcccctcgctcacccccaggcactcccacccctggcccagcatcgcctgagaagtgcaccctcacccagccacacctgccgcctccacaggtggaatcctgcttcctctattctgtttcctgcctctatcctgaggccccaggcggccccacccagatcctcccaccctccaccttcccagggccctgggagattcggaacattgctgggtgccctgagcctctgccccagtttgaagagacagaggtaaggggatcccccagcaccccctgtatacccagggcttggccaggggctcccctacccaggggtaagtggacccagcctttcttcccctctgcacccctcactcacctctgactggtttccaggaactgtcagcctgtggcggatccaagacgtaggatacggacacccaggaacaccccacccttccaggcagcacatcagctgtccaggggcccttcccaaaagagggcctagaggactgaatgcctcggatgaggcccagggcgggaggacagagcaagggagggagggagggaaggctggggaccagtgggaatgagtggggaggacatcacggacaggaaacccaggcctcgggggtcacccgtgggacacctcactgcctctcacagggtgaagactcctgtgagaggagtcttgaccagacggcttcgtccctctgtccttccctctgtctttccctccctctgcccttccctccctctttttcctccctcttttcacttcccccaccgcttccttggcctgagagatgcataggggtgagtgagaggcagaaactccagtgggttcccctttcaggctcacaccccctctccactctgccctgcagcctggctgagggcaacctgagggcctggggaaatgggagtcagagacaccaaggggactccaggctccttcccaccctgcagaccccaaacccccagctgcacctccctccccgacccagctaccagctcgctcctccctccctgcgccctggggaggctggtttctccctgttgatgagcgctcattcgcgcctgctctgcaatgctcttgagtggctttctccaggggcagatgaggccaggctccccaaaacagagactgtgtctcttcccttaaattggacacttcctcaaggtagcagccatgtctccccctcagattgggggctcccttgacataggagctctttctccctgatgtgaagggggtctctcaactccttgtcctggtgttgaccacccagcccaccacagtgtgacacacctgactgaccaacaagggaggagaagcagggcagggagcactgagggaggaggaccagggcagggaggactgctggaggaggaagaggggacggaggactaggtaggtaagaccagcggaaggaggaccaggggaagggcatgaggagagggaggactagggtaggaagaccaggggaaagaggaccaggggaggaggactgggggagggaggaccagcagaggaagggctatgggagaagaaccaagggagagaggactaggggagggaggaccagggaacgaggaccagagcaagccatcatctatcctttccaagggcaaaacaggagaacagggcaggagcattcctttgcagaggcctgggctccatggagtgttctgcctgagccccagcccgccatacaggcctgcttcctccatccaggaagctgagctgccctccagccagccaggagcaagctccctccactaaactcctgcagcactgtggtccctgccatctctgcctcagaacccagggtccctgggagccttgttattgagtgtttctggttgacgcacttttttcagcaaagtttcatggagagggaccagagtttctaatcttcacaaccacagggtcaggcattgtgttagctatgatcacactctatgatgtcatgcaaagagctccaagtccaagaacctggggtcaaatctggactcttgcccaacttgggcaagtcatttttcttcttttaggctcaaaccctcctcctctgcagaatgaaaggactagacttttttttttttttttgagacggagtttcactcttgttgcccaggctggagtgcaatggcttgatctcggctcactgcaacctccgcctcctgggttcaagcgactctcctgcctcagtctccagagtagctgggattacaagtgcccaccaccgcgcccagctaattttttctatttttagtagagactgggtttcaccatgttggccaggctggtctcaaactcctgacctcaggcgatccacccacctcagcctcccaaagtgctgggattatgggtgtgagccaccaagcccagccaggactagacttttgtaacaaactcttcatgagattaaatgagtcaatatgtagctgtcacaggccttgtagtaactagtgattcaataaagcttcggtgactccaaaagctggctgggcaaagcctccctgccatgagaagtcatcctgccctgcctgtggtaggcagaataataaaccccaaatatgctgggtgcgatggctcaagcctgtaatctcagcactttgggaggccgaggtgggcagatcacgaggtcaggagatggagaccatcctggctaacacagtgaaaccctgtctctactaaaaacacaaaaaattagccgggcgtggtggcgggtgcctgtggtcccagctactggggaggctgaggcaggacaatggtgtgaacctgggaggcggagcttgcagtaaaccaagatcgatcgcgccactgcactccagcctgggcgacagagcgagactccgtctcaaaaaataaaagctaaaaaataataaaccccaaatatgtccatatctgaatccccagaacctggaaatatgcaccttatagggcaaaaaggactttgcggatgtgaggctgtggttcacaagggatcttaacaggaaggagacaggagtcaatgcccgagaaggagacataaccagagaagcagaggtcagactgacgcgcggccctgagccaaggagtgcggcagcctccagaagccgaaaaaggcaaggaacaagtctctcctggagcctgcagaaggaacacagccctgctgacacctcagtcttagcaccctaagacccatgttggacctctggcttcagaattgtaagaggataaatgtgtgttgctttaatcccccaagtttttgataatttgttacagcagtaatggaaaatgaacgcactcccctagctcattctagcaccagaggtgctagcctctcacactcgtgttagaattattgggaggcggggccaggcgcagtggctcacgcctgtaatcccagcactttgggaggctgagccaggtggatcacctgaggtcaggagttcaagaccagcctggccaacatggtgaaaccccatctttactaaaaatactaaaattagccaggtgtgggccgggcgcgatgcctcaagcctgtaatcccagcactttgggaggccgaggcaagtggatcacgaggtcaggagatcgagaccatcctggctaacacagtgaaaccccatctctactaaaaaacaaaaaaaaattagccgggcatggtggcgggcgcctgtagtcccagctactcaggagcctgaggcaggagaatggcatgaacctgggaggcggagcttgcagtgagccgagatcgcgccactgcactcctgcctgggagacagagcaagaccccgtctcaaaaaaaaaaaaaaattagccaggtgtgatggcaagagcctgtaatcccagctacttgggaggctgaggcaggagaatcacttgaacccaggaggcggaggtt

SEQ ID NO: 1886915 - DNA, 4001 bp, Homo sapiens; identical to SEQ ID NO: 1244248

SEQ ID NO: 1886916 - DNA, 4001 bp, Homo sapiens; identical to SEQ ID NO: 1244251

SEQ ID NO: 1886917 - DNA, 4001 bp, Homo sapiens
cagataatggccactttaggtacacgtttgaactctaagttgcttgaagtaaaatggaaacttagaatgcgagctggagaggaaggccaaactctcctcccctcctcctttccctcttttttatagctccatcccagggaccaggacggatttaatgaaagcaaaaagatagaagtttcaaaactgctagtactctccccgtcggggaatcgaaccccggtctcccgcgtgacaggcggggatactcaccactatactaacgaggagggacctgtagagacctttctccgaatccttgatctgagactttacactctgcgtgctgacagcagggttcctaggggttctgttcttccaaccactgataaacgctgaccagaaaccgtaggtgtatttcaggcaccaatcgtcagatggagtgaccgaaagagacagagtgccttcaggactgcagagaaccaagttttgacagttcctgggctctcccgaacactgtcatccacaactatagattgacgcgtgtcaatcaaagcgaaaccaggctgtggtggccgagttgagacaccaggaaggaagtcaggaagcagaaagggagggacctgcccaagtctgggcgtgcctcgtctcttcctgacatgccaggcgggtctggggattgagatgctttctgctaccgcggtgccacaaaagagcttactgtacattgatgacttacagtcaagcctcctgcagcgctggtcaggtaacctattccttgaagacactcttgtctcagtaaaaggtaaaggagggctcgtccgggatttgaacccgggacctctcgcacccgaagcgagaatcatacccctagaccaacgagccgacgtgcggacgttgccgcgaaccgccttagaggtcgtgccaggcttgctgtagtgctgggtccactatgcatggcggaacggtccgggcgcacgctcacggaccagcctcccccaggccgagtattttggagcactgggctgggaatctcttggctccgggccgcgagctccggctcctcccaggaaatagcgtcaaggaagtgggagggagtggcctcggcctcgcccccgcgccgccttgcacgactgccttgaacacccgggttgttgcttcctttggttaccgacttggtgccattccgtaacctgggatcttgacacttcctgcctccgcctgcggtccttggacctagctcttcgttgcagagctttgaagagaagcggtggaattgcttgctttcgggacgggcaggagaaatcactaggggaacaccagtgccccgtgtctgtctatcctcctgggctaacgggcagggcaaaccctgggccagacccatcgatagtccacgggttccccagaccgcatggcagtacccaagcgagggaaagagggaacgatttctggggcccagaagacccacggaagagggcgttattgagctgggtgactggagggggacaggctttccaccctgcagtggggcggggcgcaaggccaggcgactagtctcatggcttccggactgtaagatcaggttacccctaccctacagtctaacctctgctccccagtcccctcctagaatggcctagaagggagaccctcctgcctgcctcctaagaccccccgaaggctctgaggcacgtggccgcatgaatgtggtcgaaggcctgtagacccggtttggggacttagcagtgtccccgggactgcccagtgagcctctgcgctcttaaacactcaccatgctgctcttactccggagctgcccagagtcccagcaagatctggtggggtcggtagcagaccacgtgtcctgcctttcctcagctcagtgcctgttctggggagtcctcccagcggggttctggcctgcatcggccctggaccagcctggtgtcatctgtggaaccattttgttctacaccccagttgtgtgatttgtggggccaggccgttcctaatgcccaacccatagatacgatgacggggctttcagtgaaggattcagctcctatttgtctttcccaggttcccctggacagacagtggggaagggcagcagaagttagcccagcctttcccattagtgtcccaagtctttgagatgggtaaagaggttctcagggctgatctggcatctcctcccccattcctacccttttccaattcctgtctccctccccttgggccccagctttctctgcaaaataatccagtcacctcttccctggcctcaggcacttaaacgctgcagaaggggaggcctaaatcctttatgacccttatgaaagctatgtccctcttcaccgggcacagtggctcacacctgtaatcccagcactttgggaggctgaggtgggtggatcacaaggtcaggagttcaagaccagcctgaccaaaatggtgaaaccccgtctctactaaatatacaaaaattagccaggcgtggtggcgggcgcctgtaatcccagctactcgggagactgaggcaggagaattgcttgaacccgggaagcggaggttgcagtgagtcaatattgtgccattgcactccagcctgggtgacagaatgagactccctccgtctcaaaaaaaaaaaaaaaaaaaaaaagctatggccctcttcctaaacatgtatacaatccagggagttcacacataatcccatccacataccccacactttattttttcctcagaaaagtgcgtacatagaccccacttttaataaccaagaactaacaaacagctgatcattcgtttattttatttcatttttttgagacggagtttcactcttgttgcccaggctgggatgcagtggcgcgatctcggctgacaacacctcctcccccctccaaggttgaagcgattctcttgcctcagcctcccaagtagctaggactgcaggcgcctgccaccacgcctggctaattttttgcatttttagtagagacgaggtttcactatgttaccaggtttcactatgttggccaggctgctggtctggaactcctgacctcgtgatccgcccaccttggcctcccaaagcgctgggattacaggcgtgagccaccgcgcccggccatacatggcaagtttctacatggtgtttcagacttagctgatcaccctctaccctcaggccagattagattccacttctccctgttcttacagtgccgttagtgctgaaaggggaacgtgccttgttcatttggttctgcacagggtccagcccagtgcttggcacaaacgtggtctcggcagtgctgcatccctggcttgacctggaggtagcaattccttcaagccatttgctcatcttacattggttcgtgggccatggaatggtgtcgagagctttctgcctatcttccaaggaggtttaggtcctgccaagagctcacagatcctatttcttgccttatctctggcatttatttcttccttaaccagcctagcttcagtgctccagaaaagtgccctgcccttccacaccaggatccctagcgactcccgaatgatgctttcttggactctgttcacatggcctcagcccttctgcaccctgctgcacgaaacctggtgccaggccaggccaggccagccggatccctgcttactccttaccctgacatcccgctggtggagagggatggaggtaactgcaagtgaaagaccagttagaggaccgcatctggaagctgtgccaaattttaaatactgtatatttaaatatatatttttatattatatactatatatataacattatgagccaccaaacccaaagaactataatgaagagccaaacaaaacaaagtggctcaggttctaggggacgtcctagggtggagaaagaggcctggaaggtgggcagccccttccatcgagggtggggcggccgcctgacccagtccacctgcaccagtggggtgtggcatcagttaagcaaaggacccttaggccta

SEQ ID NO: 1886918 - DNA, 4001 bp, Homo sapiens
acttaggggttttgcctgtctcgctcggacttgacagtctggacactcaaggtgatgagctgcccagagcacccaagacccagactccacccaggactgtcctctcctggaccacctgcctgaaacttccatcctgacccttctccaccttctcaatgggacctggggtgagagcccaagctgggagcgccggcctggcattgtgtagtttagacaagtccttgaagcagggcaggtgggggaatggggaggagtcgggggctcaggcccccatgttcctccccagcacagcctcacctgctctgcctcagagtgactcaggacaaaatccccaggtggctctgatggtacttgaagtgacagagggaaggaggaatctggaatggagaccccagccccaggcccttgagctcaacccagcaccagcccccagacctgttcactctttggccttccagggccagccccaggctgggctgtcactgatgtgggtgagcaggagtggtccccgttcctcacaggggcttctctctatgcacacctcacatcatcccccgacctccaggcataaaccagccttgcagccctgactccagacctgtccagagaaagtgccacctgcctggggagctgatgcagatgagagggaaggagagagagacagtgtcccctgcaccatgccctgaacttcccaagggaccttcatcaagctcccctgggggctgtattgttaaaatgcacagattcttggacctcgactctggacttccagaagcgaaatctctgcgggggtggaggaattgggcactgattctaatgaagtccccagggcaatctcacctgctttagagcagaggttggtaccctggctgcacatcagagtctcatgggaaatctaaacacatccgttccagggcctcacccccagaccaagcagaccagtgtcagggctggacatcaggcattcgtattttgtaaaaaatgattaaaatgtgcacccagggttgagaactgcttcagaatttgcagacctccagctgggtctgacccaggaaaacaggaaacaagagagatggtgtcagctggggcccttcactggtggggccaggtgggtggggggaacatccccacgatccaggcgacccccaccgctggccaggcaacctcatggctgaaggcgaggagggacgcaggcacgagggccttggcgtaaggaagctggctctgcagtcaggccctgccctggggctgttcagatgcccaggagggcaggtttatgcgaatgaagcaattacagaaccatttaaaagagtgagggaacttggtccagaaatgcctgtggagctttcaaaaggggtgagtgacctcatccagccaagaaagggtctgggagagaagctggaggccgaggtcttcagtctaggctaggggaggggagagaacgtttaagagggtggcaggcattcctgtcccaagtcaccaactgggtagcgctcttgtttgtcttatgcaagagtgtttagataagaacaggcttttgcatttcaaaaaggagcctgttcttcctcgccttgcttcttcctgtgctgagtaaacggaaggcacacccttgtttccctccctattcacagctcctctgtccgccacaaagacaacctcctccccttctgccctcgtcttctgcctgtggacattcaagggaccccgctcctccttcatcctttctctcctgcacgaatgaatcgtttcccgtgaatctgctctttgaaaaaccccttcctaacttccatctctcttcctctgctctctttgatgccatcgcttcttaaaagggaggcctagactcactgctgtctcacttttgtacgtttattttcatcatggtaaaatatacatagcataatatttaccatttgagcccttttaaggtgtacaattcagtggcatttacattcaaaacattgtgcaaccatcctgatgatctatttccagagcttttttttttttttttaaatcatcccaaacaaattctggaactgtgagataataatgtcccattcttttctcctcccagttcctggtaacctccattctttctgtctctatgaatttgcctattgtagaaacctcgtgtaagtgacatcattccatatggggcctttgtgtctggcttatttcacctaacatcatgttgcagcaaggttcatttcatttctttttatggctgaataatattccctcgtacagatggacagcaggtgttgacctattcatcggttgtctattcggcctccacaatccactgttttcatcccttcttgctgtctctacttctatgaccctggcctaagtcaccattttcttccaccagagtgctcagtggcctcctctgagatttcactcttttttttttcttttaaacagcgttattgaaatgtaattcatatattatgtaattctcccatttaaagtggacaattcaggctactctgcctatggagtggccatgcttttgtttctttacttctctaataagcttgctttcacttaaaaaaaaaaagtatacaattcaatggttgctagtatattccatgtagctgcaatcgtcaccgtggtccattttacagcatttgtatcacctcaaaaagaagctctgacccttcagctatctcccctccccaacgctcacccttacagccctaggcaactagtaatctactttctgtctctagagatttgcctcttctgggcattttgtctaaatggaatcatacaatccgtggtcttttgtgaatggcttccttcacttatcgtgatggttcccgggttcattcatgctgtcctatcggcacttcattcctttctatggccaaataactacctcattgtatggattcattggtggacatttatgtcgtttctatctttgggctattacaaataatgctgctttaaacattttgtacaggtttctgtatgaatatatgttttcgtttctcgtgggtctatacagaggagtggaactgtgggtcacacggtaactctgtgtaatcgtttgaggacctgcaggccacagtggctgtcctgcctcctctcttgcctctttcaaaactcctcttcacagagcagctgatgcgatctttcaaaaatgaacttcaaatcatgtttcatctttcttgtaaaatccttcaatgacttcccagcgttcttagaataaaacaaacatcatcaccatggtctacaagaccctgtggctgggcaccaactccttctgggaccatccctgcctgcctgtagggctcccgctcctttgggcgtcccggccgctgctccagcaggcctaggaactttctcgtgaagtcatctgcgctggctcctccctctgctggaacagtcttcgctcttgtttcagcctcctgtggacgctgtaaccaattgccatcaactgggtgccttcaaacaacagaaatggcttctctcatcattgtggaggcccagctctaaagtcaaggtcttgccaggggcctgttccctctgaaggctgtgggagagcatcctctttgcctcttccagctgcaggtggttaccaccaatcctccgggttccctggcttgtagctgcatcgctgcagcctctgccactgttgtcacgaggccatctccctctgcgtgtctgtgctttcactgtctttcctctgtgcatggctgtgtctcttctcccttcatatgaggacacaaatcatattgggttaagggcccatcttactctagtatgacctcacattaactacatctgcaatgatcctatttgcacataagatcatattctggcagggcatggtggcacacgctgcaatccctgcactttgggaggtcaaggtgggaggattgcttgaggccaggattcaagaccagcctgggcaacacactaagaccctgattctttaaaaaaaaaaaaaaaaaaaaaaaattctgaggttcctggagaaaatatgaatggtg

SEQ ID NO: 1886919 - DNA, 4001 bp, Homo sapiens
gttcccagctagcaatcacctccccatcctcacgagcaccgggcatggtcctgtgactacaacctgagcaatataagcagaagggctgggccgacttcatggcttgccaaaagaccctccccctccccctcctccttccctttctcttcccccttccccttccccttctcccccttccccttccactcctcttcccctccccctcccccttccccttccccttccctttctccttcccctcccccttcactttccctttctccttccccttcccttcccccttccgtcccccttccccttccccttcctcttcccctcccccttctctgaatcagggtctcactctgtcacccaggctgaggtacagtggtgagatcatacctgggaccacaggtgcacatggctaattcttgtattttttgtagcgacagggttttgccatgttggccaggctggtctcagactcctgggctcaagtgatccaccagcctcggcttcccaaagtgttgggattacaggtgtgagcctccatgcccagccccagctgaaagcttttcagtagtcttttaccttccctcctttctccttcctgctgcctggaatgcagatgcaatggctggagctcctgcggttgctatggaaccatccttgacttctccctttcagtcacacccctcatccaatctatcgggaaattctgttgagtccatgttcagatatccacagcttggaccacttctccccacttcctgtgtctccaccacgatccgggttatctctctccgggatcgtcatgttctcctcacttccgtcctggcctccccatggtctgttcccacccagcagccagagggtgagaccatgtcagcctctgctcaaacccaccctcagcccaggtcctcacaggcaccctgcaggatgcgccctgcctcccctcgggccctcccagcaccccctagctcactgcctggcaaccccactcctgctggtgggcctacaaaagctctgtagcatttgctgaggaacaaatgaaacctggaccccagggatggaggccgtggtgggggggcaccatggagagggggaggcactgtagaggtggggacaccgtggagatggggggggcgccgccccagcccggctgcctgcccaccacccattgagcaagcctctggtatttaagccactgtttgatttagggcccaatgaacgaagccagccaatagcaatctctcactgttaccctctccattttatagatggagaaaccgaggctcagagaggcaacgcagtgtgctcaaggccacaagacttctaggtgtgggcctgggctgcatgcagggtgaaggttatcatgacccccaagctcagggcaccccagggatgcagctctgacccctgccctgaggatgggacactccaaccctttctcttttttttttttttttttgagacggagtcgcactttgttacccaggctggaatgcaatggtgagatctcagctcactgcaacctccgccacctgggttcaagtgattctcctgcttcagcctccggagtagctgggattaccggcatctgccaccacacccagctaatgtttgtatttttagtagagatggggtttcgccatgttgaccaggctggtctccaactcctgacctcaggtgatccgcccgcctcagcctcccaaagtgctgggatgacagacgtgagccaccgcacccggccaaacaccccaactctttctgctgcattgagtccagcagggtgccctgagggactggccccggggacattttcagccactttagggaaaagaagacgtaatgctcacactaaccgccccacacccgactccaggctggcctggcgccataccctcggggtctccaagagaggcagggctggtccccacccaccacctcccctcaccttggtcttggtgtgtggagcccttggccaggtcccaggcagtcgtgggtaacaccgcagacgtgtgttacccagggcggggcccctgagagctggggtggttcagagcccgtccccactccgggagcaacgtcagggcggggcggggctggacggacaatgtgacctttgcaatgtccccgaacaagaactgcagatggtaatcacggccaccaggaggaaacttcctctgaatcttccactaccgtggtgtaactagggagggtgttggagcattcagcgagataaaaagcctgcttttgtctacactttttccgttttctaaaaattccagacacaaggggagagctgcccaaacacagaggtggagaggagcctgtccggacacagggacacaggcagctccggcagtgaccacttgggcctcagagaaactcacaggtggccactactcctgtttggagctggaggcagatcatctggggcgcctcggggtagggaggagctggtggacagcacgccccacttcttccccagcccctccagggggagctgccattccgcagctggtccacccagccccaggaagggggaggctccccaggacagtagcccaaagagcagagggtctccccgagaaggtgcaccccaggcagggcttatccacataccactaggctgggggccctgctccggggggttggggtggctggaaccttagatggtcccatcctgttggggggcttcctgggccgctttgctgctcccaactgtggaaggttctctcttgccttccctttcctgctgttagaagcaccccagcccctccaggcagcccccagggcccgagtgatgaatcactgacttcttgccaggctccggtcgtgatgcggggtggcagagggatgtgggcaacgcagctgggagtcccggggcacagccgggctctctccaggctccccatccagcagctgcgcacccccccaaacacacgccgggctccccgcacccggaagctgcccacaaccggcaggacaggtcggtgggccccggggaggaatgcaggaatgctgcgtgcccaggcgaggggccctgcgcccgcccaaggggctctccagctgcgcaggggccggggcggatggagccggggtaattaaagctggtgacagctgaggagggatagagacaggaacacaggtggggtcccaggcccctccgcttgctccccaggcagagggctggagcggcccccaggagagtgccaccttcgtggggcaggaagagaaggttgcaggggcactgggtgtcagtggacattgaggtctaggagaggccagctctcagctgcaaagggcaggcagagtcaccatgtgccgggcctggccgggccctcccagttcccatccagacacccagacacccagacacccagacactggtctcgtccaggccatcacgtggtcaggaatggtgtctgcctttgataggtgaggacccgggtgctgtaggatctgctgctctaaatgaaggcaggcggtgctgccccagcgggaggacagcagctccaggcctgacaaggctctaggcctcagcttccttatctctcccgagcccaggttgacatccctttcccaccttccacagccagaggactagacaagtgtcttcaccggagcctcgtttcctcatctgaaatatagcgctaaccacccctccctcccgtggctgtggcaataaattaaatgaagcccacagaggacctagcacacagtacgtgcttaatcaatacagaacccctcccccagcactgcccgcccttcccctggaagcagccacgcttacctccaccacctcctctccatggtcatcaaacactcgtgacaggccggcctccccctgctgagaccctgagaggtccaggcctctgctcctcgtctctgccacgcctggtgtcatgagggtgaaacaggcccttgggggacgttcggactggcttcctgtgatggccgccagcattagtagcgttgttactgctgcctggacacacacagacgcctcacagagc

SEQ ID NO: 1886920 - DNA, 4001 bp, Homo sapiens
gggaagtagtttgttcaggttggtaaatggccagatatggatgtgaccagggccaactacataatttgcaaagccgagtgcaaaaggaaaatgaagaggaagccaatttccccttctcacagccgctgctctaacccagggcaaatgggtgacgcccagggtattgcgacctccccacttgaacgcaccaactagctggatgggggtgggtgagagtgtccagggctgcctgccactcctcaacttctgatccttgttttgcctgggcaaaggtgacagcggaatgagggactctggcagagggttacagcagtggtggggctggtctgggtgtggagaccatatgtatgagctgaggctccaactcccaaccctggcacatgctccattgtcccatcggacaccacttacaaaacaagttcagggctaaaattatgacacatttcaagtcaacaatcacagaatgttgaaccccaagcccagggcctttctgaatgcaaggccctgggcagctgcactgatcacagacttatgaagtcagccctgtttgtgccaccctgccagatgcctccaaggagatgagacgctcctgcccaactcagccccttcccaggacaggaataatgtcccctcccctagtgagcggggatctgcagtcttctctttgcctttcaattctgggccctggaggtggctcagggctgtggctccttctcaggcagcccctgtagcagctgggccccagcccacctgccagtacctgacctgatatcgatacctgatagagataccagaacctgacctgaaacgaggccttcctgcctcactgctaactcacccaacacacagcccgagaactttccctgccctgtccactacgtttgaaagcattttattctgtggtcaatgtgtcagctctgtgaacggccagagtctcatagaggtcacaaagcatgccctttgcactcaggcagatttgggtctgaattcctctgccacttagtagctttgacaccttgggcaagttacataacctctctgatctgaaaatgaggttaacaatcctacctcaccagattgtaagaagtcaatgagaaagtacacagaaggtacaacttcctagcagttgtgagcaccagtaattgctggctgctattattatttattatagctatagacacttgcttccttctgaaaggacctttggtctagttgctctgctcttcactaccccactggcagagtggcggaggccacagggcactgctggccacagcatcacctgtgtcccagccttccccagccccctgtcccatcctccttgaggaccatgttgggaacaggactcccagactcacctgctggcttctccccgatgtcctgttccggttcagccatgagtcacctctagtccgtcagatgtgcagcccctctcgcatttatgcacaagctcccaaccaaataaaaagcactttctacagcctcagcacatctgtctgcaaggtaacaacagtgtgttcttgccagcccagtgagatagagcagggtcatttttattttatagatagggaaaaggaggctgcagcgtgtggcatgatttgcacagggtgaggccagtgaaggaaggtactgaagtaaggctccagactctcttctcaggctgtccccactggaagacggtgcaggccggtagtactcacccgagggaatggtgcccttcggaggggaggccagagaggcacagcaggcacccagccagacccgagaagggggccaggccctctttcttggaaaaggttggtagcttctacaccaggggtaagaaaaaccaaacactttgtttctcggtttgaatggactcctcctccccatttcactgtctttactcccagccccttcctcagcagctgtgcatgacaagaaagaagcagaaagacccctccatacctgggaaaatgaccttggtgatgatcctggatcccctgattctagacatcaaaatggaggaggcagaggctggagcaggaggttcagtgaagaatgggtggggagggtcaaagtccccagtgaggctgctgcctcaaaggcaggctgaagacaggaggaggtgcacagataggaacccagatgttcgggtaacgctcacatttcatttaaccctccaatgacaaaagacgggcaaacagacggggcatcagggtgggcctcagcatcaaaaaactggagggagctggctgggtgcggtggctcacgcctgtaatcctagcactttgggaggctgaggcgggtggattgccggagctcaggagttcgagaccagcctgggcaactcgatgaaacccccatctctactaaaatacaaaaaattagctgggtgtggtgtcgtgcgcctataatcccagctactcaggaggctgagacaggagaatcgcttgaacctggcaggcagatgttgcagtgagccgagatcacaccattgcactccagtcttggtgacagagcaagactccatctcaaaaaataaataaataaataaataaataaacactaaaaaaaaaccataaaccaaacaacaacaacaaaaaaccaaaaaaaaaaaaaaaaagctggagggagctatggagatcgcagccccccggctctcaaacatggtgtgcattgaagtcacctgggaagctttaaaaaccgtggatgcccaggtcccaccctataaagtctgatttagttggtctggatgcaatcagagccccagaacttttgaaaggttcccagctgatttcaatgtgcagccaagactgtgaaccactgatttggccaaactgcttaaaggagcaaacagggaaaacgaggccttagtaagtgaaatgtttaccactagtcacgtggccagccaggcacaggcctggcactggacctgggtcacctggctgccaggccgatgctgtcttcccagcatgctggtgtgtctttctgcaagaacaggggaagggcagggtggggcaatggagaggcggaagtagcagggatcccctggcctggactcctgagaaaatgcactttggccagcctggctgccagggtgtggtccgccataaaaaaggcatcctgaacctcctcccctgagtgggtgtggctacaggtgcaggggaactgtagatgaaaaggcttggcacttgagggaaagcctcagttcattctcattttgctcacctgttcggtccattcattcactcactccccgttcactgattcactcattcactcacacgttcactcaacaacactcatttttttcttatttaggggaacacacgttcttcttttaattcattttattttttgagaaggagtttcgctcttgcccaggctggagtgcaatggtgggatctcagctcactgcaacctccatctcccaggttcaagcgattctcctgcctcagcctccctataaatagctgggattacagctgtgtgccaccatgcccagctaattttttttttttttttttttttttagtagagacggggttttgctatgttggccaggctggtcttgaactcctgaccacaggtgatccacctgcctcggcctcccaaagtgctgggattacaggcgtgagccaccgcgtccggccttttagttaattttaatgtttaaaattaaagtattacatgttctagttaaaaaaaatctactggtactaaaaatcagagccgattaggaaggaagaaggcaaagtgtgttggggggacaatcaactgccacacaggccttggcatatgacttgttccattcattatgctgggcacttagtgggcccttttatccatgtattagttttgcttgtgtgtgagcctgtgagaggtagcttttaattctgatatagtttcaaacttacagaaagttgtgcctggagtagtggcttatgctaaggtgggaggatggcttgagcccaggagtgcgagaccagcctggccaacatggtgaaactccatctcta

SEQ ID NO: 1886921 - DNA, 4001 bp, Homo sapiens
gaggcttaccactgttcctgcgtggctaagtgtccgggttcgtcctaatcgagctgaacactagtcactgggttccatggttctcttccatgacccacggcttctaatagagctataacactcaccgcatggcccaacgttccattccttggaatcggtgacgccaagaacctcaggtcggagaacaaaaggcttgccgccatctcgggagctgcctgccccatcatgggagcggctcgccaccatcttgggagctttaaggacaaagactcacctgtaacaatggctcttgtaatcagtgaagggagaggctaacttggccttaaaccccacggctgggtcctcaccacgtccaaacaggctggatctgctcgctccctgccaggaggagggaggccaatgagaaatgtatcattgtggctcatagtgcaccagagaatggagactatatcagaaaagaccccgcatgatttccaagctgatcttttaatctgggggaggatcacgggctgtggggatgctgggatacaggtccataggttcaccctctacaaagaatcacacatctttccttgggccacacaaagcagttgctcttctgttacaggaaaagggtcctgatccagtccccaagagagggttcttggatctcccgcaagaattcaaggtgagtccaaagtgcaaagtgaaagcaaggttattaagaaagtaaaggaataaaagaatggctactctgtagacagagcagccccaagggctgctggttgcctatttttatggttatttcttgaagatatgctaaacaaggggtggattattcatgcctctcctttctagaccatatagggtaacttcctgacattgcagtggcatttgtaaactgtcatggtgctggtgggagtgtagcagtgaggatgaccagaggtcactctcgtgaccattttagttttggtgggttttggccagctcctttactgcaacctgttttatcagcaaggtctttatgacccatatttttgtgctgacctcctatctcatcctgtgacttagaatgccttaactgcctggataggcagtccagtaagtttcagcctcattttacccagctcctatttaagatggagttgttctggttcacatgcctctgacacttccagctcttccacccacacacatcttccctgtcttggggcagagggcagtagcctcgtaccctgaggattcttgaaggtctggggtccgagcagctccatcagaagccccatcggggacctctgaggggtcagtgacagtccctggggacagacggtggctccccaggacgctttccctattaagccactggcagagtccagacactttcactgggttgagagctagaaggtcagagagcgggagagaatccagaggtaggttcagggttactgttttgctcagccctggatggccaggcccagcctcccgcattctactggaaggaggaggaagatgggtttagttcttcccagggcaggagagagaagcacaattgtgggctgggttcctcctgcctctgaacacagcgccatcccttctcccaggtgctgggctggggtgtgtggaagatgaaggaaaagtgaattaactaaatagggttcctgcagtgtctggaaagcctctaaacccccgagcacctcaggcttccctgccctgattcagaggtgaggttacctaaaagccaaggaagcctgggcttcggggaccctcactcacaggcccccttccaaaaaagccctgcacctaagcttgtactgggacttctgtattatttttcccaaagggcgctccccacgttgtatacacttccggcccccaaatctggatccaccctgggaagggacaaactgggggcagcctacccacattcggccagcggggggtccgaccggccttggtatctccaagcgaggtaacagtagtcgccccttgcgtccctccccctccggggcgcatcgccccttgcgtgcaaagccccggcaccgccacgagtctcgcctcgccctgcacaggtaaacagccgctggccgccggccggccgccctgcagggcagcccggggacctgcccccggcgccacgcccggcgccccggggaggcccagcccgcaggccccgccgactgggcgccgcgccctgggaacgtgcaccggggcaggcagcccggcctcacctggccccagcgcggagccggatcacacctgcctgctgggtgagccgagggcattcgcggaagggaagagacaagacctgggaagggacgcctgtggcttagaaagaccctcaggcagggccgggcgtggggcgcgctgataaaaattcctggagctgtattattcacatcgcagatttgtccctttgcctcaatctaaaaggaatgggaaagaacagccgctgggctctcatttgcttccagcttacacagattcaactatcaattatcccagaggagaggcgtgcagtgcagggcgttgggccacgaaactgaaagctgctggcgaggcgcgtgggggaggtcgatttctgcgtcctgctgcctccacgcacagtgagaacccaccccgccactgcgttcctgtcctcacaggtaaagtcaggataataatatctacctcacgggggattcgaggaagtggtgggagcgtaaagccccgtctggtagagtgaatacctgagcaatggccttccggtcccgtcttcagcacagcaggacgaaaatgtcttctgttgggatcccagagaagatccagacgctgacacctgcccctacctctctacttctcatcataccggtcacctggaagaagggtccattcaaagcaaagcctgtagccaatgagttgtttctgccatcaaacagtcaagcatatgaggcccaataggcagtcctgttttttttgtgacagagtctcactctgtcgccaggctggagtacagtggcgtgatctcggctcactgcaacctccacctcccgggttaaagtgattctcctgcctcagcctcccgagtagctgggattacagatgcacgccaccacgccggctaatttttgtatttttagtagagacggggtttcaccatgttggccaggatggtctcgatccactgacatcgtgatccgcccgcctcggcctcccaacgtgctgggattacagatgcgccggccaggcagtcctgttaagccatgccacacagcttaaaaaaagacactggcaagctcaagtcccgaagttaccagctgaaggaagagacttaaaccaaaccaagggcttcctatgacagttctgaaataccctcttccctcttgagtccatacaactgagaaaatagaacggccagtcaccgtggctcgtgcctgtaattctggcactttggtaggcagaggcaggcagatcacctgaggtcaggagtttgagaccagcctggccaacatggtgaaagcccgtctctacaaaaatacaaaaattagccgggcatggtggcgcatgcctgtagtcccagctactcgggaggctgaggcatgagaattgcttgacccgggaggcggaggttgcagtgagctgagatcgtgccactgcactccagcctgggtgacagagcgagcctctgtctcaaaaagaaaaaacaacaacaaaaagggaaaaccaaaggtaaaatttgatccacaggactggccacatttctacactggtaaaatcatggccttgctgaagcattgatcaggaagggataagacccagagaatccaaatggagacaaatgagaggatttggaaaacctgaagttctctgaatcacccagtcctcaaagagcctccttcgtcagcggaaaccctcttctccagtcttctgacacacttcgtaacgacactgccatttctttgcatcctttgcagtctcactgcaagagcaagccagttctcatgcattaccctcgactgtctccagaatggacagttagatcccag

SEQ ID NO: 1886922 - DNA, 4001 bp, Homo sapiens
tctcctgacttcccatgcgatgccctttccactgtcccattcgggctcaattgtcctggcagaatgtgggttgagaaagacatagaccaaactggctctgggactggagggtaggcaggtgcaggggtggaggtcccacattctcattctcatgctcatcagctggatgggccagagaaaaaggtttatttagcttgggactggtggaccattctctctcccgcagtttcctctcattgtccttgctcacagaagtggtatctccctcagcaaaacccctcagtggcctcacatctcaggagaggccccacgcgtattctgttctccaacaactgctggccatcgtcaaccagatctatttctcacattggcttagcctgcctttctctaactttgctcctcatccctttcttctgactccattttgtcccctgggttacaagcttggatccatcttctgattcagactctagatcctcaagaatctgcctctccttgctagcacctgagaactgccttgactgaagttggctgattgcttcttaactcaccactcagcatcattatacccagattttacccagaaggatgcatttccaggaaactcatcccagtttcatacttgggaccagtagctccctctttccctgtgatatgtttaccttctcctctgtgggatgcactctatgtgtcaactgcatcaacactattatggttgccgatagtattaagctaatggctttcaaggacagaagtttgtactagtggtaaaaaaaacaataatagtgtaactaattcattgaacactttatacacatattaccttgtgaggtaagtactattatcatctccatgttgcaggtggggaaactgaggcacagaaagacaacttgtccaaggacacagagcccagaaacatggaaccagacttggaaccttcatataaaggtgcagtcacctttgctggcttcctactgtatgtcaggccttcctcttggtgcttcatacaagtggtgggaaattcttgggagatatttgcccatatgttttccttggtatttcccgtgtttctccccattaggcagctaggccttctgtaaagcttcagggaagggaaaaccagtgaaacaaagataacagaggagtcatatttttagcttttgagtctcaaatggcaggttctggtcataaactaaagatttggaagattaaatgaaaagctgggaaactttttctccagaccagacaagacttttcaaatttgagaaggagatccagggaagccaagaaacctgacgtgatggttgagttcccaggaaggagtcctagcgtgtagcacctgcctgcagcctggctaaccggcagggcaatggtggaacatccaggcagggctgaaggtggaaagctacatggatctgacatccatgtagatgtcatgtaggttttgatgagagcatcttgctttgactgagattacatctccacgatgaagccaaatagggattcaaaatagaaactaagtcgagttataaaaatataaaaagaaagttgcttttcttacacagctgagttttggggcacatatgtacccacacattcattatctctattctgcacaatgacctgtggagttattttttatcatccccatattatagcatttgattacagagtggaaaaattacttgcccaggggacacagctaataagtagaagaaaaagtacattaggagaaaagtggaaaataaacaatgaaggaaaaagaaaaataaaagaagtagtgagaaataggtagagatcgcaaggcataacctccgagtcacaattctcccggaaagaacatttctctttattctccaaaaaagtgaacattttatcaggatatacttacattttatttggaggaatagtcatttccttgatcccttttcccgaagatctagcttgggaccagacgttgtgaaaatgtagccagcctccacgaaggagttatttcaactgtgtcgtcgctgcaaaaaaattacatgtgaatcagagttctatcatggaaattatgctttgggacaaatatgttatgaatgacggctcataaaatcatgccagtatgtatgctatcaccgcattcaattattttaacctgctgtgaacttgcttgtgataaatcatgggaaaactaaagagaactatcttaagccactgcactgtttcactcgctcaagtcattcacggctctaaaaatacaatttatatcattggattcctgaaattctttcagtgcttacattctgatttaagtggcattaaagctagggcgattaagctgagaagtccaaggctaccgagcaatgtccccccggggtattagctgtctatcagatcgagaacactgtttatcagactcccaggaagaaagcaattagaacgtggcctgtgggttggaaaaaggcttgagattctcagcctgaaaaaggaaggatctttcaataacagcaagtgtgacacttttggtgggactcatctagagtagggtgatcataaaatttaataaccatcttagaacattttgggacttgatggggagaccattaacattgacatcaggaataaagtaggactgttttttcaaacacacaacacacagctgttttttcaaacacaaacagagaaggatttaataagggactaataagaaaaatgaagttgaatctccttcatgtttaaggaccacttcttaaatcccttctccatggaccatctggagaaaaaagtgggttctttacctgcattttctccacagtcctgacattattcttcatataccttggggaacacagagctgctggtactgctcatacaagctactgcacggtatttgtgcacaagcaaaaagcggactgggttaggtttgaatgcgtcgcttttataaacacagagttaggagatgtgagacatgaagttatggagttacagcgtgattgtgagaaaacgcctccctgggaaagaaccaaggcactgtgaatcaagtattgtggacagtaacttctccaggctcaatttcctccaccagtaaaattaggtagctagactagacccgtgatttctaatccaggcagcatattagggtcacctggagaatgtaccaatgtcctcgcccactccaagagattttatttaattaggctgggatgaggctcccccagggactctgacgtgcagcctgggctgagaactgctggaagactggaatgtttctgaggtctctaccgacttttattgggcagcctctgtgatggtctgagcttttgggaaaattaaaaaggaaggggcaagagtgatccattaccattggcattggctggttacagttggaattgttcagatgcaatgtttactaggatgctttgtggagttttctaccctctgtctcatggctggggacaaaccaccagtaaattacattccctcctaggaatacagagaatatggcctgggtatggaaagaagcctagtaagtcttgagcaagtttctatgtagctgatgtcctcaacatgataatgtaattaaaaatatataaagctcttcctggggtgccagtttcatgccctgcattgaccagggccagatttcaaagtggacgtgagtctttctaggtcaaacgtttattccaccattgaggcacttctcacataatgctttgggatactgcctgtgacacaagtgacttggaaaacaattatggatgtaaaaaatgtgatgagaaaaccctcctcatcaaccatactccagggatttctggatttgattaccagctttccaatgcttgacgatttgactggtatttaatgctttctcatttttcctgatagggaccactaagcacgttatgttctttctcccagttggcaactcaacaaaggccagccataaaaatctccacttgtgtaataaactgttgtacgatctactgcttatgaacaaggtccctgactgaaaatgtgca

SEQ ID NO: 1886923 - DNA, 4001 bp, Homo sapiens
aaaaatgtaaccataaaaaagtctcaacagaccctttttcaagacaatgactgtctctgaggaccatttaaaatccagggagaactatttacaagttaatttctgttcctcgatccaatcattctccctctgcccttcgacagaattcctcttctcctccttcccataacctgtttttaacaggatccaagccacccattctttctgcaacctcaagatggtggatgagcttccatacctcactgggaagttggatcttcattcttaagcctcccatgtatacatgttaaatacatttgtaatctttttctcatattaattaatctgccttatgtcagtgacttttcagcgaacttgtaggtagtcactcacataaggatcctccagtttacatagttttgtaaatgtcaggtcaccctgtcccactagaccaccaaggtcctggaggacacctgggatttaacttttttttttttttttttttttgagacagtctcgctctgtcactgaggctggagtgcagtgtcaggatctccactcactgcaacctccacctcccgggtttaagtgattctcctgcttcagcctcccgagtagctgagactacaggtgcccctcatcatacccggctaatttttatatttttagtagagatggggttttgctatattggccaggctggtcttaaactcctgacctcaggtgatccaccctcctcagcctcccaaagtgctgggattacaggcgtgagccaccatgcccagcctggcttttaacttttaattcctcagagagccaggcatggtgctttgctcaggaaatgttggttgaattaaaccggagcacttcttgaaaagggaaaataacaaagagttagaaggagatggcgggaacccctctctggagatagttctttaaattagtggattctgcagggcactgttgctcatacctgtaatcccagcattttgggaggccaaggcaggaggaccacctgatgccgggagtttgagaccagtctgggcaatgtagagagacccccatctccacaaaaaataaaaagttagctgggtttggtggtgtgcgcctgtaggcccagctacccagagactgatgcaaaacgatcccttaagcccaggagactgaggctgcagtgagctgtgatggtgccaccgcactccagcctgggtaacagagtgagaccccgtctcaaataaacagataaatgagtggattctcagcaaaacttctagccactcgcctcatatatccacaagacctttgagaatccacggtgtctcgatgcagtcagctttctaacaagctggggcctcacctgttttcccacggataaaaacgtgctggaggaagcagaaaggggctggcaggtggaaagatgaggaccagctcatcgtctcatgactatgaggttgctctgatccagagggtccccctgcctggtggcccaccgccaggaagactcccactgtccctggatgcccagagtgggatgtcaactccatcacttatcaactccttatccataggggtattcttcctgaggcgtctcagaaaacagggccctccccatatgctgaccacataatagaacccctcccaactcagagaccctggctgctagctgccctggcatgacccagacagtggcctttgtatatgtttttagactcaccttgactcacctctgaccatagaaactctcatcccagaggtcactgcaatagttactccacaacagaggcttatctgggtagagggaggctccctacctatggcccagcagccctgacagtgcagatcacatataccccacgccccagcactgcctgccacgcatgggcttactttacacccacccacagtcaccaacacattacctgctctccaaggttaggcgtggcaggagaagtttgcttggaccagcagaaaccatgcagtcaaggacaactggagtcagcatgggctgggtgcgagcccttggtggggtggggaggagactccaggtcatacctcctggaggatgttttaatcatttccagcatggaatgctgtcaacttttgccacagattcattagctctgagtttcttttttctgtccccagctaccccttacatgtcaatatggacttaatgatgggaaattcaggcaagtttttaaacattttattccccctggctcttatcctcaaaaaatgcatgaatttggaggcagtggctcatgcctgtaatcccaatgctttgctaggttgaggcgggaggatcacttgaagccaggaatttgagaccagcctgggccgcatagtgagaccccgtttctacaaaaataaataaataaataataaataatagtgatatgaagcatgattaaatagccctattttttaaaatgcatgagttcgttacctgattcattccctggttcctttcacagtcctccgtgacccaagtgttagggttttggtctctctactatttgtaggctgatatatagtatacacacacacacacacacacatatacacacacacagtgtatcttgagctttcttttgtatatctacacacatatgtataagaaagctcaagatatagaagccctttttcaaaaataactgaaagtttcaaactctttaagtctccagttaccattttgctggtattcttatttggaaccatacattcatcatattgttgcacagtaagactatacattcattattttgcttaaacgtatgagttaaaacacttggccaggcatggtggttcacacctgtaatcccagagctttgggaagccaagactggcagatctcttgagctcaggaattcaagaccagcctgggcaacatggaaaaaccccatctctacaaaagatagaaaaattagccaggcatggtggcgtgtgcctgtggtcccagctactcaggaggctgaggtgggaggatcacattagcccaggaggttgaggctgcagtgagccgtgattatgccactgcactccagcctgggagacagagtgagaccctgtttcaaaaaaaagagagagaaaatttaaaaaagaaaacaacaccaagggctgtaactttaaggtcattaaatgaattaatcactgcattcaaaaacgattactttctggccctaagagacatgaggccaataccaggaagggggttgatctcccaaaccagaggcagaccctagactctaatacagttaaggaaagaccagcaagatgatagtccccaatacaatagaagttactatattttatttgttgtttttcttttgttttgttttgttttgttttgttttgttttagagactggggtcttgctcgattgcccaggctgtagtgcagcggtgggacaatagctcactgcagactccaactcctgggctcaagcaatcctcctgcctcagcctcctgaatagctgggactacaagggtacaccatcacacacaccaaaacaattttttaaatttttgtgtagaaacgagggtcttgctttgttgcccaggctggtctccaactcctggcttcaagggatcctcccacctcagcctcccaaattgctgggattacaggtgtgagccaccacaaccagccagaactttactaattttaaaattaagaacttaaaacttgaatagctagagcaccaagatttttctttgtccccaaataagtgcagttgcaggcatagaaaatctgacatctttgcaagaatcatcgtggatgtagactctgtcctgtgtctctggcctggtttcggggaccaggagggcagacccttgcactgccaagaagcatgccaaagttaatcattggccctgctgagtacatggccgatcaggctgtttttgtgtgcctgtttttctattttacgtaaatcaccctgaacatgtttgcatcaacctactggtgatgcacctttgatcaatacattttagacaaacgtggtttttgagtccaaagatca

SEQ ID NO: 1886924 - DNA, 4001 bp, Homo sapiens
gttttttccagaaaagatctttgattaaaacacacacacacacacacacgcacacacacacacacacacacactcattttggggtaagagatttttcctaaataagtatagccatcttgtttctatcatttataattcaatcaggtgcaaagagaggactatataaccatttctccctttaaatgagaaactgggatacaagtggtttgaggtggggaagaaatgatacattttaaaaactcaaatgacaagttcttcctggctggagagtgagacaagagaaaccacaaaaccccagactgtgcaatctgtaaagacagtgataaagtgactacttcatagatgaagatggacaacttgaacttccccttgagtttcacaagggagtcctgtgtgtgagaaggaaggaacatatttgagtgtaatgtgcagttgcatttagatctaaggaaacttaaaatgaatttaagtttccttaattcaaaatgaatttttgagcagttctccacggtaactttaataagtctccatttcaactttctgttctcaatcccatctacagctcaaacatatgcagtatctgccagccctgtccatgaattcctgaagtcccagccaagtgcctctcagctcaaaaagccccttgcttgccaggggtcagccatgtctggaaggctctgaaagaggtctgctgggcagtaggactgcttctgtggatgagaggcctcttgttggactggagagaccaggagctgtaagaaacccagaaataaaaagtctcagatggggacaactgcaaagtaccaggagttcctccctcctctccaccatatcccacagttggacatctccccgaaaaccccaccccaagtaaaatttatttgccgtctcaccctcaaataagaatgagtcaatcattaagtaatgcaattatacaagcatagttgtaaacaactatattgcaagtatgctgacatgcaaagatgtgttttacctttaattaccagaagaaaatagacaacttgagtttgagcacctaacttgaagaagaaattaggaaataatagtccctccccaccacatccatcattcccaacccgttctgcctaaaaatcgtttacattgtggattttatttgtaatttttaaagtcttattttaaattaggtcccaaagaaagaagctggcatttcttattcttttcagagtggtctaagaaaaaaaataggaaagcaaactctttctttttttcttttcttttttttttggaatcaatacccgagataacagcagaagcaaaaatccaccggtgcgtcagcaagcagggcactcggccattcatctccatccttccttctgagctgttctccagcaggctccggccgcagctccaggccactagagcagatagataatgtaggacagaatgaccaggcctatgatggcaaagaacatcaggatgaaaatatccagcattgtggattcctaggccgaccaagcccctggattctggtgaaccgtgagctgtgagcacggaggttgcagtcggtggagagaaatggctccccttcactccacagctcagccctggttctttcccctccccctcccaggggcctgagactgaaggatgctgcagctccaccagcagcttcctgcccccccaccaaccacagccaaccaatcacaaagcctgggggtggatagccaaggagatgccagatttagacccacagaaccgcagaatcaaaggggctcaatttctccccaggaacccaatcccacccctttgtatctaaatggagcctgcatgctctggatgtaggaggagataggatcctacccagctcccccaagagtgaatcctcctgactgccttcttcgcgtttcctctcacacacctcgggcagattatctcagaaaaatcatggttgggtattgggtgggccattggcaacttctaaaggtcacattatggggagacacagacaaaagtttcgtgtggatctcagtgggcttccctgagggatgaagctaacatttatacatttcctacactgggccagatatcgtacatgtggtgcaatttcaacctccctatgagtctttcatagatggggctcagagatggtcagaaacttaccctaatggttcatagcttagatgtgtcagagaccagccgggcgcagtggctcatgcctataatcccagcactttgggaggccgaggcaggtggatcacaaggtcaggagttcaagaccagcctggccaagatggtgaaaccctgtctctactaaaaatacaaaagttagccaggcttggtggtgcatgcctgtaatcccagctacttgggaggctgaggcagagaattgcttgaacccgggaggcagagctgagatcgcgccactgcaccccagcctgggctacagagcaagattctgtctcaaaaaaaaaataaaaataaaaattagccgggcgtggtggcaggtgcctgttatcccagctattcaagaggctgaggctaaagaattgcttgaacccggcaggcagaggtcgcagtgagctgagaccgtgccattgcactccagcctgggtgacagagcgagactccgtctcaaaaataaataaattaataaataaaataaaaagtaaaaggctgggtgtggtggctcatgcctgtaatcccaacactttgggaggctgaggtaggtgaatcacctgaggtcaggagttcaagaccagcctgaccaacatggagaaactccagctctactaaaaatacaaaattagctgggcatggtggcacatgcctgtaatcccagctactcaggaggctgaggcaggagaatcgcttgaacctgggaggtggaggttgcagtgagctgagattgtgccattgcactccagcctgggcaacaagagtgaaactccgtctcaaaataattaattaattaattaaaaatgtcagagaccaggattcaaaactaggcatgctgacaccaaagtccatattcttcctcttgcgccacactgctccccctgttggtccggaaggcccctacaccccacgtgcactgctcagcttgcagtggactgctttcacatcgatccacctacaggacgagcaccagagacccctcctccacccactccttcgtctctttgcagtcattacccactgttttgttttccttctttctttttttatagagacggggtcttgccattttgcccaggctggtctcaaactcctggactcaagcgatcctcccacctcagcctcccaaagtgctgggattgcaggtgtgaaccaccgcacccggcctagttttgttttctttggtatcctcttccaaaagctcagcatagtgttgtacacagagaggacactgaagaattccccaggggtatccctgaaatttaaaaaattcaagtggtttcttctgagggggaaaagagaattattttattctttttatttatttatttatttatttatttatttatttatttatttattcttagacggagtcttgctctgtcacccaggctggagtgcagtggcacgatctcagctcagtgcaagctctgcctcccgggttcacgccattctcctgcctcagcctcccgagtagctgggactacaggcacccgccaccgcgcccagcttattttttgtatttttagtatagacggggtttcactgtgttagccaggatttttgtgcctttttataagcctcaattattttctattaaattaaatcattccctaggacgtctctgaggcctagtctccttggcccccaccccaaataatattttttttaaaggcctggggttaagatatattggtaaccccctcataatgcaagacctcaggaacttaggccactgccagaaggaaatccagaaactcctcccattggcccatttccaggaggcagagctttctgtgagcagggagtggagacttggcagcaatgtcccccaaagcactgtt

SEQ ID NO: 1886925 - DNA, 4001 bp, Homo sapiens
gagtggtggggttggttatcagtttgcctggcggtttcaacctttcctctcccggagtcagtctaagcacagaactggggtgggggcagagggtggggaagggccgcaggtaaggtgctgtgtcaacctgggcagttccaaaccctgcatgggaccaggggcaccgagggccccagctcccagggtagggggtcgtgccactatgcactgccttttcttcttccggtgctgctttactttctcttgctcctggagcagtgctcactggagacgctgggaccctgagcactgaccaagagtgatccctgacagcgtcagattcctatgcagaagggactgctgggtgggaaatggatcaccgacaggttctaaatgcgaacccacaggctgcaggagaggggtgaggggcgaaggagggaatcccacctctgggaaagcatcctcaggaaacctagataggtcctggaggtgaggacaatcgccaaggagggagaaggaaaaggaggaccctggttaatctgcacgccaagggtggagtcgctcagtcattcattcaacaaacatctattcagtgcctactcagtgacaggcatcgcgctgcccccaaacagggcagacacaaaagaacaaggggaggaggaagctatggatacagaagcggtatgctttcagttccagactcaagacgtaagccctctccccacattggccaagaaacgacttccattagcaagttgcgccggaaaggggaggtggcgggtggtctcactggactgaattcctgccacctcccacctattcagaaagcccgtccacaccctggccaaacgcgtaccagcgtcagcctgacgggtggcccagtcctcgccggaaagctgcttgccaaacgcccccgctcaccccctagccccaacggtgagaggggctcggctgagtcgcgttctccaaccgctgcgccccagcagcgtccccggtcgccagtgggcggacgccaggagctcacggaggcggcaccgctcccgaagtaacggagcccggagggcgcccaggcgttaaggcaagtgcaaggggccgagcgggtgcgccgaggacgcgggggcgtctcccccagctgaggttcggtccctccaggcagccaaggcttggcagcgctagaggctgaaggacaacggccgagaacgcccaggatggggtggtcgctgaccaccgtgtcccaggtgaatcagctccgcttggaggcagggggatgactaaaatgacctccaagaagatgtcaattacaagaacaaaaatttcaacccggaatctcgagaccttcgaaaaacgacgcggaggaaaaaaggaaagaaagaaaagaaagtaaatcagatcccttccccgaaccgcagggaaacttacctccagcttggcgacccagctgttaagcagaacaaatcaatccacggatggagaagaggtcgtgggtcttctgagcccagctgatacacaccaagtaatccacgttaaggggtccgcagccccccacccaattccccactttccatccaaggccaaagagcagccagaccctgtcctctgcgctccagactcgcggaggtcgcgggcgggggtcctcaggcggccgccttctcgtccccaggggtgggcgcgcgacgcgggcagggaccgggcgcccggaggaccaagcgagcgcatcccgcctactcgtgctgggacatcacccagcctggacgccgctcctcgcctttcttccccgcgcatcgccagcgccaaccaaagatccccgccgggaaagcctctctgccaagctggaaagcgctgaaggcggatcgtctctcagacttgggtttgcaggttcacaaggcccgggaggcttacggtgggcgcctgcctaacagagggtccttgcggagaagcgcagaacgacaaatgccagaggcggtgaccgcgtcctctggataccagcgccgcaccgcgcacccgcgccgcctgcgcgccctgcagtcggctgggccattcggcccttatataccaggcggacccgcgccgggacggggcggagcggggtgggcggggagggggtggggaaggccgaacggcttcctgggagtcgtagttcgactacgtagtcctgtcgtagtcagaacaaaagctaaacaaggatggaaatggttagggtttgcccaccacagctgtcctcccttgcgcccttccttcacagacaaagctggcattccagtcctattgtcaatgccgctaggtctattctggcctttgtgcataaggtgggtcacaccagccccgaatgccgcccaggatgacaaaccttggtggccctagagtcaggttatcccagctgggccccacttctggagaccagaggtccgaaatcaaggggttagcggggttgcttgcttctaggggcagtgagggagaatctgtcccgggcctctctgagacctggtggtcattggctatcttaggcgttccttatcttaggcgttccttggcttgcaactgccttaccttcatcctccaccttttacacggtcttctccgtgtatcttttcacatagttttccctctgcgtgaatctctgtctcttcacactgtggtgtttctacaaggatgccagtcatattggataaggggcccaccctgatccagtacgacctcatcattaaccaatgacatctgcaacgaccctatttccaaataaggttacattcttggaggtcctgaagattaggactgcaatatattaatattttggagttgtagggggaaaagttcaacccctaacaggtcttctatgccttgttgcacctattaacagccattgtgactaaccaacccttttgataaaagcaagccctgagaagcaagatgaaatcacaaaatcactgaggctgtgacaggaggggaagccaagaacattggaatctcctgggccaggttttcctgtggccacggtgggattgctggagaggaaatggtcagaaaaagaaggcatcaggttgggcgtggtggctcatgcctgtaatcccaccactgaggtcaggagttcgagaccagcctggccaacatggcaaaaccccatctctactgaaaatacaaaaaaaattaggtgggcgtggtggtgcatgcctgtagtcccaactactcaggaggctgaggcatgagaatcgcttggacccgggaggcggaggttgcagtgagccgagattgcgtcactgcactccagcctgagcaacagagtgagactctgtctcaaaaaaaaaaaaagaaggcattagtattgaaagtaacaggaggcacctgggtaaatggggttggggaggggagaagatagacagggcattcctagatgcccctgaagcacagacttgattttccacctgccactgtgcccaagtttccccccattcaagtcccaggctatggacaagctcaggtctggccctggaatcctggctctcacctggcgctgacattcccggagagtcagtggcagtgcagggtctggattggccaccatttccactctgaactcacaatcaactcctctcttgcttccaggtaagagaaaaactgaggccaagatgaatgtcaaaggcagggatatccgaactccctaaaccctcccctacaggatattgaggataacgcagctttgctgctaggagccgcctgaccttctccccactttccagaacacgggctgcatattcctagcatacgaaagggcatccagtcgtctcaaaatggtatcagtgcctcttgctgactatgcatggttattgttttctcctgcgttataattcattctagtcctcagtcttcttaaatttctgcacaccaaacattagtcacttgaataattagaaaaatatagaaattaattttaactcatcatttatttcttctcattgctgtgagattgattttccccaggtaaagctggaatcatgtctcttccttgctcctaaaacatccagaga

SEQ ID NO: 1886926 - DNA, 4001 bp, Homo sapiens
tgatgctttctgcacacctgggatcacatgttctttccacaatcactgactccagatagtaacagcaacagataaactccaaagcaacaaagatcccctacaaaggtttccactgactcctcccaatataaggacactgaatggggggtgggggggaatataagtatcctccaatccaggttttccattaagaaccactcagttaatgattcctggcaattttccctagggaaaggaaaactgtcatgaaggtaatacattatctaaattgcagccaacatacacattcaagctaaattctcaaataccaaattcactgcaagttttcatccagcaagtttagccagtggactgggatgtgacacacaagcattcaactgcaaaattagtccaaataaatctcaaagtctagtgtgggcaaatataattacagtttattagtacatgtgcacgcacacacaaatcctctacggaaaattatctttctcaccactcacccaaatataaacgtggacaatttatcaggggtaaatggtgaaggtaggataacgccgtgattccaattccttctcaaaccaaatacaagttctcctaaaacgggggtggcatgtccctgtaagaataccaaaaatggcactgtaagcaaaacgtacctgtaatgttaaagatttcatgcacctggaatcataaacactttgtaagtgtagtcttctatctagcaacccctctggacactcttttccatttcgaaaaaggaagggggagggtggggagagtaacagaaagtttgttcgaaaatttgtatgaggacatacttagaattgtaccctctccgcccccccaccaaaaaaaaaagtgtgtttttaaagcaggtctggagctagaagtgagacacaagttctgcggcctataaggaacaacccccaaacatgccaccctacaatcagacacttccaaaacacagtgtacaatgagcccaagccgtcggatcagacaggcacaccggaagtcaacctgtctcccctcctcagagagacgtgagtttaaggtgtgtgaccctggcagcggtggccggcggcggggagtaaaggtttttcacgcgggcataagtgggtgtgtgcaaggtaacaacccgggaacacagacgcacaccctcccgttaagcgctccatctttaaggagtgtttactgcgcgcagtcagcaaccgaattcaataatcctcgccacgggagctcttcatccccttcacgatctcacctgggcggtagcccaggggctgttccccgagccccgggaggcagcgtcgggctccttgaccaagactttccgacctgaaatccgcctgcgatgcgaactggtgtaccctcccctccacaaaacaccacccccccgccccgagtcatcctcggctttttaaacaatgtccaaaccggaacaagtggttttccaattgctctctctgaactaggccttcccacacctccgacccccaactcaccactgatcgcgaccctggcccttcccaaggccacaagcacccctgccagctcgcccacctcgcggctgcccagcccggcccgccgcgcccccttcacctgtcaggcgcacttcgacaggcccgttcctacggcctccgaggttagacatgtccctggcggctggggcggcgggcgggacgggggcgacggcgaggcgcggcggagtcaccacagcggccggggctggggcccgagcagccggcgacgcgactgcagcggcctgagggtcccggatgtgccaagcgtcgtcgccatgagccgcggagggagcggacgccacggcctttccctcctctaggcgaggcctagtagcggacagggctggtcagctgaggtgggcggtgctcggcggcacgggagcaggactgtggacttggccgcttcctcctccacccgcccccttgtctgagtgacgccggacctgaggccgccgcggccatttgtcggctccgggggggcgagggggagatgggaggcggggccggtggggtcagcggggcggggccggcgggcgcgcgccagatgcccggagcgggcaccggcactgagggaaggtgtgagctgccgccgagggtcccaggcggaacgcgggaagggagcaggcaaggagcaaagtggcggcgggagcggcagctgtgacccctggaggggtttagtgtccggtccactcaagggagagttttagaccaagcagggccgactgcatttattagacgcccacagcatgcagggcgctccaagaggctggggcgaggaaaattagaaccaagtctgctacccgccgggaacttgtcgtatttctggcgagggaagagacagcattcccacgccgatggttccagcaaagccccaggagtgctgttcctggtcttgtagttgacgcctccatccgggactcacctggtggagaaaatcgggttacctgcagagtcccgctcttttcaggtgcagccaaggatagggagatgatacgtcttaaagaattaacaagataaaccttggagtaacgtatgaagagttgttcatacactactgtatttatctcaggagcagaaagataacaactttctaaagatgtaccatatcctttgaccttgtaactatactgctaaaatttttttttttaagacagggtctccctgtcacccagactcactgcagtcccaacttcccaggctcagatgatcctcccacctgagcctctgcagtagctgagatcacagtatgcaccactacaccccactaattcttttatttttggtaaagacacgtttaggagggacatttaggtttctctatgttgcccaggttggtcacgaactcctgacctcaaatgatctgcctgccttggcctcccgaagtgctgggattacagacctgagccaccgcactcagccctattgtgtccagaattggtgggctcttggtctcactgacttcaagaatgaagccacagaccctggtggtgagtgttacagcttttaaggtggcgtgtcaggagttcgttccttcttgaccttaagatgtgttcggagttttttcctttaggtgggttcttggtctcactagctcgggagtgaaactgcaggccttggtggtgagtgttatagctcttaaggcgacgtgtccggcgctgttcatccttcccggtgagcttgttgtcttactgcctttaggatagaaactggagacttacgtggtgagtgttacagctcataaaaacagtgtggacccaaacagcaaaaaactgaaacttcacactgtgtaaagagacgcgaacgagttaccactgcaggctctggcagcctgcttttattctcttatctggccccaccctcatcctgctgattggtagagccaagtggtctgtttggacagggcgctgattggtgtgtttacaatccctgagctagatacaaaggttctccacgtcaccatcagattagttagatacagagtatggacacaaaggttccccaaggccccaccagagcagctagatacagagtgtcgattggtgcattcacaaatcctgagctagatacagagtgttgattggtgcattcacaaatcctgagctaaacacagggtgctgattggtgtgtttacaaaccttgagctagatacagagtgctgattggtgtatttacaatccctgagctagacataaaggttctccaaggccccaccagagtagctagatagagtgtccactggtgcactcacaaaccctgagctagacataaaggttttccaagaccccaccagactcagaagcccagctggcttcatccagtggatcccccaccggggctgcaggtggagctgcctgccagtcctgtgccatgtgctcgcactcctcagcccttgggtggtcgatgggcctgggcgccgtgagcagggggcagggcttgtcggggaggctcgggctgcacaggaacccacagaggcgggggaaggct

SEQ ID NO: 1886927 - DNA, 4001 bp, Homo sapiens
atccccagtgtcttgcacagtgcctgacacattccaacataccagcacacaaatcagggaccctttttgctctgaagtttcctgatgcaaagtgtgagttgacccccatcactaccaatttgagagacaccaaggtacttcacatttggactttgggtcagttaactcatcccagattatgtgttttgtatgcttgacatctggtgtaagaaccacatcaattgtacagcctttccctgccttatctcttttcgatccttgcagcaataagggccagaaatattctcttcatcttacagatgagaatcctgaggctcagagtgtgcaacctggccaaaaacacccagctaacaagtgctgaagatcagagtgggactgacttctcatctgtttctacatcatttcctaggtatgggcttaccttactctactgagacctcttcattttgcttctcttttctctgagttctgagagtcaggtgtaatcccccacaaaagacacaattattatttccttctttcaactcagcaacgacctttgctcttacttctggtaagggagtaagaaacgggagtgcctggatacacctgcgtgcaggttgggcccacctggggaggagggtatggctgcccaatggaccgtggctctgacttcagtcccctggagacagctgtccatctctaattcagggttgtaaggaccagaccactctatctctgggactctgtcttgatgtgaaaaaatcttacaactctctgcctctttggttgcacgcgatagactgagctgtgacatgcaactcagcggatgaaatccatgaagccaaactgtcttgacttctgggccttggagactggctgggcacatgtgttggctgcgtgtgagtgtgagtgagggtggggtgggaatactgcagagagaggaggtgtgtgcactgagtgggcatggaggcgagtagtccctaccccgcttcttgtatcccatctgggcaggtgcagggaggaagtgaacgagaggggccgttctgggtggttctgctctgtttgcttttaccgtggcccagttcacaccccttcatgtatgcaagggcacaagagtcattggggaactttccgtcctctcctgtgctaaagacttttctccccagcagagattcttcccaacagagaatgcagatggggtctttttgtccccaagttccgaggtaaagggataacttcccattgtgcccagaagccaggatcattcgtggtatatcaggggtggaaggggctgttgagactctctttccagcctctgcgaggaaaagggcccggaggagaaaacacctgccccacgtcctcttggctggccaccccagcaggacctgaggccagggccacaggatccccagtcagggtgcagtgtctggctatttgcttatgcagcctcaggaggcctggtcttgcccctgcttgtccaagcctctctggccaccctgccaggtaggtcttgtgtgcactcacctggtcccggcgtggcttgctaggtggaagctgcaacgtgttgctgcccaagagccccaggttcacagacatgtctgcatacagcacctgcgtctcttctcctcttcccatggccaaattacaggtccagtttttcaggagacacctcaatgttgagggaataccagatgatccagagcagtaggctgagagccaggatcagggcacctgtgtagatgaagaagtcccaggaactcaggggggccaagatccccagcagcaaaaggaccaggccgaccgcgtccagcaggagggcgaggatgaggaagagcgcacagcgccctggatggcatcttccccacagactccccaggagcattgcccaggaggagcgggaggagcccagctgcactcccgggggtgatttgcatgggagggtggcggtcctgcctgctgctgccttctctgcctgctgggtgtgagcaaatgagcgagctggcgcttcttggagccacagggaagtacacgtgggtctacctttatgagcacggcagccagtggggcaggatatttcttaactgtttcatggctcaggaatgatctggacccaaacagtctgacatcactgttaattgggctgctcatcgctgggacctacaatccatgtggcagaggagtcagggtgcccttggatgcatctgccaagttggcggtcctgtgattctgggggaggggctgatctgtgccttgttctctaatccctggaagccagagagcctgagtgccctgtttctgagacacagctgcttcatctagtatagcggggtggagtggtggagtttccattcctcttcacctccctgccctactctcttccttgggggaaaaggttttatgtaaaggacatagacaagagtttgtaagatcaatcgattttgaagcgttgctgtaagaattggtccatgttagcaagagaagttttgccttcttgtagagccctcactctgcagacggaaggatctgagttccctaggataatggacagtaaggataagggcgggaaaggggtagagatggaaaagacagaggggacagagagaagacaacagggtgagaagaaacttctggcctcttcctgcagtggattctgtgtggaccaaagggcaattcccaggcaaaagtcaagggatgtttccggggcctgttgcctctgtgttttctacatgaactcattttatgttcattttctttctcataatagatgaccctgtaagcccttccagacactgcctgcatcccttctacattgatgggagcgatcttatccccgtggctgctcacggcgggtgtgggggtgaacatcaaatgaggaaaatgcagcggcagtccttggcagggctgcagacagccacccctctgtccctgattcacagggaggctagaacagggcaccaaacctttctgggcctcagtttacccagataaatgaagaaaataatttccactctcacttttgccttccccagagggtgagaataagtaggtggatctgatttccttttttttttgagacagagtttcattcttgttgccccggctggagtgcaatggtgcgatcttggctcactgcaacttctgcctcccaagttcaagcaattttcccacctcagcctctggaatagctgggattacaggtgcccatgaccatgcctggctaatttttgtatttgtattagagatggggtttcaaactctacttggccaggctggtctcgaactctgacctcaggtgatccgcccgcctccgcctcccaaagtgctgggattacaggcatgagccactatgcccggccttcatttttctatgtgtaaaataagccaggatgagaaagaaactttcagaaaatattttggggaaggtggcaggggatgacctaaaccatagctcttaggatctgaaacgccacgagacttgagccaagccaggtgaacactctggacacctcaaagtgggaagtagctgaggccaatctccatctcagtacttgcctcctgtcccactaggtcctcggaaggggccaggtacctacagaaacacctcacattgctggggaagccatgactctttcaattttttgttccccctgtaggagagagtctcttgggaaaaactattgatggacagcaatggcctcttcccagtgccaggacaagcactgctgctgtgtctgcacagggctgggctaatgagtcctggtctagccatatacaggttcccaggtccctttgcagagtcctgtgtgtgtggctctagtccaccatggacaacaatttagcactaaaatttctgcatgctggaaaatcctttgtttctgggtcaactggcatggttggtcaatgtagtcccatctaactgggccacatcatactctcagttccgcggtctgcgttctctctcataatacctggccattctggcaaatcgctaaccatggccccactccaggtgactggcc

SEQ ID NO: 1886928 - DNA, 4001 bp, Homo sapiens
cttgtcacccaggctggagtgcaacggcgcgatcttggctcactgcaacctccacctcccaggttcaggcgattcccctacctcagcctcccgagtagctgggattacaggtgcgcgccaccacgcccggctgatttttgtatttttagtagagatggggtttcaccatgttggtcaggctggtctcgaactcctgaccacaggtgatccacctgccttggcctcccaaagtgctgggattacaggtgtgagccactgtgcccggctgggagcaagactggagcaagactccatctcaaaaaaaaaataaaataaataagtgaattaattaattaaaggccaggcatggtggttcacacttgtcaacattttgggaggctgaggtgggaggattgcttgagtccaggagttccagaccagccagggcaacatagtgagaccctgtctgtattacaataataaaatcaaataaagtttttaattttttttttgagacagagtctcactctgtcactcaggtcagagtgcagtggcactatcttggctcactgcaacctccacctcactgattcaagtgattctcatgcctcagtctccccaggtagctggaattccaggcaagcgccaccatgcctagctactttttgtacttttagtagagaccaggtttcgccatgttggccaggctggtcttgaactcctgacctcaactgatccacccaccttggcctcccaaagtgctggattacaggtgtgagccaccatgcccggccaaaataacatttttaaaaactaaattaaatttatataacactgaccgggcatcatggctcatgcctgcaatcccagcactttgggaggctgaggtgggtggatcacctgaggtcgggagtttgagaccagcctcaccaacatggagaaaccgtgtctctactaaaaatacaaaattatctgggcgtggtggcgcatgcctgtaataccagctactcgggaggctgaggcaggagaatcacttgaacccgggaggcagaggttgtggtgagccaagattgcaccattgcactccagcctgggcaacaagagcaaaactccatctcaaaaaaaaaaaaaaaaatttggttcctcagtcacactccaaggctcaatatagcatacaggctgggggttaccctattggacagaacatctttaaacctcccaggcctagtacccttgccttcccctagactattacaagagggaaattgagtcagctgatagtggtccccccaacacagacacagtctatctgagagaacgccaaatgaccttgctttcctcctacccccagcaaacagcattcaccaaatagtaggcagcttcctagggatctctctccattctccattcccttcctgctccagagaggaccctgaagaacccagcctatcccatgcacctgttctttctgctgcagctcctgctgctgctgggccatcagccatctccttcggtccaaagccatctgccggcgccgggcctcccagtggtaggcactacccatgatagtgggatggtatgaggccccaggtgggggtggggacaggcagagcccactgctcccaccacctctgtctcttcccactcagacccctctgcctataactggaaccacctcacaatgtggttactgccagggcaactgggcaggccccgcctgctttgttgagagagggaggcatttttcccaaggctcccagggaacatctgcaaagtacctttctctcctgggtcctgatcagatagaagaccttcccaccttagctttgagtctcaatgggccccatggacaattcagcagtaaagtcttttctctctggcttctttcccccattcttcctcagagggttccagcatcatcatctgacccttcctctgctcatctctccccacttaggtctccggaattacctttttctccttaatctctcctctctccatctcccccataaatgtctgtgctgagtcagaatgaaagaaaatacaaaatcctactaagcctcactgaggtctgagcccccagaacgcaaaggggcttcttagaaaacaccctagctctggagatttctaattctggactcaagcctagcgtctacctcttaattttattttcattttattttttattttttgagatggagtttcactcttgttgcccaggctggagtgcaatggcgcaatctcggctcactgcaacctccgcctcccaggttcaagagattctcctacctcagcctcccaagtagctaggattacaggcatgcaccaccatgcccggataatttttgtatttttagtagagacagggtttctccacgttggtcaggctgatctcaaactccagacctcaggtgatccgcccgcctcagcctcccaaagtgctgggattacaggtgtgagccaccacgcccagcctgggactgtgcatttaagatcaccccaagtggctgggcacagtggcctctgcctcctgggttcaagcaaacaaaaagaaagagcctaggcaacctagtgaaaccctgttcgggctgcggcctatctgtaccccagctattccagaggctgaggcaggagggtggatggatgctgggaggtggatgctgcagtgagcagtgattgcaccactgcactccagcctgggtgacagagccagaccccgtcccaaataaataaaaataaaggaaccagtttgtagaaagcaggagagggtcccattgaacttcaagccttcaagctacagctgtggctggacaggttggaccagcaggctggagcagtcgccatcttggcagggatcattgaccctgatctatcatcgggaggaagaagagctgatcttatgcagggagggcaggtggactatgtgtggactctggtgatctgtttgggtgccaggtgttactcccagggccacccataactgtgaatgtgcaggaaccctgacttaggttcctggggaatgagagtttggttcccggtacccagggaaaccaccagcatcggcagaggtgatagctggggaggagcggggatttggacgagagacacaggatgagtaccgggggcagccctgtgatcaacaactgctgcaagaggggccgtttgttcgactcactagtcttctgtggctctatgcggtactaaagagcagaagacagaagatacaaaaaccacaaaaattagccgggcgtggtgctgcgcgtcaataatcccagctactcgggaggctgagatgggagaatcgcttgaatccgggaggtggaagtttcagcgagctgagatcacgccattgcagtccaacctgagcgtccgagcgagactatctcagaaagtaaagacagaattaaagtgcccagcgcagtggctcacgcctgtaatcccagcgctttgggaggccgaggcgggcagatcacctgaagtcaggagttcgagaccagcctggccaacttggcgagacctccttaaaaatacaaaaattagctgggcgtggtggcaaacacctgtaatcccagctacccaaggaggctgaggcaggagaatcactggaacccgggaggcagaggctgcagtgagccgagatcgcgccactgcactccagcctgggtgacagagcaagactttgtctctgaaaaaaaaaaaaaaaaaaaagcatgggcgcggtggctcatgcctgtaatcccagcactttgggaggctgaggcgggcagatcatgaggtcaggagatcgagaccatcctggctaacacggtgaatccccgtctctactaaaagtacaaaaaaattagccagacgtagtggcaggtgcctgtcgtccccgctacttgggaggctgaggcagaagaatggcgcgaacccaggaggtggagcttgcagtgagccgagatgcgccactgcactccagcctcagcgacagagtgagactccgtctcaaaaaaaaaaaaaaaaaagcttgggccagtggc

SEQ ID NO: 1886929 - DNA, 4001 bp, Homo sapiens
gggtaccaagagctaaactccatctcaaaaacaaaaaacaaacaaacaaacagagtaagttgaagtccagcctgggcaacacaccactggaatccatccctttgaaaggtcatcacccctccacagccaagctgagatttaaagccctccaagtaaagtcgaacatgttccctacttggaaatgaatattcttgttttgggtcctaggatactctccataaatcatgaaccttatgatacttaaaggagtaagaaaacctaccaactatcctaaactacccggcgcagtcttttctttctaaccttgcaaacaggttgtatcccaggagagggagccccattcctggaggtactgcaataccaggtcgacgcgtggagtggacagagcaagctcctatttcatctccctgctccaaaaatctatctaatataattgttctctgatagaggacgtatcagatattaaactgataagaacagatactacacttgatcttagccaaaaggacgagaagagatgtcgtcgccttcctccctgccatcaccgtcccactctcatctacattcaagacgcggtgagagccccagcctcgctccttgcctcattcactttgtcttgtccacaccaatattgacgccattacacactcgggctgatttcttattctccacgttttaaaagaaaaatctgccgggcgcagtggctcacgccagtaatcctaacactttgggaggccgaggcgggtggatcacaaggtcaggagatcaagaccattctggcaaacacggagaaatcccgtctcgactcaggagctcgagaccagcctggggaacacggtgaaaccccatctctactaaaaatacaaaaaaattagccgggcgtgccgggcgcggtgactcacgcctgtaatcccagcactttaggaggccgaggcaggtggatcacgaggtcaggagatcgagaccattctggataacacggagaaaccccgtctctattaaaaatacaaaaattagccgggcgtggtggcacgtgcctgtagtcccagctacttgggaggctgatgcaggagaatctcttgaacctgggagtccgaggttgcagtgagccaagattgcgctactacactccagcctgggcgacagagtgagactccatctaaaaaaaaaacaaaaacaaaaaaacaaaaattagtcaggcgtggtgtcgcgcgcctgtaatcccagctactagggaggctgggcagtagaatcacttgaacccgggaggcggaggttgcagtgaaccgagatcgcgccactgcactccagcttgggcgacagagcgagactctgtctcaaaacaacaacaaaacaacaacaacaacacaaaaaccaagagaaatcttacaccagttctagttccggggtttccgggctttcatttcgaatttgcatgccctgccctttcccaggaggcgtggccaccgcggttgactccacccccgggcccgcctccagctaaggagccgcggctgggctaggggcgacttccttgtttgtatgagcgaaaagactgaaccaaaagagacagggggtgaaaacaagataggtctgtggaagagacctgtaggcggagagcggtccctgttttcctggagaaagacgagtcgcaagatatcatcaccaggggaaaccaggctgagctggatctttacgtcgtcaccagtgggcggggagaccagccttgtacccactggacagcgggcccattccgagtcagggaagcagaaggcctggaggagcttcggggagcaggggctggagttcctctgccaggcaggaggctgacaccagacaccgggcagagggaggcggcgcatggacggcgagggcccagcaaggattctccccagcccctgtgcctgcgtctcctgcggcttctgtgcgcggaccgtgtcctgtgctgtgtagggaaagctgcttctctgcttgggacgtggattcctttaccctcctcctcgcctgactacttctgacgcgggtcgtcaggactccgcttgggtgtcacccgtccaggaagcctcccttaattaagggccctcggcacccaccccatatgtgattagcagccctcctgtgtatttcatcgcacctcgttgtttatatcaactactccactcaccacccttctgggcagtcctttatctccccctctgaaatccgatcgctgagggctgggaccctcatcagtacttatccccgtttctctgcgctagtctaattagtgcctggcaagttgaaggcgctcagtaaacgtttgtggagcgaagaaacgacggatagggcgtaatgagcacgacacacgcaatcagagaggacgcagttaggaggctattggcccggggcaggcgtgaagggggaagatcgggctcggggtgggaggacaccagagggcggggtgactgtcggggtgctctggaggaagatgggcgtcaaggcccccagcaaggttgggataaattttctctctgaggcacagactgccgcctgtagcgtcagcatttaccattcccgtcctccttcctaacacaacagttgagatgagagtttatggctcttttatttgatttcagaaaagcaagaaggtatcatagatccgatagtgacactcagtcagtcatgctccccctgcaggatggaaagccggatggcagggattgcctggtgaacaaccaggtcaaaaaatataaactgtgcctttcccaatgccagcctcgggtccgagggctctacgtgcattatctcttttagttcactcgacagccctaagagatgggcgttattattagccacggccaggattagggtgaggtcattcctctaggttcgaatttcagggggtgatcctccagaacccttcagtaatcaaaataaataatagttcaatgcaatatatcttatctcgattataagataatcaagccatttatctggattgctgagtcttttggtgcccccttatttttttttttaacctctcagcaagtgtttccctcatttcactttaccccagtctccaccgagtcattgtcatctccattctattaccctgtgaagtgcaatatggcagccacccacctcggcctcccaaagtgctgagattataggcgtgagccactgcgcctggcctgtctgtctgtctgtctatctatctatctatctatctatctatctgttcttttttctgagacggagtctcgcactgtcgcccgggctggagtgcagtggcgctatctcagctcactgcaacctccgcctcccgtgtttaagcgactctcctgcgtcagcctcccaagtagctgggactacaggtgcgtgccaccacaccggactgattttttgtatttttagtagagacggggtttcaccgtgttagccaggatggtctccatctcctaacctcgtgatccgcgtgcctcggcctcccaaagtgctgggattacaggcatgatccaccgcgcctggccatatctatctatattttgagacaaggtttccctctgttgtccaggctggagtgcagtgttacaatcacggttcactcaccatacaccaagataaatgccaagtgggccaaagatttcaaagtgaaaaaaatggaactataaaagtatataagggccaaggccaggcgcggtggctcacgcctgtaatcccagcactttggaaggccgaggagggcagattacgacgtcaggagtcagagaccagcctggccaatgtagtgaaaccccatctctactaaaaataaaattagctgggtgtgatggcacgcactcgtagttccagctactcagggggctgaggcgggagaatcgcttgaactcggaggtggaggttgcagtgagccaagaccatgccactgccctccagcctgggtgacagagtgcgactctgtctcaaaaaaaaaaaaaagtatatgagggccaagcacggtggttcatgcctgtaattccagc

SEQ ID NO: 1886930 - DNA, 4001 bp, Homo sapiens
tggcagttcctggccaacaggttctcctcctccactgcagggctagaaaaaggtgaaaacaaaagggacatgtgcttctctgtggctctcggggtacagttcagtctccccaccatgagcaagtcctccacgactgaccgcctactcccaccagcacctcgtcatccctcttcagcccctcctcaccctctgcacagtagccccaggaagttcaagttccagctcctccagtgggccactttcagtcacacctccaggccttcactgatgcagttccccctacccagaactgcccacccccaacacacacaaacacacacacacacacacacaaacacacatgcacaccacctccattgaatatcacctccaccaaatatcacctccaccaaatatcaaatatcaaatccaacatcttcctggtgtgttgacccaacactttctccaaagaatgttccctgcctcccaagactgtgttagttgtttctgctgtgtggcccagagtccctgggcttccccctaatggaatgcagcatactgtatggaggtggctgttacctgttggtctctccgacaagactctatgggggcagactctgcctgggtcactgtagtagccccagctactagccccatgcctggcacagagtaggccctcagtgattacccattgaatgaaggggtcaatgacaggcagagtctccacttggggctcccaatgagcagagaacttggggaagctaaccttcctccccacacacaccccacctttgaatctcaagcttgactcttatgggtttggtgttgattcacttccctgaggtttccctccatcttgacaaatgctccttctgacaaccccaacatgactgagtcatggtgagggcaagagatgaaaggaatcatgtttgagagtttggcctgagttcgggtgaggatggcatgtctctgaggctgagggtgctggtagcagcaaagacagactgagggattcccgggtgggaagaaagctcaggaatatcaaagccatcggaggacacatgagtgtcacacccagcatgtgggtgcagagccgtccttagggactgtctgtccttgcagggttattcacccaggacccctctgcacccacactctgcttctgatactcatgtgttctccgacagctttgatcttcctggggagagatcaaggtaactcttggagaaaattgaggccacagcgcaatcttaaaaagtgttaaaaattgttagaggccagataggtcgtgctaagagcaggaggtagggagccagatcaacactggtgtgggtgacttgggcaaggaacttttcttctctgagcctcagtttcctcatctgtaaatggaagcaacaagagcaacctcacacagttgtgagaaatcaacaaaatgacatatggaagcttcctggcccatgcctatcctaggaagcttccctagccaccatggccagctcaggagaccccatctgaaagtacagcccatccctctcatcaccgatggcactcactcagcactggcctgtctgcctgtctgcctctggcaccagactgtgagcccatgggggcagagaccttgtctgttctgctcacaattccatctattcccaatccctgccacagaataggcacccagtgaagatctgttgaatgaatgaatgaatgaatgaatgaatgaatgacttgaagaggggatgaaaatagacaggaactccaatacgagattttcaaaaacaggcaggtgaggacccaccaggccttacctctcctcacgatcttttaacttcttgtcgtactatttctcctgggttttattttgttgttgttgcatcatttcttgaactttctttctggtttcacaagaattccctcagacaatcccagtggatctcagtctagtaagaggaacagagaaaggaactgattttattcctgtttgggcctgagatggggagtgcttcagagcctgaagccaagaggctgcagcagcagcagcagcctccacaaccaagcaggacactccaaggggcggggactcgagatcaaagctctagagatttgggtagatatttgcggactgttagaatgatatgaataataatagagaccctcctctgtcatcctcctccctgcaccgtttgctcattcacccattccttcctttgacaagcacagacccagggccttctagggggaatctgagatcccaggaaagaatctacctgtgccaggtcactcgtcttattctcagctcttcatacagtcattgcttcccacgtaagccttttttctttcctttttttttcttttctttttctttttttttttttaatttagagacagtctcattctgttgccctggctggagtacagtggtatgatcatggttcacagcagcctcaaacttctgggctcaagtgatcctcccacctcagcctcccaagtaacccagtaattaggacaacaggtgcatgccaccatgcctgtccaatatttttttctttttttggtagatgcggggtcttgctctgttgcccaggctgatctcaaatttctggcttcaagtgatcctcctacctcagcctctcaaagtgctgggaatacagacatgagccgccacacccagcccacataaggtatttttgacaagcctctgcttatgggatttgctagcctctgtattcttttggggctcaataattgctcaaggccatagagaacaggaaacagagcaccagctttggagccaggccaaactggaattatatctttgcttgatcatttacaagctatgtgaccttggacaagttacttaacctctctaacttagaatttcctcatctataaaatgggcttcataatcccagtgtccttggatcagacttcctagattcagttcctgtctccactgcttaggagctgtgtgaccttttcagcaagtcatttaatctcgctaaaaatgtttcctcatgtgtaaaatgaaaacaaggacagcatcatgagattgctgtgaagattagatacagggtttattcccttatcttatataaaatgcttagcgaagtgcctggaacattattaagtgcgcaatcagtgttagtccttgctccttccttgtggacaattgttcttacacttagtcgcccagctcctttgtaaaggaattctccctctagtgtctgtgcctcctggctatagaagccagaaattagccttccagcctcccttgcagctggagcacagacacatgatcagtcacacacatcacagaagcctgtaagctgggagctaatgtcctaaaaaaggaggcacctggtggaatccatgctggaaggaataactgcagacctccagtttctagaagcagcagcgccacaagtttggtgatagcgccaagtggaatgggctactgaatctgcacctgcagatagtggcaagggtgggcttgctccgggctgtgctgccttcaaacctgttccctgcgagttcttcctggagagtctatggcttacctaacatcctttaacaaactggcttcagagtgtggcttctgatctttgcaggcaaaaaccctgatggctacagaatttagtaacaagtgtgattactggcatgagacttctaaaagatctccgtttgggtgtccaaaagacaatgtaaatttagcatgtctgaaactgactccccatctttcataccagccaacttccatcccacaactcctatcatccagttgctcagacaaaagactcagagacctccttgacttctttcttttacaatatgcagtccttcaagaactcctggcagtgctttcttcagatgatgctcagaatccagccacctctgaccgtcttcactctgagtgccaggggctcttcacctccctgcacactgggctctctgtttctgctcctagcctcgcagcctctcatcaagtggcctgtcactcctctgctcaaggcactgtgtgttaggat

SEQ ID NO: 1886931 - DNA, 4001 bp, Homo sapiens
aatcacagcttattagaacagaaacctccaagggaatcagttttgagtaggaaaacctgagctgtaattgatgaatttctggaggtcagtgtaaacaagtccaaggattaaaaactccagggagatccagtcctggagtaggtggttgaggggaggagagacacacttttgaattttgcctccaggagttgcaccaagttctcacagtaaatattggcaaaaaaattttaaaaattaaaaatccccttatgcttctggcagaggaaggggaaaggaggcattttgacatacactagagagcattcttgtcttcttaataagatatctcatcaggagaaactagttaactagttaactcatatactgggagaaaatttttgccaaagacctatctgataaagaactattattcaattatatacaaagaactcttaaatctcaacaataagaaaacaaacaatccaattgaaaaaataagccaaagacttaacagcctccttaccaaagaagatatacagatggcaaataagcatatgaaaaaatactccatatcatatgtcatcagagaaatgcaaatttaagcaataatttgataccactatatacttattagaatgatcaaaatccagaatactgacattaaatgctggggaaactgtggagcaacaggatctctgatttattgctggtgccaatacaaaatggtacagccactttggaagacagatcggtggtttcttataaaactaaacatactctgaccatataatcctgcaattgagccccttggtatttacccaaaggggatgaaaacttacgtcacacaagaatctgtactcaaatgtttatagtagctttattgataatttctaaaaattcaaagcaaccaagatgtccttcagtaggtgaatggataaaaatatctgtggtacatctagacaataaaatattattaagcactagaaagaaatgggctttcaaatcatactaaaaggtggaggaaacttaaatgcatattagtaagtaaaagaaactaatctgaaaattctacgtactgcgtgactccagctatataagattttggaaaacagaagaaagatcagtgttttccaggagttaggggaagggaagtatgaataggcaaagcacagggtagttttaaggcagtgaaacaactctacatgatactgtaataatggatagatgtcattataaatttgtccaaacccatagaatgtataacaccaagtgtgaatcctaatgtaaagtatggactttgactgatagtgatatgtcagtgtaggttcatcagttatagcagatgtacccctctggtagggatgtttgataacacgagatgctatgtatgtttgagggcagcagatatacaggaaatctgtgtacctcccacttaattttgctacaaacctaaaatggttctaaaaactaaagaccatccaaaaaaacaaaaacaaaaaacgaatcattcatgatggcttctgtactcaaaggaaaacagcaaaagtgtaaaatgttagtgttatagatgaatgttaaatgcataggttgtcagagagactttcaagtgtcatttcttctctatgagctcagtttcctcatgttttgagtgtagaagttggttcaaaatgatctttaattgcgacatagctcaacctgaagcaattaattacgaaaatgaatactcagaaacaaacgttattaatatttattccaaagacaatactacagccactatacttcagacagaagcatctagaccaaagccgatagcactaatttaatacgatagaaaaggaaatcttctttggtattattgcaaaaaatttaagtttttacttacctactcacaggcttaaagtttcttgcttcagcactttctttaagtttctcttgttatctctggctcagaaaagtactttttctgctccggttaatctctgttatccccttttatcagaatcttggtctgatatccagtccagttggtctcttaggacacttagatatctgtgaaattctaaagctgatattatgctgacataatgttcaacaaacattctctccttcagccaaaccacattatcaccaaatatttggggagaaacacacatgagatagacgcattcaaggaaacaacatcaaagcatccattacttaatctttgtcttgccctggagattcacaccctttttcccaacacaggcagcctctgagcttcaagttgacttatgacttgacaatgtggattttacagagtccaagactcaagaagaatcacagatgatgtcttccacatcttgataccccttaacaaacacataatgcacattgccattttacactcctgtgaaactcttatccatcttttttgtgcctcacacaagtttcatcagcaactcatctggaagtcttgcctgcatatcatagctgttaatcatatgccaactctttgctcttaacatacttttattttacacctgcaatattataatgtaattacatttatgcaggtttgtgcctcctcacagactggaagaatctcgatgataggacctatggctgagtctttgtctaaatccttcatagaacctattagaatgtctggcaaataggaggtccagataaaatatttttagagctattaaatgcattaaaatgtgaattaagcaacagatccctctacttagaagaaccttcaaaggctaagaggtaatttgcctttaatccctccagcaatgctgcattatccacccagcattagcattgagcacctctatgtattactagttcttttagtggtgtagaaaaccacaaaaatttattgaaaaatagaaaaaagaatcagaaaaatgcagatgcacattatgtcccaggggatgtgaagaatgctcattattacacatgtcaactctcaggttatttcgtaagtgtcattcacttctgatccaagtttaagtaacagtaatccaaaattaagtaaccaaatttaagtatgggaaattgacaacatgactgcaaaattcaaataaaagaataaatctattaggatgtctaagaaaaacatggggaattagagtcatgcaagtgagttgaattattgggtgctaaagtattataaagtcataacaaataagtcaatgatgaagaagccagattataccggcagatacctctaagactaggtttccctgaagcaaattctaaaaagtggaataggaaaatatttgataaagatcacagtgcccactaatgagaaaggaatgtatattcaataacaattattgcagtagttgcctagctattaattattattattggttttttttttgagacaagagtctccctttgttgcccaggccagagtgcagtggtgtgatcttgactcactgcaacctccacctcccagattgttcaagcaattctagcgcctcagcctctggagaagctgggattacaagcacatgcgaccatgcccggctaattttttgtatttttatagagacagagtttcgccatgttgcccaagccggtcttgaacacttgagctcaggcaatccaactgccttggcttcccaaagtgctaggattacaggcatgagctaccatgtccatccagtaattgactagctatttagaaaataaaccagtttagacactgtctctatactatacaccaaaataacatccaaagaaatttttcaaattaaaccataataaagttcaaataaaatagaggtaaaagtgtatttgatcaccagataggtagtgaccatttaagcgatgacggaaatgtaccttcactaccattctcataggtagtatttattgaacattttctgtgtgctaggtaatgtgtaaagtgatttctttatatgctattctcattgggttctcaaagcaagaacgtgatgtagatactcttagtgactccattttagcaatgtggaagttgaggcacagggagttttagtaacttgcga

SEQ ID NO: 1886932 - DNA, 4001 bp, Homo sapiens
aggattgcttgaacttgagagtttgaggctacagtgagctatgatcatgccactgcactccagcctgggtgacagagcaagactctgaccccgacctacagccccccgccgaccaaaaagaatcccagtggcaaattcaaaggcaaattaattgcactggtgaaccaggactatggcatgtgaaaagagtttaaaaagccaggagaagcaaagtttgttgtatactggattttgaaaccgaataaacacagacgcacacacaatttttgaatgtaaaattaatacatgttgattgtagagaaaaaaaatcactcctaagcctaccactgagaaagcatatgtgttttggctgcccaagattgatttctgccttcatgtggaagtaagctttaaaggctctgtgttagggcatagtctagaaacatggggcccaagggcaccgggaaaacttacaaagggaagagatggaactgggagggttcaagctaccagttccatctctccatgttttagagaattggggcactaagtcagccaggtaaggtcaggtcagaggagggcccggatgaagcatgagatgcagagggacagtgcgtgaatggagaccttgggtagcaccaacgtgtagcggcagaggtggggtggatgtggctgatgtcagggagagaatggggagcatgcacagggctcagtcttatacatacattgaaaatcctttagcctttcaaagattattaacccaaatcacctttcttgcttactccagatgcctcagcctctgatataattgctaagtatctgccgtgttaaaaataaacatttgagaatcaagggtgatttttctcttttcttttgaattgtaattgcgatgtactcatggcctgccatgacgtgaggtctggcttagattagcccctggctgagagacccatgctaatttagtgcctgcaattatgcctgcctctaatcgtgttctgctctttgtaggatgtaccctttgcaatagaagcaacggttatgctgggtcatctatactttcttgccccaggccgcttgtgacacacattggtgagacaactggccaggattaggggtatgatctgtgaccctgaaacagagtgaaattgattggcaatgagggatgaggggggtgatcctattaaaattataagcaccgtaagtattctaatatctgacccctcactgtaatggatgtgcacctacctcccagccataaaaatgcttccaataaaagaatcaaaaacgaaaacatgcagaaaaacttttatgtatgagtgcatttgtctgaggtgtcatccagctgtagcttcagagtaggggtgcacatgtcaattgagaatgatcagcctttgctttctgtctgcagaggctggcaaaggggaaacaagctgcatagtttagtgctggcaaaataaaccactatgcagttataaacaagagtgggtgggtgagttgaaagatgggtggatgggtgagtgggttggtccccttcctgatgtataaaaacagaactcctaggtttggggttcatgttacaattggactccaggaaaacagactatacattcaaaatctaaaccagttttaaagtataaattaaaaagtattttccctctagcacatttagatattattgtttactaagagaaagaagaacaggctacatgccgtcttcgatagctccctcatgctcctagatccacaaatgataccagggaagccactgcttgcctctgtgcctttggggaggcggaggttgtagggggaagtctgaaagctcaccatcacggagctccaactccttcttcctgggatgcggcacttgcctgtgaagccacaggaggctggaggggtagaggctgggggcaggaagaggaggaagtgaggaagggggcgatgcccgggagggctctgggagagtaaccaattccttcactgggggcaggcgggagtctccagggtcactatggggcaacctgtgaagggaagggaggaaagggatttccggaagtctcccgctctccctcctgcctgcttccctccttcccctagcggttgattgcgaggagcagcggaaggaaggatgtatcaaaccgaaagaagaaagaacccctgccagtcgcccccatgacatccgactctgaacggcagcgatctagaggctgtggcgtgttgcagattaacagcagcgagggcaggaggcaaatcagatgccgcaggagctgactgttttctttagccctgagagctgactgtaggcacaggttgcatatcaaaggcaacgggaatcagtctgtggcaatattacatcaggtcctggactggtggtggtgttggttgcgggggtgggcggtggggtccaagtcctaaaagatgtcagtcaaacaccagctgagcttctagacctccttctgtggcccttcttctgatcaagtatgcaaataataatacagtcaggctctacctcctgcaattagcacaggggagggctgagtaactgggaggacttagccttctccctgtggttatcttgtaaggctttgaagtgtaacttttgttttgttttgcttgctttccccctgcatagaaatttcccttaagggaagggtgggtctaaactacctttaaaatgagtttccactccctgaacaaggcttgtaaaagcttgagagaaaatgccaggggaaagcatggaaactttctggggataaactatgggtctccacctttgcacttaatcaggggacagccactaaccccagtagctgcatgctttctgccaccttcatctacctgagcaaaacttcaaggacatgtttatgctgaatctccagagagagcaatagaagcccagcttgagggaaatgactggaccttgattacttaggataaaaagagatcaatttatggtaggactatctatttatgtctgcacattcatcaggtttgcctaggaaaggagtctcagaaaatgtgttggaattgggcacttctgatgtctatcctattccttgtcttggttgataacactttctccagtccccagatctcattttaggaaatgagacttgttatcaggcatcctagagcctccatatttttctgagtctttctgtgtctgccggcaccattgacgttgttactattgctggttttcctcttatattttctgtgaaaatgcttaggagcttttaagaactggtggccaccagagaggttaaacattataaacaatataaagcaaaggaatcttagtgtgctgtctttggggtgtgtcattgctgtacagcttctctttttttcctaaaaaaccctaatcatcttctgtggtgggaggggttggagttgaagggatggctagttgaggtgggggcaatttgtgctgtacctgtctctgacagtcttttaatttttcattcgtctatgcaaatttattgtaaaagaggtatggctttttcattctttcactcattgacttagccattcaacaaacatatatccagcatgtgccttgagtaggacaaggctgaacactgtttttaaaaggtatgtttctgtaaagatgcactcttccctgaccaccagaccctgccaaacctttgagagagtgtctctgagaaggaatgagcaagggaaaatatcccattagaagggaactcttgggtcctcacccctcctgagatagagatgaataagggcatcttctaaagcactgagaactgttaagctgtccttaagcgggtgagggatatgacttttgaaaataatagtaaaaacagtttatgtggggatagtttatgagagttcacagaaccctttcatgtgtgttactagaatgagtgttgggttgaagattaggcagacatgctcccaataatacttttgaagcgctggacacatgctgtgtttcaccaagaagttagcaattgttcatagttgtagtatctgtgacacaggtcccaaatgttcagattagctaa

SEQ ID NO: 1886933 - DNA, 4001 bp, Homo sapiens
atgtcactatatactgttctagacccatagaaagtacaccaccaagagtggatcctaaagtaaactatggactttgattgataatgatatgtcaatgtaggttcattgatgataacatatgtaccattctagtgcaggatgctgatattgggggaggctgcatctgtgaaggggcagcaaatctgtatatgagaactctttgtacttccctctcaattttgccatgaacctgaaactgctctaaaaaataaagtcttttttgggctgggcacagtggctcacacctgtaatcccagaactttgggaggccgaggcaggcggatcacctgaggtcggaagttcaagaccagcttgaccaacatggagaaaccccatctcgactaaaaatacaaaattagctgagtgtggtggtgcatacctgtaatcccagctactcggaaggctgaggcaggagaattgcttgaacccgggaggcagaggttgcggtgggctaagattgcgccactgcactccagcctgggtgacagagagagactccatctcaaaaaaagaaaagaaaagaaaacaacattaattctcacttttgaagggatagcaggaagatgcatattaatattacagcatctttgataaaaaccaatctatttggccgggcatggtggctcatgcctgttaccctagcactttgggaggctgaagaaggaagatcccttgagtccaggagtccgagaccagcctaggaatacagtaagaccttgtctctacaataaatacacaaaattagtgagcatagtggcaggcacctatagttgcagctactctagaggctgaagtgggaggatcccttgagtgctggaggtcaaggctgcagtgagccaaaaaaaagaccaatgaattcaagtgtctaccccctaacccaaacagaagcagaccctaaatctttcagggtgtcatcctaagctaagtagaaatctaaaagtttcctagagcacagataagagtgacctagcactccagccaaccagaaagggaaaagcagaacataagcttactttctacaaaggaagcagctatacaaattatgccagagaactagaaaaacactaatttgagtatccaaaaggggggaagtagttccaaatatttctaataaagagcattctgtaagccttccaacaagctattaaaggttgagaaaacctatctggcaacccagttaatttcaggacacataattacaggaacttagtccctcaagtcagagatgcctgtgaggaattgcacggtttgaatcacagcagatttgcagcctatttaagtttttggaccactagaaaactggaaaaacaattcatttaatatagttgagagaatacttaaaaatcctacatcaattcaattatatactgacttagaattatatgattacttcctatggagggttaattccctggcatttaggttgagcccctacatataccttcaattatcaaaaaaaaaatcaaaactttatttgaactcaaagttttacttatgagaataatgaaatcttacttagattaacactcaaaacatttcttggggataggctttttaaaatgaaacccataatttatttttgttacaaaaggaaatgtttacgtccctgttaaagtataaaaagggtctcattagtgtatctgaagagtactacattgtacattgtcttccagaggtggaaaaaaaaagaagttaacttttacatatacttgaaagggaaagtctgcattctgcactaagttttcttgaatggaataagtttaaattgtcctcagttctagcaaagaatgttcttaaatatctgtctttaaaaatccaatagtagggccgggtgaggtggctcacgtctgtaatcccagcattttgggaggcagatggatcatctgaggtcaggagttcgaaaacagcccggccaacatggtgaaaacagcatggccaacatggtgaaaccctgtctccgtaaaaatacaaaaattagctgggcgtggtggcgggtgcctgtaatcccagctacttgggaggctgaggtaggagaatcacttgaacctgggaggtggaggttgctgcgagccgagattgcaccattgcactccagcctgggcaacaagagcaaaactctgtttcaagagaaaaaaaaaatccaatagtaatttcagattcacttaaatatccccaaaatagtaagtggaaaaaaaagttttttacttgggaagccgaggcaggcggatcacaaggtcaggagttcaagaccagcctggccaacatggtgaaaccccgtctctactaaaaatagaaaaattagctgggcctggtggtgtgtgcctgtaatcccagctactcagaagcctgaggcacgagaattgcttgaatctgggagacggaagttgcagtgagctgagatcgtaccattgcactccagcctgggcaacagagtgagactccaaaaaaaaaaaaagaaaagaaaagaaaaagaaaaagttttttttacttgagggcagcatcattctgaattggatcaaagttactgaaatgtaattaatcttattgtataaacatgtctttcgtcattgtccctgtatagaaacaataaatggagaaagagggtcaatagtctctccctccacaaaattttaagttcagatcaaggcagagaagacataaaacaattatttgagtattcctaactctttctcactttaatctgaggtttgtatatatgtctgagtaagactgggaaactaaccccacccaaccctcaacacacacgttgaaaatgagatcttccaaaagagaatgaaagaactgaaagaactaactacatattatatacttactctgttcataaccaaaatgttttctttgttaatgtattcactcgaattcaatagagtgttaaatttgccagtaatttttatttctacgacaaaccatattaatacacgacaagacagtatgacttcaaaaaatgagccaagaacttaaataggtatttctccaaagaagatataccaataagcacatgaaaagatggtcaacatcattagtcactagggaaatgtaagtcaaaaccacaatgagataccaattcacatcctctaggatagccatcttttttaaaaaaaaattttttttgagagatggggtctctcatctctcatgcacgccagcatggagtgcagtgtcatgatcacagcgcactgcagcctcaaactcctgggcttaagggatcctcccactacaggctccggactagctgggactacaggagcatgccactgtatccaactggctttttaaaaaaaaaaaagaagaagaaaaagaagaagaagaaagaaaacaaaacaaaaaggctgagtgcaatgtctcacacctgtaattccagcactttgggaggattgcttgaggccagaagttcaagaccagcctgggcaacacagaaagaccctgtttttacaaaaaaaaaaaaaaaaatatatatatatatatatatatatgtatgtatatatatacatatatatatatttttttttttttttaaagaaagaaaaagagactgggtgtggtgcctgtaatcccagcactttgggaggctgagtggggaggatcacttgaagccaggagtttgagtattcagtaagctatgatcatgccactgtggtctaccagtctacgctgggcagcagagcaagatcccatctctctctctcaatctctgtgtgtgtgtgtatacatatatatatatatacacacacatacagtaatacatatatatagtaatttcagattaccatagattactatatatagatctatacagggatatatagatatatatagatctatagatatatctccctgtctatatatagagatagatatatatagatagatatacagagatagatctctctatatctatttatatctatctatatgtatatctatagagagagaaattttaa

SEQ ID NO: 1886934 - DNA, 4001 bp, Homo sapiens
gtaccaggcagctgctctgtaatttgattttattatgtagaataaaaatttaaagtctgggtgcagtggctcacgtctgcagtcccagcactttgggaggccaaggtgggcagatcacctgaggtcaggagttcaagtccagcctggccaacatggcaaaactccgtctctgctaaaaatacaaaaataattagccaggcatggtggtgggtgcctgtaatcccagctgtttgggaggctgaggcaagggaattgcttgaatccaggaggcagaggttgcagtgagccaagattgcgccactgccctccagcctggatgacagatactcagtctcaaaaaacaaacaaacaaaaatttaaaacattctatgtcaagcttgagtaaaataaattttagagtaaatccaccttgaggctagaacatcatgtgtaaacactagcaactaactatagataagacaatatggagggaggaaaacctcagtgaaatttaagtttcgcccaatcaccttacaaatgaagctcaattcacaagtcccatagtctcagacagagctgtcagtacattcttagttctgtagccccctacatacaagtgagaaagaaagtttttatcattaaaaaacagagaccaaaacaaataaacaggacaacaaaatgtagaggtattgagataatgcaagaagtaaaataaataaataataaaactgttaaagacgtcttcagagagataagagaagatacgcacttatgaaataatacagagcccttggaaattgaacatatagcaggagcaaaaactttaataaaggaattggaagatgaaattgaagactcttttagaaagaagaaaaaaaagacaagaaagtggaaattgaagagaaaaaaaataaggaacctattggatcactgcagaatgtccaatacctgcctataatgtgaaatcctgcatggcaaggattttgtatgtttgatcattgcgtagaatagaaccagacacacagtaggccatcaataaatagttctgcaagaaatcaattttcagagtgtaaggatccactcagaacaagaatggggaaagactcatgccaacacacacgattgtgaaacttcagaacatcagagacaaagggatcttcaaagcctctggagaggagaaaaaacacatactcaaggatcaagagtcagattggctttgaactttagaatagcaaagttggaaacattatattccagtaaggagtcatcctgcactttttatacattctttcaaatgtccagtgatacagagaaacctttttcattcacccccagtgacagagcaatcttgaatatcttgcaagattacaccttatttgcaagcacatatgtgaactaaattctttcaaaatattgtcatcaaaaatgattagcaaagcaagttaacgtctaaagttttgtggcttgatattaactccttggtgctcaattaaaataaaacccatttattattcagtctattttgtgttccttcattgcatgcaattgcaacaagtagacattggaggcaaaaagtaagattacataacacaaaatagattctcaaatgttcctccaacaaagcagaaacgaataatgcttacctctggtcagtattcatgtggtgaccagggttagtggtactgccatgaggctccatgtggctggattgttgatattttctgtcaactgtcagtgacagaaactcaactcagtctagttttagctcctggaaatgggaagtccaaggggtgggtcctgcatcaggcataactggatctaagagtgcaaatcatgtcatgggatctctccttttacccttctcttcactgctcttctgttttctctgtgtggcttcatttccaggcaggccatccccatgtggaagcaaagatggccagcaaacagctcaggcttacgttttcctcatggctagcaattcaactcttgctttcccagcatttgcatccatctttggaaagaatttagattatgtcacttgctccctccttgaccaattgtgtgatagggagaattaggcactgtgattgggctgcctggttcataaactgatgagatttgttttagggccagatggttggtatctgtggggagagaaaggatacagaagttgggaatcaagcaggttctggatttaaacccatgtatctgacagacccacctaaatcccatagagtgggagggtgatagctttcaaaagaagaggatcagaaaagactcctccccatcctcctcccctcaagataacagatgatcacttacatgagattttccctaggagtcaaaattcttcacgctgtaagatactaaataaaatgcaatcgttttaagaagagcatacttgagaaaattatcaccttgaagtgatggacggcttaattagaatttaaaaaaagaaaaaaacacaacccacggcattatccaaattacttgaggtataacatacaaactctttggtttctaggagatatgtaaatgattcacttgtatttttaatttgtaagtaaatggtgccaggtttccagacagaaactgaagccaaatctttatccatggaacttcacagtgagaggcacatcttagagatgaatacaaatcaataatacaaattacccttatctaagtgccccaatattgtacctcttgtgctctggttatcatattcccacagctctgggtgtttcaaattagatgtggattcttccactttttttttttttttgagacaggttctcactttgttgaccaggctggagtgcagtggcatgattacagcccactgcaccattggcctcccaggctcaagcgatcctcccacttcagcctccagagcagctgggactacaagcatgcgccaccatgcctgcctaatttttttgtatttttggtagaaacggggtttcgccgtgttgcctaggctgatctcaaactcccgggctcaagtgatccacccacctcagcctcccaaagtgctgggattacaggtgtgagccatcacacctggcctcttattttttaaacatctcctttattgtactttatagcttcagaattgagctgatcaaaatacatgctattcaacttgcatagtaaaatctttccttgtgtctgtcagaacctgcctaactccttacttctatatccttcatctcccaacagataccaaccttccagcccctaaaacaaatctcagccccaggagggcactcatgtccgtcattcagagatttggcacacaaagtcatactcattgctaggctagctctgacatgctccaataactggacttcctacttgtctccaaaaccaggctttctggtaaccagtttttgtaactacatccctgtctgttccctgtgcctggatccctgacttagaaacctactgagaaccacactttctttagacctggaggcctgccttgttcttatcagtctctattcttatcatacctagggacagaaggtgtgctccacaacttcagcctaaatatctgacagataactctccatatttggagatctattcagggaaacacttaacatctaccacctgagacattccatcttctttgtattgagatgacaggtactgacttttcttttcttccttccttcctctttctttattttttcttttcttttcttttttttctttttctttttcttttttttggagaccgtgtcttgctctgtcacccaggctggagttcagtggcgcgatctcagttcactgcaacctctgcctcccaggttcaagcgattctcctgcctcagcctcctgagtaggtgggattacaggcgtgcaacaccatgcccagctaatttttgtatttttagtagagatggggttttgccatgttggccagactggtctcgaactcctgacctcaggggatccacctgcctcggcctcccaaagtggtgggaatacaggcgtacaggcataagccactgatcctg

SEQ ID NO: 1886935 - DNA, 4001 bp, Homo sapiens
ccctattctacaaatattaatagtgaggctcaataagattaactaatttgttctaagttattcagctgaggtctgaatagcagggttgaattcaaatccactgactatagaaaccacacgcagtatctgactatagaaactactacaagccgggcgctgtggctcatgcctgtaatcccggcactttaggaggccgaagcgggtggatcacatacgctcaggagttcgagatcagcctgggcaacatgatgaaaccctgtctctacaaaaaaatacaaaaactagccaggcatagtgatgtgtgcctgtggtctcagctacccagagggctgacataggaggacagcttaagcccaggaggcagggagggattgcagtgagcagagatcacaccactgcactcccacctgggtaatagagcgagactctgtctcaaaaaacaagaaaagaaaaggaagtactactgtgtacgctattaaatacagtatacagcaaatcatagggcctcagtaagtgatgtatatacttgtgcctaacccagtgactggcatataggcaataaacaattacaaaagcaccaccaatgatcgaagctaatgttcattgagcaattactatgtgccagtcatgatgttaaatgcttcacagtttattgctgttagtcctcatattacccttatgaggtaggtacaatttttatcctcagtttacaggtggggacattgaagggtagagaaattaagaaagtgttcaaggttgcactatcagtgaatgacccagccatagttcaaacccaaacagtgtcatttaaaagcccatgtttttgattaccatacaatattgtctcctacaagaaatgttatgagcgaatttgttttcattgattcaccccacaaatattgtctgagtacataccataggtcatgtgtttgccaagtgctatagatataatacagaataaaaaaaaagatagacctttcctccatggaaattacagtgtggagaaagtaccaataaaaacaaaagctacgaagaccatgtagatacagggatgttcaatcttttggcttccctgggccacattggaagaagaagaattgtcttggactacacataaactacactaacactaacattacttgatgagctactgaaaaaaaaaaaaaagtccatgcacaaatctcgtaatgttttaagaatgtttatgaattttgtgttgggctgcattcaaagccatcctgggccacatgtggcctgtgggctgcaggttggacaagttgatgtagaaagatggcgatattaatagaacactcatatttacatcctacccttcccaaaactccactaagaagatgctgagatggtaatgatgatgactaatatttattgaatgttctctgggtgccagacgttaatctgggcactttacatgtgttgtcactttccaaccttataacaatccattttacaattgaagaatctaaggcaaagagaggttaaataacttgtccaaagtcacatagttagtatgcggcaaagcaagtgtaagaatctaaagcttgtgctttaatgcatctctttccacagtaaaggagaaaaaaatacataaattctcacaaacagagacatcaggacaagagatgtcctgaatgggaaagataaacagttttgaggaaggagaaacagggcagagggagtaacttctttagcagggcagagaaagctgtgaataaaagcagagggctgagaatagacctgcctctccccaccacagagagtcagagaaactcataagctggggacatctgatatcacagagtgtaggagggggacacaagagcaaccctggaggctaagatggaattcagtatttataacagtcagcaccttcacctactcccacacacagagtgccagaaaccaggaactgaccctccaccccaaggagaggttggcagggagacttaccagcttcccgtatctccctccacatggaggcaggacacgctctggccttgcccaccctcccactagcctctcccacagggcagtaaaggtgagtctgggagaaagaaccggtcagacttagttcagctccaccctttcctcctgggagtgagtctttccaagacagagcatgtttttttctacccctcagtgagaacagtcgtaccatgggaggagtcctgtcccagttcagcattgcccgtgattggctgcctaagtttcccagttctggggttgagtttgcaggcccactggactcttagactaaactgcatcctctacctgactcttcaattgtttaataaaagtggtttcttggtctttcatctgccttacctcttttcccacattatttctcaatatgccaaagtttgggttaattttttaaaaaggagagacaaagggaggaagaaagagaaagacagagccagaaagggagaaaagaaagaaagaaagagagagaaagagaaagagaaagggaaaggaaaggaagggatttgtgctaaatgtcatccttggagagatatgagaagataatgcatccataaaacaaccttaacataacatccttggaaagatatgagaagataatgtatccataaaacaagaatttattaatcagtgaggaaagaagagctcttaataaataaagctagagcacgcaaagtaaaaatttctatggaactttatctttccatgaatataaagttcatcccagtttccttcccacaaagatagcaaatagagatcaggaaataaaaattatgggcaaaagcaagacatgagagaaaggattaacccagaaaacctaacagtcaaataacaggaatagaagtttccgttccagacaaacagaaaacaggtaaagaaaaatacacacacacacacacacacacacacacacacatttatacacatacatacaggagtaaaagctagcagcctgtagactgaaagaatatacaaggaagccagcatcagaaggaaaaatagagctaaattatcacagaactttacaaatcatgaataaataaaagatcttaaaaagatcttagaggccaagcgtggtggctcatgcctgtaatcccagcactttgggaggctgaggtgggtggatcacgaggtcaggagtttgagaccaacctgaccaacatggtgaaaccccgtctctactaaaaatacaaaaattagccaggtgtgatggcacatgcctgtaatcccagctactcaggaggctgaggcaagagaattgcttgaatccaggaggtggaggttgcagtgagccaagattgcgccacggaactccagcctgggcgacagagcaagactctgtcgcaaaaaaaaaataataataataatttagagggaaaaaatggtggaggaaatgctaaagtcagacttctcagcctcaatattgaagaggatctttacaaagtattatgaaactattaccaagacacattgctcactgaaaagcgcaaggtgcagaacaatgcacttagtgtgctaccaagtgtgttaaaagagaaaaaacaaagagaagagaaaacaagggaagagagatgcttgagtgtgcgcagactattcccggaagtatataaaaactggtagaaataatacatggacatgtactattcgaagttttttgtcatggattgggggccaggcgcggtggctcacgcctgtaatcccagcactttgggaggctgaggcgggcagatcacgaggtcaggagattgagaccatcctggctaacatggtgaaaccccgtctctactaaaaaaaaaaaaaaaatcacacacacagaaaaatggatgggataaagatggcatacaaccttggactatgtccacgataaaacatccaggagcctggcgcggtggctcatgcctgttatactagcaccttggaaggccgaggcgggtggatcgcttcagctcaggagttcaaaaccagcctgggcaacatggtgaaaccctgtctctgcaaaaaaa

SEQ ID NO: 1886936 - DNA, 4001 bp, Homo sapiens
tcttccctgatgtctggctggctctggctggctcttctccaaagttaaactgtctctcctccaaagtccagccatccccctgaagtcaagtcacctctctccagtcaagccacttctctcctctactgactgagtctggggtctttacaggcacaagatggggatcctggcaggccataggtagttttggaaaaggcaatatttgattgttagaaagacattattcagaaagaaccagttgagagagagtgagcaaatagggatagaaattctcatttttgggccacgggtttcaggatttttgacttgaaggtgggattttgccagggacccacccctgtctgcctagaatttctctgcctcatgcctctatcaatacaattcttattaaaatgtataaatggttctatcaatataattctttttaaaatgtataaatggtacagataggcaagagtgtaaaggacaagcaagccagctctgagccacactgcctgggtctcagtcctggctgagagacactaggacttactagctgtgagacactaggagagctacttaccctctctgtgcataactttccagagtattaaatgagatgctacccaggaagcaccttgcacaatgcctggaatggcaaacacttaataaatgtcatctttactaatcctatgatgtttaacaaagataacatctgctttggaagagatgcttttagagagacaggatcatcgaaactctttcttctttttgttttgttcccatttacatcatttcccttaaaatagtgtcagttctgaggtatttaaatttttattcagctaaaaaaaaaaagttcgacattgtagatatggcatggttggtcatactcatgtgtttaaaaataaaagatcaacaacaacaacaaaaaaatcctttttgatggtgtccactggaaatcttgacactttgattcatcttttgaccatcttcctgtttcagtaagattctcatgagactcttggaagaatatagtcgaacacactcgagagtgaactgtgcacttacttgtgttgtaaggatgttgtttatattttagatcctgttttcttcctggatgaagtgccgctgttaccaggtgcttctcccactgttatcgtctcctcctcaggactcagactgctggaagcagcttcctgcagcctctttgtgaaactggccactaaagaataggagagagcctgtcaaaggttatctcccacctgggttgcagtttccatgaatatcaaggttcatcagaatctggtgcagcaatttataagatgtgtcacagggcacatagaagagacagagttcttgctgaaggagagctcagaagggagaaaaaagataatgacggtgggcaaatgagatgctcaagggaattcctgcagtcagatgctgtagacaccagttaaaatacaatgcctaacccttctggggaaaataatgaatgcatgacaccctgtacaattaattctaaattgctttgcacatatctgatggtcatgttgctcccaagaacaactttggttcagctacacaaatagaatgaacacctacctcaaagaaaaaatgttgttaccttcttagataattcacctccaaaactgagacaaaatggaccaattttactctaaggattaagaggcaattcatgagctaatcagaaagcaaggatgcttaattatgcatttaaacctcctgattcagctatgccatgccacagagccaaaaggaagaccgatctctgtccaagtctacttcccagactgggaagattagcaggagagcagaggctcacaggggtacagaaactgacaatatggaagctccactgaagtcctgttagatacttcaatatcggccaagaagtaagcatcatgcctgtagaatccacttacttaaggaaatgaattactaaggttgcatcctctgagttagcagttattgatggtaacagcaaagacttgacttaggaatggggaaaatatcactggttacacttcctttaagccaatctcagctatttcctcttcactactcatgacttccttccaggcacagacagcctcaagtaacattcctataattcccaaaccagcccatcctaccccaaaccagttcactgatctcaagggcaaatcataaatggtagtcataacagcaaaacgcaaagcatcaacaggaattttccctttgttgacaaattaggggaaaaaatggaaccaaagaaggtgatgttgaataagagaatatcattatcatttcttagaagtactattgtgatcagtttttatagatttcagaaaatagagatttggaaaatacatagaactgcttttattctgaattagttgttctggagtcaggtaaaaatctttcctgaatccctaagacaatcactttccaccacttggataacactaagaaggttttagaccacaagggaatttggaacacttcccactaagcgagaactagaatatgtctagggaaagccatgtttcggataaagagatttcagtctcaaaagcaagtgagaaaaaattgattaaatttttaaaaatcaagtgagcctcactactcagaaaatattaatcaaaaaagaaaaaaaaatcatggtttttgctcacactggctataatactgaagctatactccaacatatgcctaatacattgtctaatccagtgtttaacattccatatttagtggtttagtcatttgagttaggacctgcattcaaaaaaatatttattgaatgcctaacatttccatgcactatactaggcaacagctatgcagagatgtttgaaacacagcgtttgaccctgagtatttcaagttactacctaatgaatcattgttaaaagtaaaaattgtcctagaacattttgagcatcaaaataaacaacgatagttatagattatagaccacaaaataaaattaaaaatccgtgggatgaaagaaataaagagagagagaagaaaaaaatggagggagggaggaaggaaggaaggaaggaaggaaagatgtgagggagggagaaagagaagaaaggaaagaaagagagaaaagagaaagagggagaaagaaagagagagaaagaaagaaagaaggaaagagaaagaaaaaagagaaagaaagaaagaaaaaagaaagaaagaaaggaaagaaagaaagaaaagaaaaaagaaagaagggaggaaggaagatccttgctaagaatagatttcacactagtaaatatggaacaataaaggaatttcactatattggccaggctggtctcaaactcctgaccttgtgatccacctgcctcggcctcccaaagtgctgggattacaggtgtgagccaccaaagcgaattttaaaattcctttattcagctgggcacagtggctcatgcctgtaatcccagcactttgggaggctgaggtgggtggatcatgaggtcaggagttcaagaccagcctggccaatatagtgaaaccctgtctctactaaaaataaaaaattagccaagtgtggtagcaggtgcctgtaatcccagctactggggaggctgaggcaggagaatctcttgaacccgggaggcggaggttgcagtgagccaagatcacgccactgcactccagcctgggtgacagagcaagactttgtctcaaaaaaaagaaaaatcgctttgggcaaccaccataatagtaattgttatagagatgaactatcagtggatgctaaaactactggtggaagtttgatttaaaatatgatacttacataaactcaaagcattttcccacaagatacgtattaaggacaaagggaaaaacaattttacagtggagaaaccttatcatcttaaccaaagggatcaaaattaccaccaataatgagaaaaatagacatcatgtgcgccccattagattgcactaagaaagacaaaacatcacatctgagtattgccaaaaatgcttaa

SEQ ID NO: 1886937 - DNA, 4001 bp, Homo sapiens
cagaggttgcagtgagctgagatgagccattgcactccagcctgggcaacaagagcgagactccgtccaaaaaaaacacaccaaaaaacagaataaggaagctactaaaactggggaattgagctctaggatatctaagctacaacagagatggtttatctgaaaacaaaaattacttaaccactctagcttgttttcctttctccaagatgaaaggcattagagttatactaactggcctggtagatctctgtctgttctaagctgctgtaaagcagatgagtctatatttctctaatggctcccacgcaaattagtttattagcaaatataaatttttacatgtttgactttttcccactctaattgttcttatgactgatatccaactaagaagaaatgtgacaatagtgggtagtgacagaatgaccatttaggtattaaaattctttcttcacttaattgtcaactggttaggagaagtgggataactttctcttctgacggagggaaaaaatgaccaaggtattgtaaagaaagtttaatcagcagacatcagacttggttggaatcatacacatggtagtaacagtcaagcaaagatggaggaaagataatagacagcatctgggaaatggtactgaaaaagaagtgggacacaaaatctccattagcagagagacaacagtagtctttttgtgtggtttactgttataaaattctgaataggaattctgtttcacagctgttaaaagagaattgaaatacaactgtgtccaataattgaaaagcagctgttcattcgccatgtctaaaaacaattgtataggagaaattggcttggcagtacagcaaaaaaaaaaaaaaaaaaagtgtaattatttttaattgccaaagtggggaagcaatctgacagtggaataggacattgtatgacatcatgaaatctgcttttctgagagttgaaaaatggttaacattttctctgcctgatgtgctatccgaaggcaggaaggagtcccagttcatcccttataggcccttagagagagcattgtgatgccagtttcctttttttgtctatttttcctccatatatgtacacatattgtgcacataactgatatgttttcttaagacttccctttacagtaactatttcccactctgctgcagactaacaaaaacagaaaactaaagggaaatcagtgtgagtcctgaaagttgtgtcctgcagtagggattctgcataaaacacaaagagaggacacaaaatacgccacttttcaagtcacatttacaaaaggcttctcttttatcataattcactcgccaaaaatataattggacagtcctttagcattctgcagtatttctcagcaccagcaaagagacagtaaggaatttttcaccaagagccatgagtaaagagagcttgtagccttctacaaggatctggttgctctgaatggtcaagtaatcgtgggaagtttattgtcaatgcccgggtagcaactctttcaactatgtgatgatccgcttttttgcttgctttctattaaaaaactgtatttgattctgtgcaaattcataaaccaaacacaaaattcaggggttaaagaaaacagttctgtaaacagatgagacagacatgctaatacattggaaacatgctatttaaattcagactagttaaacaggatgcccttttgtcactgaccaaattgttaaattggtgccttggcaagagccttttgtactctgaagattcccgggatccaaacctctgtggtattaaaacaaacagagtaaatattttccttgaagtttacatccaagatctaaatatttccaagcatgtcaaactcacttttctccaccgctccctgcagggtccgtgtagacttcggctgccaaagaacccagttgaacttgccttgggaggggctccatccctgaagacaagcaaagctcagagccagaagcagggtgtcttgcagctgtgctgctctgcttggcagaaggaactcacgcagcagcaggtgtgctatctgctgacttcaacacacagagacggggaaggctctgtccttgctgcttgctccctaagcttgaatatctgccattcccttttacctatttgcagagaagtgccaagaacctaccccggaaaacctgcatttctcttcattagctttaagtgtgcaagtcagctttctagctacataacttctagctacataacttaagctagttgcaactgcaaaataaagtgattcctctgcagaatctagcagagaatattaacaaactctgtttcttctctctctcccttgtttcatattgttttccatccaacatgcagctgaagttctcttagaaagagactacaaagaaccacaattgagtaccacatcagtattttttttggaccttgtatcttggggacttactctgaaagtgtcccagcataatcgcgaagacaatgctctgctctttctttttttttttttttggtagttactgacagtaaattttcaaactgccatctcaaattcagtgtaattgaactcaaccagaaataatgaatataactgtgggtatcaatacctttgcctttaaactcagtgaggtacttcaaagtacctcatcccacctctaagaaatgcacttacatttacctggagttacctaatataaatgagcccagtgctgcactggccaggccttccttcactgaagaacttgttgctcttcagctgttggcagatggccataagctggctgcccttccaaggattgcctctgttacagagagcagccttgcccaaggacacatccctttgcagggagcccacatccaaaaactgatcaaggagggagtgtaagggcctgttcattgcaaatcaacctgagaaaatgctgaagggtcattctagctctagaaatctctatgagattccctgaagctgtgatgggtctccgtggaagctcaacttctttctctgccctgtctgcttccttcccctaactcgagaggtgttgaatccaaggatgcaccttaattaacataacgagctcttaatttcatctcagattcggcttcccaggaaccctaatctttgccacataggctcctacaaagcccattttggggggagtcatgtctgcatttgatgcaggcatccaaccagtcaagtatttgattaaataggtacaatgtataaatttatatccataggaaaatgaggaaggaatatttacttctatcttggtagaatatatagtcaagttagagagttagcataaatatatgaaaacgtaactcattatataacaaatgataagtatccaatggttacatggcattgggacttatcagaagggaagattggttttaggacaaactagttgctggttctttcaggagcagtaagtttattgtaacccattattatctgcaggctgttcttctatgaaagtcatcccatcaggacatacaagagtcttcaccctagaaatgagattgattctgagtagccttcctgctgctctgtacctcatggtgaaactgtcagacaattcacaatggcagtaggtaaaaaacatacttccataaatactttttccatgagatctgctatcgttgaccctcttcttcctgggttgcttaggttcccagggactctccactttcccccttcaaactccaaagcattgacccataatgaaggtgccttgcccctcttctggctgagctggtttgcagggttggccctgccaatccaaatccccaaagctgggtcttgctctcacctgtcttgactttgcctttcttgacatcttcattgtttccatttctacttctaagttctcatctccattttgccccttctagattctatcaacctgctgtgatctcccatctcctatgtagaactaacagaatttgctctgcctttttacaaaatcacagtccaacatggaggccttgggcaaat

SEQ ID NO: 1886938 - DNA, 4001 bp, Homo sapiens
tctgcctccgtctttacatggtcttctttctgtgcacctgtttgtcatcaaatctctctctttgtgaggaatcagccattggatttagggcccatcctaatcccgtatgacctcatcttaacctcattacatctgcaaagactctattttcaaataagtaccagaggttaggactttaacatattttggcaggagtggacataattcaacccacaacaaaaatctctggatctttgacattctgttgcatcctgcagctgacactctccaatgactgttgtgatttcttgatgccaacagttggatggatacaaacccagataccacatggctttttggtcagtatctccagaagactccaactttttcctgctaacgtggactcccatttccctgcctggtgcatatattaactatttgacctgaccagaatcccagctcccaactctcctgttttgttttggctttttttgagacagggtcttgtcacccaggctggagagtagaagagtgatcacagctcactgccacctcaacctcctgggctcaagtaatgctcttgcctcagcctctcaaagcagtgggattacaggtgtaagccaccacactggccccaactctctcttcctgatacaagtaattttgggcatcctccttcccactcagtgcagctgtgtggggcctgcttgtcaaggtgcctgtcctcccctggccaagatgggctgggtgactcaagttagccaatcagactcttcctactagggctttgacacctaggtagagtagcaagatgatggaaaaatagatgggatgaattcaactttgttttgtggtcccccaggccactctcaggtttgatgattcgctaggagggctcacagaatttggaaaaactgttatgctcacagttacagtttattatgggaaaagaatacatcaaagacttgccagaacttggggataaaaagaatacagattaaaatcagcataggaaaaagggacaatagggcagagttcaggagaaaccggggtgaacttccaggagttctctgcggagtcacatggacaacacttagtcctcccagcaacaacgtgtgacaataatacacaccaattactgtcaatgaggaaagcttacccaagtcttggtgccaggatttttattggaggtcagtcatataggcatggagcatctacatgactggccttagcaatttattcctcagttccccacccatccagaagtcaaagagatacagcatggcccagggctcccagcaaataaaaacaggtcttccccataaaccacactgttagcataaggtgtaggcagggctgaagtctcaggtcacaaaggtgctctcctcaggcatattccaaagacccagaagttagctccccagagctggtcaggggccagtccttccttcggaatgttcaggatttgagcaacctagttccaccgaggtaaccctttttagcacacacttgctccctgatactcaacatttcatgagaggagagggagtttctactccactcctcagaatggagattggtggggaaaacatatatcttatgcgaggccgactgacttacctgattgtggaggtttgagggacaaaactgagcttgtcctgttcagtgctcccttaggatccccgcgcagcacttccggcttgctctccgccatgttggatctcaggcttgcacacccattcctgcccgggggcttttgtcctcgctgttccctctgcctggaatgctcttcctcgtgcatctccgtggcctcctccacttcattcgggcttcactaaacttcataggggccagaatacattttcctcattatcacattggctggttgttcctaatagaaaaataggtcagcagcctcgctggagggaactgggcagccgtgagtcaggggaagagcatgtgtctgccacagctcggctctcactgctgctgtagagccactgcctccaggcccagctgcagctgcttctgttaattaatcttctttcatttgttggggctgaacaagacccacccacagaccacatgggcctgaggattaaattttgtatggtgcagaaaaatttcaaatgggaactaacatgtctgtgacaagtggaattgtggcagaaaaggctagctgtagcccatatccattctccccttcaactcttagtgttataacaaaagaatccttgagttttaacaaggttggcagaggctcaatgttgcggagaaaagaggctacagactcgtaattcaaaagcaagactttgctgtttataagaactgcatcggccgggcacggtgcctcacgcctgtaatcccagcactttgggaggccgaggcaagtggatcacctgaggtcggaagttcgagaccagcctgaccaacgtggagaaaatggtgaaaccccatccctcctaaaaatacagaattagccaggtgtggtggcgcatacctgtaatcccagctatttaggaggctgaggcaggagaatcgcttgaatctgggaggcagaggttgtggtgagccaagattgcaccattgcactccagcctgggcaacaagagtgaaacttcatcagaaagaaagagagagggagggagggagggaggaaagaaggaaggaaggaaggaaggaaggaaggaaggaaggaaagaaagaaaagctgggagggagggagggaggaaagaaagaaagagaaagaaagagagagaaagaaagaaatttgggacttttggggttggcagtatttagatgagattttgtaactggagttgataatggaatgggttcagacttttaggggtgttggaatagggtgactatacattgcaagtgggaagaacatgaatttatgggaaccagagggtagactattgtgggtagattcatatctctgaaaaagatctgttgaagtcctgttgttttaagccaccaactttgtgttgatttgctatggcagccacaggaaactactccagcggtcaatgtgaaagggttgtcagtgggaggccaggctccagcaggggccagcatgcaggaggctgttccccaaaagggctgtatgtgcaaagtggcccccaaatgccagaggagccaaaaaaccaaagaatggggcagacattcagttgtcggtatagggtgatttattaggggcatttatagacagaagcgtggtcttgggtggccacaagacaggtagatcctcacgttgcaatcccccagatccaggtcttatgtcttggggaagaagcatagtgctctggaaggagtgtgtaggtggctatgggcatcacagcctatgatgtatgcaacaacatccagggttgttttggaagaaaggtgaatcttacagtgactaggtgtttctacgtaaaaagcaatatgtcaaccccacattttggaggcattcctggactcaagagttagtcagaagtggcatggtggattagtatttaaaagagtcatgcttgaccccacagatggaagttcttagataagaacttataagagcaaggcaggccgggcatggtggctcacacctgtaatcccagcactttggaaggccaaggagggcagaccacaaggtcaggagtttgggaccagcctggccattatggtgtaaccctgtctctcctaaaagtacaaaaaaaaattagccaggcgtggtgatgcacacctgtaatcccagctactcaggaggctgaggcaggacaattgcttgaacctgggaggcagaggttgcggtgagccgagagccgagatcgcgccactgccctccagcctgggcgacagagggggactccgtctcaaaaaaaaaaaaaagcaaggcaaaggtctcagtcctaaagagccctggtcctggggtgccacaaactgctgtggctcacagatgaaaatgaggccaggcatggtggctcacacctgtaatcccagcactttgacaggccgaggtaggaggattgattgaggccaga

SEQ ID NO: 1886939 - DNA, 4001 bp, Homo sapiens
gagaggttaagctgttttcctaaggttatataacaggtatgtggaattctgatgcaggaactcctatctgtttaatccaaagtgcctcacacccaacaatactgcttttacttgatatataatgataaaaccttgatatataatgataaaacctaactgcaatcaccaatctttttcttttttttcttttcttttttttttgttttttgagatggagtctagctctgtcacccaggctggcgtgcaatggcgcgatctccactcactgcaacctccacctcccaggttcaagctattctcctgcctcagcctcccaagtagctgggattacaggtgcccgccaccacgcccagctaatttttgtatttttagcagagacagggtttcactgtgttggccaggctggtgtcgaactcctgacctcgtgatccaccctccttggcctcccaaactgttgggattacaagcgtgagccaccgcgcccggctcacctatctttttctaaggatagagaccaaagaagccacaaccccttccaaggagtcaactgacgccaatgggatgctgtggtgcaggacacttggggggtgctgcagctgatgccccttggtctcctggtggtggaagggaaatgggactagatacgagattggcatctaagccatacaaaaaagctgtctcagacaggttgggccagtaagcacaacgtcacttatctatattggcttctggttacctaatgggtttggtttggtaaaaattaagaatcagacttctgggatgcaagctatgcctgttcaaaatctgctgtcagcccctgtgtttcaagcttaaccttgaacctcatcattaatcaggtgaccttagaccgttttatcagccacgtatctgctagcataaatctcccttctgtgaattcagaacactgatacctcacattcactaaaaatacaatgagagacagatgctcactttctttatttgctgttgtattcttggtcccactttgccatttttaaaacaggaaaacgtttcccttactcgaacgctaaagtgcaaagctgctggtgacgctgccttctcccacctccgcactccactgtccttgcaaactttggacagaggaaaggtgggcacggggcgcgaaactacaagtcccggcatgcacggcgttctccgcacaggcgcacggggaccgccgggccagccggccagccagcctgcggagactcccgggtccccgcgccggactgggactgggagcaggcagcccgggcggagcgggccggtgccgaggacggccccaggcattgctctgccccgggcattgcgcggcgcgcgtgagggggatgcggcaggaggcggcgcggcgggaggagtaggcggcggcgccctcgggagggagctgcgcgcgggccagacggcgcccggaggctccgcagtgccgccgccgtcgcccgggaggctccgcgcgggagccatgtaaccctgcggcgggctccgggctgctccgtccttccccagctcccgggctagcgcggcagcggggccacgatgaagaagcagttcaatcgcatgcgccagctggccaaccagacggtgggcaggtaggtcacccgcgggcaccgctgtcggtgcgcgcccgcgaggctgcatccgcaggggcgcgcaggtgatggagcccgcccagcctccagtcctccttgcctcagtcctttcccctgcaccagctccctccaggcgccgctcgcaggcgcgacccctcctccctaacttcccagaccccggagctcttctcactcgccgccttctgctccgggctccggttgccaagcgcaaagtgtgacgcatcctttacctgcgtccccggctgccccttcgcttcgtcctccctgcctttccccgggactcccttctccctctggccgcctgtcttcctggaaacaggtgtttgctctgattgtgctggaggcagccgaaccgcagtcggtctccggagatctcttccctcccctcccctgcgccgagttcagggctgctcccgggtccagggaaagtgctgggcctggtcggcctgcccctcccgccgtgtttgttttcagggactatgactgtacgagattctggatcactttcctggccgggtttcttaaggcgtttggtggggggaaagggtgaggggtgggagaggaaggaaggtgctggtggaatggcgttgctgcctgcttgatgttaggactgatttcagtggagggagggaggctgcaaaaaggaggcccaagtcctcgggaagatgagataagcagagaatcgcagccaggtaggggagggggacagaggccccacagtcagaagagtcaggccccgggaagctgcaagaccccgcctgctgccatcacggtgaaaatgggctacatctggactccaggagcggctctgcagggtgccaacatctattaaggttacataaaaatcctggtgggtcgctcccaagactagacattctttgaacacaggagcgttaggtagaagggatttttcctggaacccctactcctggggagggatttccgttgctgctgtggcaaaggaattcaggtgtgctgttctaaagcaatcagaaagcaaagaatccagccttgggtgcagttcaaatgcaagctcaacacctcgagggctctccactaggtttacggagaaaccgaatacctttcttgggtgggaagtggagcctgaactggcatctggtaggatgggggtggggacatccctggggaataggggacatctgaactcccgtctgagcatactgccctagttacagtgggcatttgagggcaggggatgcggtggcttcttatgcttccagggactccagatggtttccaagtaacaatgtctaaaattgacttggattcatttttccttcccaaacacatgtgctttaacatgagggggaatttatgaatagcagagtcagattagcccagatttctggcatggtattgccacagatatagcctcacgtggactgccttttgatgtgttggatgccgagatagtgtttcctggtattcgttgtttagcagatgacagtcaagccgacccgtctttaatgtcttggcttcttcgtcaccctgcaggcgggcattggccatcacctcagaccagccaagtgaccaggaggcccctgacactagacttgggttgctggtttctcttggtcttggggtttcagtgccgtgctagaatctaaatgttcagaacatgtttatgcctcctccctggccttcctgaaacacaattcttctttttttcaggacctgtttttaaatgggggagatttttgcgccatggcatcatatcttatttttcagcctcatccatggggggaatgcaaaatggtgaggggaggttggatttcagaaaaagtggtcttaggtattgagagcacgttcttggaagtccaagcagctggttaccaagaggttctttcctcttctttgttggggctctggtggatgttggcctatggatgaattctgcctttctccgttggtagccattgtgttgtgcactgggccaggtgagggccagcctgtatcgcttttgatgaaatccagagcaagccttttaaagcaaaaaccagttcatgttaccttgctgctgaaaagcttccagcgacatctgattgtgcttagcatctcatatcttgccagggttctacaggaccatccttggttggccttttttcttaactctttttctccccattctcatctcttcacattcatggagctctagccgtgtggcctttcttgccccaaacacactgagctcatatccaccttgaggatttcgtttttactgttttcccattttttttgttttttgcttggctgagaatgtgctccttccaagtagctttttctcatcatttcagtcttggttccaaggccttcaagaggcccttcctcccctatttacctccagctcatcat

SEQ ID NO: 1886940 - DNA, 4001 bp, Homo sapiens
tgccaccacgcctggctgatttttgtatttttgtagagacggggtttcaccatgttggttaggctggtctcgaacttctgacctcatgatctgcccaccctggcctcccaaagtgctgggattacaggcgtgagccaccgcacccaggtgcattggttttatatctctctgtccctctgtccctcccttctctctctctctccacacacacacacacacacacacacacacacactcattttcctgtactatttgataataagtcgccgacataatgctctttatctcaagatatttcaacatctatttcctaaaaacaaggacattctcttacataaccacagtacaatcctcaagaccaggaaattaactttgatacaatattatactcttcagacaatattcacattttaccaactgtcccaatgatgctcattgtaataaaagaatatcctggatcatgcatcacatttggttcccagtgtctctagcctactttaactggaatagctcctcagtctttctttgtctttctcaacattgccgttttttaaagagtacagggcaattattttgctgaatgcccctcaatctgggtttgtctcttgtctcttcataattagattcaagtagcgcatctgtggtagaaatgacacagaaatgttctcagtgcatcctttcagggcagcagtagttgtacatgtactggggaggttaactttgatcactgggttaaggtggtgtctgccaggtctctgagcgaggatcctgctgattatatttctccctgcaagaagtcctctaatacaaagtaggcaggatggagaatgttcagcagtgatctgcaaatggtccttggaaacttagcttgtgtgacttctcactgagcactcctttacagacttacaagtctttactctgtgcctatttttctgcatttagcagtctctttatttgttggtaccaccaaaggccagcatgatgcctggtacatacttagtgcttataaatgtccaatgaatgagtgaaactgacaggctagagaagggggtaggtaaggagagctggtccaggaaaagcccagaatgacagtggatttcagagaggctctcttcctgatacagagggcccctgcacctacagatgaagaagggtggcagtttcaggtgtctggactggttctctgcaccccattcagggcagaaaggcagggtttcaggactgggagccagctgtgttattacaggtggcctgggttctgtgttgagcgagatcctaatggtccctacatttaaggcagccatttccagcattttggccattgcatcaggagaaagagaggcaaaaacaagaggggatgtcattcaaagaacagtacactgaattgtgggggtagagtggggaggaggaaagaggcaaacatctggccactgaatgactcaccaaagttaggagtgagccatctgtgtgaatcccagaggaaaggctcacaagcactcatctgctacgtactcaccctgtaatgtcgcgggaaatgcataaaagtgaaaagaactcctacgccaaagttccaggtgtggaaaagttattctgagcaaggagctagtcaacagaaaggatgtagcaattcaaattacatagaacaataagatttaacaaattgagacatggggaagcaaaaagcaaaatatcaggaccaaattttaaatggaaaagggaaactctaactagatccaaaccaaaatgataataataatgataataataataatgaagaaaagtaaacataagaaaaatatgattctaaaaggcaaagtctcatattaaaacggaaaggcaatttgctcaggaagctcacatttcctgccttctttgtttgcttggaaaacacagtagagtcgaccatctggggtaattaattctagggtaaaaatgtcagaacctgggtaaacaaagattagcaccatgataaaaataaggaagaaccaggaactaaaaaagaaaccaaattcagtaagttcaaagggatagaattctgaagaaaattctgaagattccagggacaagcttgttttgccatccgtcaactttttgaatgagagtcctgggataactcttgctcttttatatttcaaagtatctcaggtttcaaatcaatttctataaagcttccacaaaacaaatggaaggaagaactgtaaatcacaaactaaaaaaaacaaacaaaacaaaaaacctttcccccttacaattcaacaacccaaagtcaccaaattgaagaagggtaaagtaattgcagaggtaacgggctcatgcactgattgaacctaaccttggcaaaccatacttcaatggtctgttgtactaatgtccagaaagcatgcaaaataatttggaagcaagaatgtaagtctgagcttctcggttgcctcccccactgcccttccttctcagtgctaatgacattccaatgcttagtctcaaaaaaaccactggtaatagggatctcagaaatatcagaagaaaacgttccttctacccctagagctgcagacaagcagattctattccacaatataaggccaaagctagttctgaaaaagtgggtaaatagagaacattcacaaaagcattcatctctaagtctcctatcttctctccatctcggaagtggggacatgtgccctggcaggaagctcaggctggggttctagaagaggtaggaagtacaaaagtagaagaggacagtcttcatactacacagggcagaactggaagagaactttaaaacgagttggttcaattgtctgtcaccttagatgaggaagccaagttctggaaagaataagtgactctggcagtgcctagagtagccgatggcctgagtttcttcctgccaccccacacaaaacaagtgcaaccaggaaattcatgtgcctagacctgatgccttaattccaaagctgcaaaggtagttgggaccatatgatagtccaacttggatgccaggtttaagttgttatcctgtgagtgaggaaccactgcagatttctttttttcccctgaagggctgtggtgcaatcgtagctcactgcagccttgacctcctgggctcaagagatccttccacctcagccacccaagtagctgggcctacagtgtgagccaccaaacctaataccatgcctcactatgttgcccaggctggtgtcgaaccctgtggctcaagcaatcctcctgcctcagcctccaaagtgcttggattacaggcacgagccactgcacctggcccaatggagattcttgagcagggaagatggttataagcattgaccttggacttgacacttaggtttgaaccctgggctagttattactttctgagctttatttctttctttatgagaggaaaattaagtccttaatacacctatttaaactcatttcttcagcttcaactgactttgtaggatcgtaaggattacataagaaaatgaatttaaggccaggcgtggtggctcacgcctgtaatcccagcactttgggaggccaaggtgggtggtggatcacgaggtcaggagatcaagaccgaccgtcctggctaacatggtgaaaccccgtctctactaaaaatacaaaatagccgggcgtgttggcgggtgcctgtagtcccagctacttgggaggctgaggcgggagaatggcgtgaacccgggaggtggagcttgtagtgagccaagattgcgccactgcactccagcctgggcgacagaggaagattccatctcaaaaaaaaaaaagaaaatgaatttaaagctcaatactaatactgtaggtaaattagtattcagtagtgttaactattattccaagcagagctttacttctggaagattcactaggtgggttgtctccaatcaacaaaggtaacaagagcctgtcctgggggaatggagagatggtaacagatttaagacatttcagagttagcctatcagtta

SEQ ID NO: 1886941 - DNA, 4001 bp, Homo sapiens
gggttcacgccactctcccgcctcagcctccctagtagctgggactacaggctcatgctgccatgcgcggctaatttttttttattttttttattttttagtacagacggagtttcaccatgttggccaggctggtcttgaactcctaacctcaagtgatccactcgcctcagcctcccaaagtgctaggattacaggcatgaaccacctcgcccagcctgtacgattttttttaaacccatttattttattttatttatttgttatactttaagttatagggtacatgtgcacaacgtgcaggtttgttacataggtatacatgtgccatgttggtttgctgcacccatcaactcgtcatttacattaggtatttctcctaatgctatccctcccccagccccccaccccccaccagccctggtatgtgatgttccccaccctctatccatgtgttctcattgttcaactcccacttatgagttctaactcatttttgcctcccagaggatcccggtgtcttagctgtggatctctcaatacttgcaggtcacagggccacagaggctgggcctctaggagcagaggacacggaacagtctatttttttttttatttttttgagacagtgtcttgctctgttgcccaggctggagtgaagtggttccatctcggctcactgcaacctccacctcccgggttcaagctattttcctgcctcagcctcccgagtagctggaactacaggcgcctgccatcatgccagttaattgttttgcatttttagtagagacgggggtttcaccatgctggccaggctggtcttgaactcctgagctcaagtgatgcggcctcctaggcctcccaaagtgctgggattacaggtgtgagccaccgtgccctgccttaaaaacccatttctaaattccaaagagtaacttctattagtgcactcttattaagagaggtaaagcaaaaggaactataaaagcaactataattgaagtctatttgagacatggctcagtatttcaatgaaaatgtaacacagtcaatgaaatactatctcaaatgtagttgtgcaaattaaggaatagttggtagtagctgcatttacaaattcaagagtgaaacgtgcataattcgtgcaacccaaagtttgggacagagagatatgagaagccaaagtgactagtgcactgacagttttgcttcggaaaggcttggggttggacatcttacatctttacatacatatataacccttaccacgatcctacgctacgcgaaccaacatcatctccatagtaataactaatatgtatctggccttcgccacatgcaaacttcacatacatatgtcagtgaggtcggtcctattatttacctcactttacaaatgaagcaacggaggcgcgaagaagctattaataggtaacttgttcaaagtcacatagcccctaagtggtggggcaaggattctgagtgtctgactttctcacttcggaacttacacttttaaacattaagctgtccttgttgggatctgtatcgcctagcctttgaccgggcattgcaaatagaagtcatcaatgaatgagaccacaaatgcatgcagggaacaataacaaaagatgaaaacagaacaggcagaacaggagttcgagactagcctggccaacatggcgaaaccccgtctctactaaaaatacaaaaattagcagggcgtggtggtgggcgcctgtaatcccaactactggggaggccgaggcaggagaatcgcttgaacctgggagatggaggctgcagtgagccgagatcgcgccattgcactccggcctgggcgaaagagcgagactccatctcaaaaacaaaacaaaagggcagaacaaaaacgtagttacttgaaggggtcactcaccccggacccgaccgtgccacagccccgacgccacgcatgtctaggaccagctgaggacgcggcctctcggcggtaaccttggtaaccagccagcgcgccgctggccctccggaagtcagactccgccgggctgagccgagctacgccagcgccgactggcgtcgtggaggagtctgcgcagaggagacacctgatccggtgggagacggccaggggagcgcgcgcggattggctggagccgacgggggacggctgggcggggcgcggactgggggaccgcagtcccggggagcgcaccggaagttctcgcctggcccaggcgcggggtccaagatggtggcgctaggagccgcgacccagtgatagcggccgtggaggggcccccgaccgagcgggaggttgggggtagcctggaggtgagaccccgctgcgttcacagagctggcggccgcggcgcctgcgtccaccggcaagcgaggagtggagcagagctcatatgcctatggggagaggcctgggggaccgcaggaggatgtaggcgccgggtgcgcatgactgggccttcttgctctcggtcggcttcttggtctcggcgtgccccattcccggccctgtcccgctactcttgcctgttccagttccctcctgtgggtaccgctaacggcatcttcccgaggcccagaatccaccgtcaggcataaattgattattcctcgcccacatctgtgccaggtatatttgtatatgtaaccaaatctggtttttgcatcccacgagtgaccccgctggggaggctagactaagccacaggaatgaactgtattgttcatatatgttctactactcagtctaaaatattaggactgttagagttcaaacaagggagggatttaggtgggctggtctctttgtaagggtctacattgcttttaggagcagcttctattgtgaccaagcgagttacagagaaacgccacactttgagacaaattaaagagtccttattagccggcaaccgagaggcagctagcgcccaaaattttctcggccctgaggaaggggctagttttgtttttataccgtggtctaaataggggaggggggattttagctgaagcaatttttacagaagcagaactggcaaaaagttgaaaaattaattggttacaaatgcagttacaaaatataaacagttccaattgcacgggcttaaactatcacaaagagataaatgcaggggttttgcttgccatccaccgagcgcgtccccaggagctgctggtgcagcttgcctcaatatcttatcagtaggtgcattcctggacgtgctttgagtcagtttacactagctatgccttaagggagggaggtgaaagggggctgccagtggagaaactaaaatggagtctgtccggctctctctctgctaggagagagtcactcaggttaaaacaaagtagggtatcacacttcaaaagtcatttcttttgggaagccttcccggattgccaccgcagcgcttttagcatctaattcataggctcttactaccttgtttcatgtgtgagtcttcctctaggcatagattctttgtttagcttcacctaatgcgtgcccatgaatgtgaattaaaaaggattgacatagttaaaagatactaagaactgggcatgaaatagtggcatttcttaagttaaaaaatagtggcccctaggccagctttgagtgtagacacattttcttggctcatgctgtttgtttttatttgaattaatggccaacttccttttttttcttaagacagagtctcgctctgtcaacagactagagtgcagtggtgcgatctcggctcactgcaacctccgcctcccaggttcaagcgattctcctgcctcagccttccgagtagctgggactacaggcatgtgccaccacgcccagctaattttgtatttttagtagacacaggatttctctccatgttggtcaggctggtctcgaactcccaacctctggtactctgcctgcctcagcctcccaaagtgctggaattacaggtgtgagccactgcgcccggcct

SEQ ID NO: 1886942 - DNA, 4001 bp, Homo sapiens
gatggggtcttgtttttctgcctaggctgatcttgaactcctgggctcaagcaatcctcccatctcagcctcccaaagtgttgggattataggtgtgagccaccacgcccggatggagcatcccctctctacagctgctgacacccctctctgttccctggggctcttctcccccaggcccattacagactgagcagaatcctcccagctgtgctcactcttccctctgcctctgtagacaagcacttagccctctttagccgtgaagaaggagccacaactaacaaaattaggcagaggtaaacattacttaaaaccaaaggtcctggtctactgacttttggactctgggatggtactgctggtggtgctgccggcagctcacatttactgggtgtttcctatgttccaagcacattttaggagatttacttgtatcgtcatctatggggtgggtgctgttgctacctctaccctacacaggaggccactgaggcacagcgcaatagggaactgtatgtttttgtatttttagtacagatagagttttgccatattgccaaggctgctctcgaactcctggtctcaagtgacccgtccgactcagtctcccaaactgctgggattacaggcatgagccaccgtgcccagcctgatctttaaattttttctgtagagatggggtctcactatgttgcccaagctgagatttcttaaaaagggacagcataaaatgacatggggtttagcatcagtaggtttgagttcaaccttaagcttccataattcttgtcaggaaccttaagcaagtcaattaaccaccctgagtttgagtttcttaatctaaaaaaaccagagaactggaagattagtgtggcaatgcatctgaaaatattctgtaaaccagagtgctggacaaatgctaatctattattgaattcagcacttcatttcagcggagctaggaattccatatttggagccaccttgacaggagatgtctgaaaaagctgcttccggtggcatgccttttgggctccgtggacagccattgctgaataaaacttaatgacgccatagaaaccagaatgggccactgcagcatttgggaagacccggactgaatacaaaaggtcaaactgggaaaatgctgtgaacagtgaaagctgtgggggtggtcctacgccaaataagcgcatgaaatctcacgcccagaaaacaaaaccgcccatgccttcatattccccaaacgcttcttcgagaaggatgcaattcaaaacacttcccacttaaccaacaagttttcttcttaagatcctaaacttgaagaagtcctagaaggtaaaatgtgctgactggagaggtacctctccgggactctaaaaatctgtttggggtagctgtctgctggggtcccctctagaattaagagtccttcagcgggccaggcgcggtggctcacgcctgtaatcccagcactttgggaagccacggcgggcggatcacctgaggtcaggagttcgagaccagcctggccaacaaggtgaaacccccgcctctactaaaatacaaaattagccaggtgtggtggcgggcacctgtaatcccagctactccggaggccgagtcaggagaatcgcttgaacccgggaggcggatgctgcagtgggcagagatcgcgccactgcactacagcctgggcaacagagcaacagtgtgtctcaaaaaaaaaaaaaaaaaaaaaaaagagtccttcagcagaggctgaggcaggtgaggtgctgaagcaggactctggaactcccagttagcaggtgggcggctttctccatccctccctccaccctggcccaggctcacatgcaaagcgtcggccgtgggtccagagctcagctcccacactagcaaggttttgtcactcttggtgggaaccgcaaaaggtagcagatccgccagcctcccttcgctgagcctgcgcggctaaggctcgcgcagtactgcgcctgcgcaaggcacgcccacgctttttttaaaaaaagaggcgcaggcgaggggaggggcggcgcccggatcgctccctcgcccctcctacctggggccggcctctgagcctgttcctgtcctccagccacaccgccacgatccctgagtttagaacttccattcaagtgcatgtttagggtacagtcccaaaatggcctgacagcatgaaagggtagggacatatttatagcagccagtttcatcttcactcctgctggagattagggtactaagtattagcactacctactgagcttgtgggaaataaccatgaaagatgcaatcttttgacttaagaggtttttttttaaggagtttaacatattcaaataaaagtataactcactaagctattaacagtctagcatgaaatccttaaaaagaatttcctagttgtcctacgtgattctggggaattgtgtacgtgaacttgtggaggtcagatgatgtgggagatgggaggtttgaatgagaagtagagatcaattttgaaaaaaaaaaaaaaattcaaagaataggtccaaattggagctgatagtgtctgagaggggtaggtgtcataatcagctacgtggtagagcagtgtaatcacctgatgggttcattgtacccactgcccagaaaagccgatttactgagacagcattattgaaatagagaaagagtttaataagcacagaactagctaaatagaagactggagttttattattactcaaatcagcctccctgaaaatttggaagctagggttttttaaggatagtttggcaggctgggggctagggagtgggaaatgctgattggttgggtcaaggatgaaatcatagggtgtcaaaacttgtgttcttgtgctgagtgaattcctggttgggggccacaagaccagatgagccagtttgccaatctgagtggtcccagctggtccatcagaatacagggtctgaaaaatacctagaacgccaatcttaggttttttttttttttttttttgagacggagtgttgctctgttgcccaggctggagtgcagtggcgcaatcttggctcactgcaagctccgcctcccgggttcagccattctcctgcctcagcctccccagcagctgggactacaggcacacaccaccacgcccggctaatttttgtatttttagtagagacggggtttctctgtgttagccaggatggtctcgatctcctgaacttgtgatccacccgcctcggcctcccaaagtgctgggattacaggcatgagccaccgcgcccggcccttaggttttacaatagtaatattgaaaggagttagttagcttgccttaggtagataacaagggaagggtccccagagagctcccggcccacaggtcagtgcctcatccccacacaacagaaaaagcagcctgggaaaacattcaagctgcaggcacccataagggaacaggcacagggtgttgtgcctggagacatgcccacggctgcacagatagaaaaacctcaggtccatttggataaaaacttcaacaaacttccatctcactcacataaaggaacaagacctggcatagaaatgtctttgtcctttgtatagtcagcggcctcccaggacaaagtttcttctccttttgtgggcgtggctacagtgggctccagtgggttccagtggacactctactttcctttttggactataagtttggcctctgtgaattatcacttcagcccttgataggtccggggccaagctttcacttcagctcctgataggtcctgggccaagctaagcagcatctaggaatcatcatttcagctcgtgattggtcctgggccaagctaagcagcatctaggaatcatcatttcagctcctgagtggtcctggggcaactaaccacattccttccccttcccagtctttaaaaaccctggacatcagcctcataggggcacccgtgtgggactc

SEQ ID NO: 1886943 - DNA, 4001 bp, Homo sapiens
aagatttctcacaccctcccattgtccttgtgggggcacctcacccccgatcctaacaacatcctgcagcctggcttggcaattccagcactgctcagctctccctccgtgcacagaggtgtgtgtgcaggtggggagcaggcacccgcccagcttcactctgcacctcaaagtcagcacaaacgttgctgtcaaaaggggagctcaggccctggggggacaaagagaaacctgcaagctgagtggggcaggtttggggggcttggaggcacagacttctatggctcatcccaagggggctgaaaaccaagaggagcttggccctgcacaggagctttcctcaaagccaggcccatcttccatgccctacacccctcaatccccaattgattgctagtgcttgaggctgggctggaggggccctggccccctctttgcatgttccctggctgattcccacccagaagcagggtctctgcatctcagtgtcctcctccttcctctagatcctagactggaacctccttggtcatgggggaatcggggtctaaggagtctgcggggggaagtactgtcccgccgccccaccccgtcccactccccccgcccttctccttgccctttctgttgctattgcctgcgttggtttgcatgccgttttgcttgtggtctccatagcaacaactaccaaatggcctatggataatagggggactctcggggtgggaggggatcccgatgaggcatttgactttaaaaaatggaaacggtgattctgccgcaggcctggcacggatggtcacccttctctgcccatcatcactcaagcccctcagtccccctcacccaagggcctgcctccaccttggctgggggagggcagggaggccgcaacctgcaagaacaatggaaaggccggagggaagctgaggggccagagagggacaggagcatggagggcagccaggagcctctgcaactatctccatctcatggtaaaaatctctagtcagagtcttctctgttgtccagcttcgtttcgtgtctcaccacttccttccacccttcccagaatccctttctctctctctctctctctctctctctctctctctcacacacacacacacacacacacacacacacacacacacacagaagcgttgcttcatgtcttggggcctggcttctaggtccaatgtcctgggaaataagtctctaattgtttccatgtgtcccgccctgagctgtttacaacaggcattcatagccctggacctcgagccctggtgaggccacagggtcagcacagggatggttcccatttgaagatgaccaaactgatgtgaagggcagagggagggacccaggcctcccccagccccgagtgtcttccacagtgagctggaaacctgttctcaagtctaaatattttacattttatctggactagactttccccattttatttattttcaaagcattttcccagatagtgtctcttgtctattcccacggctccgtgagttcaggagatcgaccctggacggggctcctgcccacgcctcggactctgcaatccttggcagcgacaaccggagagcatggtgagagtgtggtggggagaatatgccataaaaaacagaagacagaaaccaaacacattgcctggggagcaggaacaaaccccgatcgttccctcaacagatgaaacatctgaagcccagagagcttaggcagttttcctgagcatgtctggacacacacacacacacacacacacagagcttccattagcaacagatgtcacaaaaggacaggcgccacctgacgataatctttctactcaccactgtcccctgtaggaaggattctccaggcttttcacagtcaggctagttgttaaaatgtttacattcatggggtgggagaagacctggtcaggtttcaaggtgcgggcagagtgggcctacccatcaagagtggtacacagcgtgctgaatgaagcccagctgggcttaggttagggcaggggaagcccagacccagccctctgcctgttttgtaaatggcatcattggagcacagccatgcccatttgtttgtgtacagtacactgctgcttgcaagctgcaacagcagtgtggctcacaaagcctacaagatttactatctgtccctttaagacaaagtttgctgaccccttgtttaagggattaatcccaagaatgttctcaggttcattttttttctttcccatgcaacagagtcatatggtcatccaattcctatctgtcaatcactattgtaagggaaccatttatttaaggacagttgattgaacccctgttatgtgttaagcacccgaacaacccaaaacacacatagaaggaacacgacgtccctcaaggggctcacaaaatcccaagtgatggtagccaaacacaggcacagggtacaacaaggacgatggtgactgatccagcgtaggctggggctgcagtggtaaaggtggagaaaggctggagaagttagggactgttttctgctgaaggagacaacttactaagttttaaagagccactagctcatgtcagagaaggatctgaagccatatgatttggaaagaacatgagtgcattcggttttgggtatgtggagtttggggtgctggtgacatacccgggtggagatgattcaaatgttttgttatgtgtaggggtccagaattcaggagagagagaatctgggctggagatgtagagttaggggtatatagttggtgtggtagggatgctgccttcttggtgataaaagccttaaccaagaggtagaaataattttctcttcctgtgagcaattctaacagcttgcctttactgctctaaagatattatggcactttgcatttcaatttgtatgtagttggtatctctctccattgaactgtaaacaacagagactttggccatgatggagtaagcatttattattccaccctaaataactaaaaatagaccaactatatacaacaattttcagacattggaccgcaggtgtcacagaagtgtaatctctgacagaggagaagcaaatgaggtgagacccacaagtgccccagctgacaacctggagagagtttccacgccaccatacaggtaagtggaaaccacacagtgttcagtggcttcactgaattaaggagatagtgtttagggtgtggggaggccaaggcagctaacatttgtagggcagagccctggagaggagagagctgcacacagaaagagaggactctagagatctgcagacgactcacttaaggccttcggctgaatattgatcagtgcatgcatatgagaaaattactaaggctgtggaaaaggaaagtagcagatagaagaaccccaggagctcacaaaggctggagaatatcttacatgcccaacagccagtggaaagacctcctcacccaggaaataccaagcagagtcctcagaaaggcattgcttcagaagagggactaaattagccctagactaaaggttgttctaaacgtgtgaaacaaagcttaaaagtaatacttgaagaaaaatcagattgtttccaagtaacttaactatgaactagaaaaagagtacgaatatatttaaaggaataattagaggaattaacaatgtctggcatccaattaaaaattagcagacatgcaaagaagcaggaactaggctctacagccagaagaaaagcagttcatagaaacaaaccagtaaatgacaaagatcataagtttagtacacaagggccttaaagcaactattataaaaataatgtatatgttcaagaaagtagaggtaaacataaacatgatgagagaaatagaagataacatatatattttaaatctaaataaaacttttaaaagtaaaaagaaaactgagatgaaaaatattgtggatgggatcaacaacagattagacacagaagaagaaggaatagtt

SEQ ID NO: 1886944 - DNA, 4001 bp, Homo sapiens
agaaggtccagggctctccccatgagagaatcagagggaatgcaggacgtggtctatggtgagccaacgacacagtgagaaggagcaggaagttgctgtttctcctctgaccagcccacactccaaaggaaacagacgccatcctacacctatcagccctgcctgccaggagaacagaacacactcctggtctggatggggctgctgcttgagtgcagagggctgcggtaggccctttgcaggagtcaggtccctacacttggcctgtttttccaacctatttaatagacattaaagctaaacacacattccttatcttactccatctcccctggcacatctgcctactcacaaagtatgagggaaaggactcctgccttcctcaaatcccatgttctccatagcggcagcccttggcagctctgcttctagtgctgggggagactccaggctgagccagtcactttctgggccccgtgcccagaccttcgtgtctgcagacacaccaccacccaggctgtcctctcccaggaccgggctggtcatggccgtggggctccatggaaagcagatcccagcgcccgtgcaggaagtggatgggccatgctgtgggcaggcgtgggtgaaggtgcagcctctccccagtctacctcactgactcctctttcacccagagctgggtcagccttgctgggtgaggagctatcagcaggacaggtggcatcagcgcccactgcctgctcctcagtgcagagcatgctgcgggtgcatcctcccctgtagccccagaagggccgtggctctgaagcagcccactgatggggatggcagaaggaaggggcgggcacgtagcctggtgagggcacagctggtgcctggggtgttaccagagcagagggacacccacaggcggagaggcagaggagaaaccagttccaggctgaggggaggtctccagaacatgacctccacccttccctccatctgcccggcctgtagggttgctccgacctgggaagccctccattctgcctccctctccagccttggaaagaggcacccactgggagccggcgctggccctggccctggcgtgtgggtcctgggctcctcctcgcaccatccttccctgcctctggtctgggattttggggtctgtctgggccctgaatgctggggcttcctggctctgggctgctggttcccaaggtccaggctgcggcgggggccacgaggatgcagctgcctgaatgcattttttatgaaattccgttaaagtttcttctcttcatctttcctgcccattggtttcttttgctgcagctgagcgttctcttcctcctccgttttcggtgaccactttggcggttcttttaaaaggaggcgagaacgcgggcagcgccggcagcgctcctcccggtcgcgcggcaggagcggcggcagttcttcccccacttctaggtgccctcctgtcacccagggcagacgccgggcggtggggtccgcgccacttcaggggcattcgcaacaaccgacggccgcgagttgccaatggggcccctttctcggggctgcccctatgacctgaaactcgcttcgcccatgtcctccttggagcgggagagggttgtggctggccccggccctgcagcccctgccttctctacctgggttgggggagcggggaaagtggtgcgaccagggctgatgctgttcctcctgccaccaggtccccaccacgcgctctgcaggctcttcccacgccgcgcagcccagcggtgtctcccggcccagtgcacctgagctccggggagggctgggtgcggggccacgcgcaagatcgaggtgccggcgggtccggcgtgggcccggacacggcccaggcgcaccgggtgaaggggtgacgagccaagcgagttccgcttgcggctgggtggcagcgtcgcagggtcccacgcaggcggcgcggcttccggggcggcctggaggccagggcagtgccccgggggcccggcaggtggcgcgggcgagccgacccttccccggcgccgcgcgaggagatgagctcacggcgggccccgcagcgccggacgctggttgcgcgctcccaggcgccgagcggccccgggcacgcgcgcgcgccaccggcccggcaggtgggtcccggctcccacgccgcctctcccgcccgcgggaccctgggccgtgggctccgcagcccgccctgtgcctccgggaggggcgttccgggcgcggggggaacggccgagggctggagaccctaaaggcgcctcctacggccagaggggagcctccggcgggagccacctctccggggcgcatcatcctgccccccagtaagaggaaggctccagaatggagctcaggaattaggagtctcgagtgcgtagggccgggttactgccactcgggagccgatccgaccagcctgtcccagggagaagctggcacgggtctggggagttcaggctgctcccggcaggggcggcggacagggcgcctgcgtccccacccacgcaggccggccccatccgggggatgcagcggcgggtgttgagaccgaaggactcggcgaaagccagaaagagagggttggggagaggggctcggagacctgctggggacagagtcgcaccgcttggagttcccagcctggccctcacccggcatcttcctgggccagcaacgtcaggccggtttatttaagcaactgtaacgtccgcccgcacacaccctgccccagtctactcctgcctcctgctgggactggagggtgggcgctttcctgcttcagcttctcgctcttgtgtaatcccacaagcgagggatttctaaactgagcagcaggtgcctggctgatgcccagtccccaccagaagccaagcctggtgggccttcagccaaccaccgcacgccacggaccgcccaggagtccctgtcccgagcgcgccgtcagccccgtccagggcctgcaggacggaacccgccctgcgctccacacctgaggccgctcccttcgcctcttctcctcaggtgctgtccttattcccagcccagtcaagagctaccggggctggctagtcatgggggagcccagtagagaggagtataaaatccagtcctttgatgcagagacccagcagctgctgaagacagcactcaaaggtgagcacgggacccctcctgagctggggtcaggagctacagagaagggcccctgtgggcagcaccagaggctgagcctggtgaatgcctccacccctcccctcattctctgacgataggagtcggcaacgtaattcttgaactggaagacaagctacattgaggccattattttggagtatgaatcacagtcacctctcagactgtaaagactgttttaaaagtttaaccatagggctaggcgcagtggctcatgtctgtagttccagcactttggaaagccaaggtgggcagattgcttgagtccaggagttcaagaccagtcccggaaacatggtgtaaaccccatctctacaaaaaaaaaaaaaaaaagaaagaaaagaaaaattagccgggcatagtggcaggcacctgtggtcccagctacttaagatgctgaggtgggaggattgattgagcctgggagggtgagggtgccatgagccatgatcctgccactgcactccagcctggctacagagcgagaccctgtctcaaaaaaaaaaaaaaaaaaaaaaaaaaaaaagtttaaccataaaaaaaagaacacggctcctgcccttgaagcgcttacatttgaattgctggtttctgtgctgccatagccccgtctcttgaatgcacagttgcctgctttgagacagaagatggagaatattccgtttgccagaggagctatagtaattgctctcgcctgatgccttcccgctgtaacacgcagtacagaggtttgtcttcaactaataattagcaacacccatcatgtgtcaagccga

SEQ ID NO: 1886945 - DNA, 4001 bp, Homo sapiens
ttcaccatgttggccaggttgggttcgaactcctgacctcgtgatacccctgccttggcctcccaaagtgctgggattacaggcgtgagccactgctcctggcgagaaaaagatacttaagtaatttcagactgcacacccttagtagcctatatgtaagcacacaaaaaaattgcaaagaaatattaaatcaaacttagtaggtttgtagctggaaatactattggtattataattttcattacgcatatattgtacaactgaacaaatgaatgcatttatttatgttgttaccagagttctcactgtagaaaaaacggagatccaaatatgacctgaaagaagaatgtggccaggcgcggtggctcacgcctgtaatcccagcactttgggaggccgaggcgggtagattacaaggtcaggagttcaagaccagcctggccaagatgatgaaactccgcgtctactaaaaatacaaaaattagccaggcgtgggggcaggcacctgtaatcccagctactcaggaggcggaggcagagacttgcctgaacccaggaggtggaggctgcagtgatccgagatcacaccactgcactccagcctggggtacagatcgagactccacctcaaaaataaaaaaataaaaataaagaagtagaacgctatggaattcgactagaattagggctaacaatatgaagcactttgggaagccaaggcaggtgggtcaccatgttggccagtagtttgagaccagcctacccaacatggtgaaacctcatctctactacagatacaaaaattagccaggtgtggtggtgcgcacctgtactcccagttacttcagaggctgaggcacgagaatcatggaacctgggaagcagaggttgcagtgagctgaggcagcctggggtccaaggctgtggtgagccacgatcacgccactgcactcaagcctgggcaacagaggaagaccctgtctccaaaaaaaaaaaaaaaaaaaagggggggggggccaggtgcagtggctctcacctgtaatcccagcactttgggatgctgaggcagacagatcatgaggtcaggagttcaagaccagcctggccaacacagtaaaactccatctctactaaaaatacaaaaatcagccaggtgtggtggcatgcgcctgtaatcccagctactcaggaggttgaggcaggagaattgcttgaacctgggaggcggaggttgcagggagctaagactacatcattgcactccagcctgggcaacagagtgaaccgctatctcaaaaaaaaaaaaaaatttaaaaagggagtatagggccaggcgcgatggctcatgcctgtaatcccagcactttgggaggccgaggtggctggatcacagggtcaagagatcgagaccttcctggccaacatggtgagaccccatctctactaaaaacacaaaaaattagttgggcgcggtggcgcatgcctgtagtcccagctactctggaggctgagacaggaggattgcttgaacccgggaggcggaagttgcagtgagctgagatcacaccactgcactccagcctggtgacaaagcgagacttcatctcaaaaaaaaaaaaaaaaaaaaaaggagcataaaaaaatctttacagaagaatgacaatatagaaaaaatgcagaaaaaatagaaaagtctccattttataatcatagtaatatttgatttggcaagaggcaatccagataaaaccattaagtaaagattattatgggacagaatattcacactgtttctatcattccatagatcacttgttaattacaaaaggaaaaggaggtcgggaaaggaggctcatgtctgtaatcccaacactttgggaggccgaggagggcggatcaccttaggtcaggagtttgagaccagcgtggtcaacacggcaaaaccccgtctctactataattacaaaaattaggcaggcacctgtaatcccagctacttgtgggcctgaggcagaagaattgcttgaacccagcagatggaggttgcagtgagctaagattgcgccactgcacttcagcccgggtgacagagtgagactcctcctaaaaaaaaaaaaaaaagcccttaggagatatatagaagaaattaggggtgaagtgctatgaaatctgcagttaactctcaaattgtacagcaagaaaatttattaaagttaaaaaagtgaatattcatagatatacatatatgtgggtgcaggtagaaagggagggacacacagacaaagaaaatatggcaaaatggtatcaactggtgatcaccaacctatccttggaactcttagaaaagtttttaaaaatttcaaaagtatattatttttgaactgctcaggaggtttaaatttttgaatttttaaaataagcaatcaattgtgaggaagtctgagaagccacagactaagagataagatgaaaaacaaggaaagtagaatcacagtaatgaaaggaatagagtttcaaaatgctgtggtcagtagcttcaatgcaaaagaaagttaaattaaggacgaactcagtaacgacaactggattcagcaactgggaagtcagtgatgacctagggtacaggagcttcattgaaatagtacagttgggccacggcacgtggcccacacctataatccagcagtttgggaagccgaggtaggtggatctcttgaggccaggaattcaagaccagcctacccaacgtggtgaaaccccatctctactaaaaatacaaaaattaaccagatatagtggcacgcccctgtaatcccagctactcagggagctgaggtatgagaactgcttgaacctggaaggcagtgagccgagacagggccactgcactccagcctgggtgacagggcaagactgtctaaaaaccaaaaaatagcccaggcgtggtggctcatgcctgtaatctcagcactttgggaggctgaggcagttggatcacaaggtcaggagatcgagaccaacctggctaacacagtgaaaccccgtctctactaaaaatacaaaaaattagctgggcgtggtggtgggcgcctgtggtcccacctccttgggaggctgaggcaggagaatgacatgaacccgggaggtggagattgcagtgagctgagatcacgccactgcactccagcctgggcaacaaagcaagaccccctctcaaaaaaaaaaaaaaaaggaagtaaactgggtatctgcctttagaggtgttgtacgttttcagcattataaatgaatagagatgagtggcaatagttacttggtacatagatttttggtatcttaactagttttggatctcttccactaaagggactgcctgttgaacgttgttaggaatgtaagtactgaaggcaaactgcctgggtttgaattttgttctgtcccttgcaccctgcctggcttcaaatcctagctctgcttattaagttcttttaaggggatgatctttgagcaaacgtcttagcttctgttttcccaagtaaatggacacaatagttgctaccttgtgaaagattcatgtaattgaccagtgtttaccaagtagcatcagtgttcagtttcagtcattggtgattcagcagttggactgtgatggggtgttggggtgggggtggtgtgtgtgtgtgtgtagcacttaattgcacacagaaaggaaaagatacttttgatgaccgagaggcagcttttctctgcttttgtgtcaaaagggaggaagggagtttggagagggaaaccaattctgttcaatactaagctctcttcctcaaaatcagaggtacatagaatgtgtaataacttacagaatttctagacttcaacaatctgaattttttaaaattcatttttattttttcaggttgagactgagctaaagttaatctgtggcgacattctgaatgtactggacaaacaccttattccagcagctaacactgccaagtcca

SEQ ID NO: 1886946 - DNA, 4001 bp, Homo sapiens
gaattagggtttccctccaggcccccttggaaccctatacatagcactctatcctaacactttaaaattgcaaattgcctgctaaacatgagagattaacaacaataatgatctatctactcttgcctctcccccagacctctccactgcagctagctcaagggcatcactctctctgcctttcaagccattaggaaccccatttcccattcattcatgaggcactgctcaggtgcccactgtgtcgcgttgttttccttccggcagcactggggaagcatggaggaaggaagcagtgtagataggattcttccaagggtgagagggaagcaggtgaaagcatcagaggtgctcagcaaaagcccagccacccccatccagggtgcaaatgggtgcagggaaggctggaggcagaggggtggacctaaagtgctcagttctgcccccttcactgagcacctggtgtgtgcagggcatggctggggagaggggtgaggaatatggagaggtgcacctgaatggcagacacatcacctctagcacagctgttagtgtgcttggtacacagagtttactgtgtcttggatctgtcttcccacgctgggagtagctggagggcccaaggttgggtacagttgttgtcaaacctcagccaaacctagtggtcacttttctgtctctcccttgccaggtcactctgctgtggctcattcccctcttcctgacactccccacacccagatctagaggccaccttcatcagcatcacctgggtaggggcaggagcttatataatatgtagtcctcggttcctgtctaccaactaaggctccctggggatgggaccccagaatctgcatgatgcacactccgcactgtgtccactctgcttggcaccttgagcgtgagaaccccacttctccagtggcttcgggatcagccccacctgtcctcctagcccctggctccctgttcctccctggaatcctctgggggttcttttcctctgaccaccttaccttaaatgccagggtgcccagtgctcctctggcaccctccatacctctagcaccccaggctagactttctcctgcccttgggtggccgacagcacccagacttgacatggcgaaagctgaccctcccaccctcaccacagaccccatccctctcctcccatctatggtacccacctcatcaactagccagcctgttgctcaagccagggaactgggtgtcacacctgactccttctctcccttcctgcctcaccacagcaacaaccaaatcctgatcattttgcctcctaaagatgccttcagtctccctgccccccacccccaaaccactgcatttgtctcctaatgatttcctctcctctccctccctctagtccagggaattctccaaaagcttttaaaatgcaaatctaactataatcacagcccccttaaaatccttcaaagattcctcataaacaaagatctcaaccccttgaccctccatcatctggtcccagcctcccctcctcccgctctgtgctccctgaacagcaaactgcttccagttccagcctccagacctttagtcattcagtgccctctgccaggaatagcccttgccagacaggctcttcctcacaactgcagtatcacctcctccaggaagccatctctgaccctctcgcccctgcccccagcttcctcagtgcatccatatgccttccttgttcaaggatctgttattccactcaccatactgagttacaattatcgattttcatgtctctgttccacacttgccgatgagatccttgagggcagggagggtgtcccattcatctctatctcaacccctggcctggcgcctggcacggcggacaggctcggccagtgggtgatggataaatgcggaggggaaacttgaacaaagtgagagccagaaatgaccaagaggggagtaagggcaagcctggcaggaggagcagccggagcaaatgtgtgggaagtggaggagcgagaacttccgtttactgcactcctacgactgcccaccagccattgtgcctgcgctttgtttgcacattttgtctcatttggttcttgcaagaacagatcaggaaacggacatcagagaaccaaagtaacctgcccaaggtcacacagccaggtctggaacagaatctgggactgtctggcctgaaaacctgtgctctttctgctgggccacacagctctcctagggacaggaccttctggaaaccagacaaggagtgggcccagctacgcccctgcctagctgagcgccggaaccagctgcccacactcaggccaacagcttctccctcccagccagaccagaggcttagaggccaaacaaagatttgcctgttcctgcctccccggctttgggggggtctttgactagacatgcacgccaccacccaccccaccccccaccaacaccaagaaagagctgttgcatcttggtatggcccagggtgcctggaaatgcagggggctctgtgatgctgtctgggttttgcagaatctgtctccctcatcgcacttggcccaggctgatattaagattcatctgcattccccgcgcacccgcctggcagatggtgggggaggaggctgggtgcgtgccggggttgcagccacgggaccaagctgggccttggagggccacagagcagagtgcccacccaccgtgctccttgggcccagcccaagctgggaccacttcaaatgatggggtgcctcctcaccttcatagcctccaagggatgccaggacttgacctttcatttttctacagactaaagggaccctggaattccaggagggagacctgaagatatggagtgggggtgatggaggatgggcccccatctttgggaatctcagatcagggtcgtgttcttcctccttgccctggaggtttgcagagaccccactgggacaggagccactctcggcctggtgacccctgtggcatagagagggtaagtagtgaataatgaagggacaggctccaggaaggccttgctcccctcactctccagcttctcaggacctgcccccggccccagaatctagcctggcccctaacagccttttcagcccaggggcccagccaaatacttcctgtcacagtggctggaccgagaaggtccagggattatctcagcccctccaagtaaagtagaagagggaaggagcagacatcataacaaaaggagtgcaggctagacacccagaaggacttccctcagcacaggttttggctcttagaatgggttttttaaaaaaaggatctttcttaattccaggactcctgagttgggggcagggcagccgattcttgctgcccgctcccggggaacgggcgccctgcaaaagaggtggaaacggtagggtccgtatcccctggccaccaccctctcccttcctctccaagagctactccgcccccgcgtgccgtcctctcctggctggagagccggcgtcctaggtccccgggctgcgggccggcaggggaggagttaactccggaggtaccggctgggctcactgtacctgccgccgccgccgccgccgccggtgggagggacgaggaagcgggagccgcctgggcgccaggagcgctctagtctggcggggcgcagcgcagcgcggggagcgggcggccggggctccgcgcggctgggggcgtccgccagggggcgcgccgcgacggggcgggtggagcagcctggtttggggaattagcaccaaggacgggcgcgcgcgcaggtccccagcacatctgggcgagagcggcgccgctggagccgaggggggcgccgagcgcagatctggagcagcagagccacggcgcagctggggcccttcgaggcgctcggggcgcacatctgggacctcgagcgggggccgtgccgcgcgcagctggaccaggggaggggggcggcggctgcacagctggaccgaaggggg

SEQ ID NO: 1886947 - DNA, 4001 bp, Homo sapiens
ccacaccctgggcctggtagttaaagatcgacgcctgacctaatcagtgatgctatctatagattacagacgttatatagaaaagcaccgtgaaaatccctgtcctgttctgttccgttctaattacgggtgcatgcagcccccagtcacgtaccccctgcttgctcaatcaatcacgaccctctcacgcagacccctgaagagttgtgagcccttaaaagggacaggaattgctcactcggggagctcggttgttggagacgtgagtcttgccgaagctcccagctgaataaagcccttctttaactcggtgtctgaggggttttgtctgcggcttgtcctgctacactctggtgggaaagacaccgcagcaggggagcagggtgcgcagggtgcagtgggtgacgctcattcgctgaaaactgaccctgctttcaaagccttgtcagttcccaaagctgtatgaagcctttcctgagcctcaacctctagagtctaatttcatcctctgtattttcccctttgttagtccaaactgcgtcattttgtaagcccctttccattttgtagaccttggtcaaagtgaaacattccacgggggttcgagccatgagaaacagcctgcctcttaacatattctgctgggacaaagcgccaggaacaccacattctgccggaaccacctcatcctgggaacacgttaacatcttcccggacagcaagccatactgcctagatccctcctgcccaggcctatgagtaccccagcctgtaatcgctggtgggctctggcattaagctggcccccgacaggtgtttgcaatacacctgtgttgctgtagagccgcccgcgcgccggcaatctcactgtgcgtcattctttaaccttcaccttcccttcaaaacctaacacccttgacgtttatattcaggctattatatatacatacacacatacacccttctgaatcctcccaggagaatataaaaccatgggttaaactgctacacttcagcttcagtggctgcctttcagtgcttcaaatacaccaacctctttcccaccccgggacctgcacgagaaagctgctccactcacccgccgtgctctttcactcacccttcaggtgtcttcaatatcgcctctcaggcctttcccaaccaccggtttaaagtcggctccccacaaataaatacatattctccctcacagtacttcgcacaacacctggcacagcgagagcactgaaccaacactcattcaatgaggaacacgaggtaagaaccaagaccccccaaggtcgccgtactttgtctggtaggagaagctttctgcccagcaaggtccgacccagatgaaaccccgtccaagtctgcagcacccccgtgagtccagcccgctaaactgtgaagaatttaaatacacgacacctgccctcaaaagcttgagggcacccctgagctgccatcgaggtgggggcgtcaacgacaggcgctcagtaagtgctcctgaggcaactgccgggctgtcctggacctggtgaatcctttcggggttcagcaaaggcggacgctgaccgggccaaggagtgggacctgcagtgctggaccacccttttccaagcgcagaagtgccgtgcccgccggctctcaacagggcaagaggcccctctcgccgtgcagagcgcagcgcttgcggcggggacagcagaggcgggacgggcgtcacggagttcccgggtcctcgcgcggtcacttacctggcctcagctatccgctgaaaaaggggcggacggcctcccgggatccgagccgatatcgcgcgcggcgccgcggggcaacctgaagccgtgtgcgtgcgtgtgcgttcacgcaggggctcacccagcggccacgggcttctgaagacccgggtgggaagtgcggcccgggaaagcgcaagcgtctccatggcaacgagggcggacggcgtcagagcgagtcgcttccggaagtgacgtgcggaaggggtgcccgggacgaagccatggccctggaggcggcgggagggccgccggaggaaacgctgtcactgtggaaacggtaatgctgtcaggcgacgcgcaggaggcgggggccgaggccgggcggcccttcgcggaccctccgagctcatagtcttcaggctgtggaatcggagctgccaccgcccgagactccaaagcaaagcccagtttccggcgcggaagcggagggatctcaggaattgtagtccgcggggtgggcgcggttctcgcttccggccagtttgtctggcctgcgcttgcgcgggtctccgccgcctgggctcctagggactgtggcctcggcggtatgtcccttgctttcccttgaagcgggagaagacccggcagaggcgctctgtccgctgcagccgcgcgggtggaggaggcagagtctgaggtgtgaccccgaccaagtttgacgcttctgtcctcctagggagcaagctcggctgaaggcccacgtcgtagaccgggacaccgaggcgtggcagcgagaccccgccttctcgggtctgcagagggtcgggggcgttgacgtgtccttcgtgaaaggggacagtgtccgcgcttgtgcttccctggtggtgctcagcttccctgagctcgaggtaacctgggaggacgccgagctcgaggcgggcccctcggtgggctcgggcgtgcggtctccgggacagggagcagtgcaagcgtagaacccggcttctcgttttgtaggatgtcattaatagtctggggagttggccgggcgcggtggctcacgcctgcaatcccagcactttgggaggctgaggcgggggaatcacctgaggtcgggagttcgagaccagcctgaccaacatggagaaacccggtctctactaaaaatacaaaattagacgggtgtggtggcatatacctgtaatcccagctactcggaaggctgaggcgggagaatcgcttgaacccgggaggcggaggttgcggtgagccaacatcacgccattgcactccagcctcggcaacaagagcgaaactccatctcaaaaaaaaaaaaaaaaaaaaaaagtctggggagtcttggaagggaaaaaaaggcaaaaattaagggaattctgtgactattaagaatcagctcatgagctttatcttcaagtctgattgttatcttgggttcttcatctcagtgacctgtccaccacgctcccagttgcccaagctggagatctgcatcctcctgggcccctccgttcctctcgcgtccagttgcacactagctcgcttttattctgcctcttaaatgtcgctggaatctgtccccttgtctgtttcccctctgctccttccctggctgtgccaccatcactcctgtgggttcctgagcagcattttcatgggtgccctggctcaaatgttcctcctcagtggtttcttttccatactgccagcagaccaattttcctaaaaagcaagtattttcctcaaaagcaacaagtcccctccctccctccctccctcccttccttccttccttccttcctcccttccttcctctctctgtctctctttccttcctttccccttcccccactctgtgcccaggctgaagtgcagtggcataatcttggctcactgtcaagatctgatctcaacctcctggactcaagtgatcctcccaccttagcctgagtagctaggaccacaggtgtgagccactacacccggcttatttttttattttttgtagagacaggatctcactatgttgcccagggtggtctccagctcctgggctcaagggatcctcctaccttggcctccccaagtgctgagattacaggtgggaaccaccacacccagcccacaagtcctcttagaacattgaagtgcccttctcatgacctcatggtgaataaagttcactctggttggcatggcttcaaggcccgtcatgacctgtcccctgcgtaatttaat

SEQ ID NO: 1886948 - DNA, 4001 bp, Homo sapiens
ccctcccctcctctgttctttttctcaagtggtaaaactgttttggcacacgtgacacaccccttgggcacctacccaagagaagctctcaataatgaagagccatctcgattagtcttaatttagtacctgacccagctgccctcatctcctttgtacttaaatagctcctttcatccaacaagttcaaagctgtctaacaaaataaacccacttattcttgcaccatgacggcacaggcaagcattgtccttcccatttaagggagagagagagaaggtgagtcattcagtggttaagggattctgctggtgacataaagtgagtcagtggggccccagggtgattgacctgtgtttcttaagttcacatccagtgctctctcatttctaattaaaagattagctttgatgagacagtacatgtgtgtgtgtgcacgcacatctgtgtgtttgtcgtgtgtgaagagtttccctggaaaccacagaggtcatcattaccatcaccatcaccagaatcatcatcatcatcatcatcaaatcatatagcttcaccatcatcatcattgtcatagaaccatatatccatcaagctcttactatgagccaggcgctggtctaaattatagctacagtcatatgggtaaactcatttaatcattacaacaatcctagaaagccaatgctatggttttctcattttgcagacaagtagccaagactcagagaggctaagtaacatgcccaaggtcacacagctattaggtggtgaagccaggattcagatccaagcagcctgcctccagcaactgtgctcttaactactgtgctttacagaggccaagtctcagattttgtcaaaaggatgatagaatcataatgaccccattgttttgattcctttccttgaaggaaatgagtatgtttatgttagaagaaacgtttctgagaatttatgccacaaagggtggtacaaggaataaaagtcctttagtatctcacaggatcttgaagcttgaggactctggcaattttaataaactaggagttgacaaagaagctcaactcacttcctgccattttaaaaccaccttgtctattgagaaagaggaggagggaaacagaatccctatagatgttcattgtttcaccatttacaaaacacttgttaaagtactttgtgttgtatccaaatggaggccccaaacaaccttgagagaggggaacagacatcacaatccccatcgtgcagtgggagaagtacaggtgtagggaggtgaaatgccccctctgcacctcacagcaggtgaggggcagctccacgcactcaaccccaagtcttctcatttctttttccctgctctttccctgttcccaactgtgagggccttgctggaggtacatgtggataaaacttcacgttcagaccactctgaaatcctggatggattttacgggaaaggtatcctagggtctgggatctccctaggggtgaccttctcggtgctgtccccaatcagcattttagactcagcttctggcctttggccattgcctggaggctcccccgtttgatgctggttattgcatccaaacctccctttcccttccttcctccctggttcttggatatcctatacaacctgcctcagtcattcacattggtctccaaggccctctgccctcaggaggtttctctggtctcaagggggcacaactgtgtccactcaccagcaggactgcgtgctccctccgtttccctccaccagccttattcccctttctatttcctctgtcaatttgcttgatttactgtaggtgcttttctttttctgcccacaccacatccctggaatgatttcctatgctgcacctggcaaaagcctctttcatttgctttgaaacttaccttgatgcccatggatcctgtggggatgccacagggctgaagcgatgggccatcaccaccgcctctcctgtggtctccaaagcaacaagaaccagatgccaaaacaattcattaccctgcctggctgaagactagattattaaagggaacaagattctaatgagaacagttctctgaattctgcttatgagtcacttagagagcgaagcacaaaaaactctttgggatcaagtgcataacctgaaatggcttcatcccctcgccgtgtggctgaaaatcatgagctggattggaatgccctgaatggggtttgggtcaggggtgggtgtaggaagaaatggagtgggtaggggaaggagatatttttgggggaaggcccaatcacattacattatgctagctgtggacctgtctgctcagcaggactcagagttcctgggggcagggacatgacatacccccactccccaccatgtcccctgcccctgggactgtgccaagcacacagtagatgttcaacaagtgactaatgcccataatgtcacatgtacagttttctttttatttatttttaatttttagatggggtcttgctgtcgcccaggctggagtgccgaggtgtgatcatggctcactgtaacctcaaattcctgggctcaagcaatcatcctgcctcagcctccagagcatctggaactaaaatgtgctctaccaagcctggctcatttttaaattttattttatttttatttttttagatggagtttcgcttttgttgcccaggctggagtgcaatggcgtgatctccgctcaccgcaacctccgcctcccgggttcaagagattttcctgcctcagcctcccaagtgtctgggattacaggcatgtgccaccacgtccggctaattttgaaactcatttttaattttttttgtagacatggggtcttgctatattgcccaggctagtcttgaactcatgggctcaagtgattctcccacctcagcctcccaaagtgctgagattacagatgcaagccactgcacccagtacccgttttctatttacactgaatacaaacatatttctaaatgcccatcttacaccttctaaatatctcctttccttaacttctggctatttctcatacatattgaggacccatcttggccggaattgttcataaaaagacatttttttcaccagaactatgattcttctgtttagtcatatgctcagcatagagaagctgtctaatcaatgtgttctgaattaaattgaactggataatgaatgtgggtttgatagcccattgactgctcaatttctccttgaatgaaaaaaatttgcaaatattccaactaggaaaccaagagaatacatgaattctacccctcgcctgtgtgaggtcatggggatcttacaaccctggggtcccattttccccactaattcaaggagcaaattcactcaagcccattgagatcttgaaaacactgcaagaaagaggctagattcacaagagatggcagcattgtgtttactcaccagctagtctgtctgtggtccccatcttgaattcttgtgccatttcacattctgcagggcaaccagcaggtagaaaaaggaatatctaggagtaaccagaagataacaggggtttcttgttctctcctacatcttctgtgtggctgctgactggccatgacctgcagccagtgcaggactgactctccctgcttcatttctcctttcttctcttcccacttcttattccttcaggaacaggcagtgtcgctccttttagactttacactgcctgtgtgtagatggcagtatatttctcagccacaaacaatctcaagcttgatcacagaggtgatgcttcggtctggacagcttggaacaatgtcacttctttcagaggcctcagaagctgtagtcctgtgtccatagatcttttatgagtcaactccatttacgccttgcaggacactcagcacggtgggccactcctcagtctattggcttattttgtcttggcttcttctcagctttgcattttccaggttagcccctcggaagctgggctaa

SEQ ID NO: 1886949 - DNA, 4001 bp, Homo sapiens
aagtgatcttcccaactcagcctctcaagtatctgggaccaaatgcatgcaccaccatccccagctaatttttaaaatttttgtagagacggggtcttgccatgttaccctggctagtctcaaactcctggctttaaatgattttcctgccctggcctctcaaaatgctgagattacaagcgtgagttgccacacccagcccaggatgtctatcaataatgcagattccaggcccccatctcacacccactgactcagaatatgtgtgtgcacactcaggatgcatcttaacaagcgcccctgatgattctggtgcacagtgaaggttgagactcgctgggttagagggtgctaatggtttaacggtgattttcaacctgctgggctgcctctatactgttcacatgtgtaacatatgcccatcagtgacatctctcaatatttaatgattcttcactggggaagtgagtgactaacccaaggcaggtgttggaatttccagagaggtttggcaaagccacagtggggagtctgatctcctcctgtttgggtattctgacctctttcccggtggagaagtgttgggagcaggccccccaaaatctagccataaactggccccaaaactggccataaacaaaacctctgcagcactgtgacatgttcataatggccctaacgcctccgctggaaggttgtgggtttaccggaatgagggcaaggaacacccggcccgcccaggacggaaaaccccttaaaggcgttcttaagccacaaacaataccgtgagtgatctgtgccttaagaacatgctcctgctgcagttaaccagcccaacctattcctttaattcagcccgtcccttcgtttcccataagggatacttttagttgatttaacatctatagaaacaatgccaatgactggcttgctgttagtaaatacgtgggtaaatctctgttccgggctctcagctctgaaggctgtgagacccctgatttcccactccacacctctatatttctgtgtgtgtgtctttaattcctctagcgccgctgggttagggtctccccgaccaagctggtctcggcagagaaggaccagttaatggctcttcttagcgtaggtaacgtgtgttgttgaggaaatgccctctgtgcagcacttggctggatgttccttggttggcatcttggctggtgtccatgtgcccggagaagaagggccctctctgacccaggcctaatatgtgtcccccgtttccacccttccctgataaccggaggagatcttgtcctgctgtgctaatagaacgttctctgtattaacagaaaattttaacccaacagaggtgcttggatggaggaaatccaaacaatgttgctggttgatggagaggggcattccaaggtctcttgtccattcatttattcatgaagccacatttcaacaaatatttattgtgcacctgccctgtaacaggccccgagctgtgatctgtagggggctcagtgataaatgaagcccatttttctttagattccagatgatggaggggaagtcaggaagggaggtaggaaccaccactctaggggtcccttgcctccttcttggcatacgctatggcctcggcatggagagcatgatggagcactgatgccagcaagtcagctcaacatttgcaatatagcgtgtggctgcttagaggccaacttgatatattaagtgatattaaaaatgcagcctatttctgataatttatgcgcattctcataaacacattacactcgtcacagtacatttacgagcaccaggcctaccagtggggaaaagttaacacctacctaatgatgttgttttgcagatgtcagatgctctggtgctgcagtgatgggctcaatggtgcaaagaaatgtgagtctttcttctatcctgggacaccagaaggctgcccagggctcggcagaagaaccaggctctctccctccacactgccaaggtctgtgctgtgggattggaaagaggccgggtgagaggctcccctgccaggagagacttagcccaggatcaggttgcctaaggcaagagattagatgtcacagagggataatgctgaatcctctggggaagctctagaaatgacctctgggagaaagaggggcagagcctgaggcttacatcacagcacagatcagcctccctcccacaggcctggggaccactagagcccagggtcttcatgactgaagtgaacatctcagcattatacatgaattagaatgagtagaaactctaactagcccagggctggtggaaacccagggccaacagccacaaatgttccctccaatcgctttgaattcatgatgcaattcaaaggaattaacaatgcaagtggtagctttcaatgataacgtgttccactttttgtgtttgagagagtctcactctgttgcccaggctgaagtgcaatggcacgatctcggttcactgccacctccacctcccgggttcaagcaattttcctgcctcagcctcctgagtagctgggactacaggtgactgccaccatgtttggcgggcgtagttctttgtatttttagtagagatggggtttcaccatgttggccacgctggtcttgaattcctgacctcaggtgatctgcccgcctcagtctcccaaagtgctgggattacaggtgtgaaccaccacacctggcaccccccgccttttttttttttttttttttttttttagagactggaccttgctttgtcacccaggctggaatgccatggagtgatcatggctcactgcagtcttgaactcctgggctcacgtgatcctcccatctcagcctcctcaatagccagaaccacagatatgcaccaccacgtccagttaatctttttatgttttattttttaaagatgggtcttgctatgttgcccaggcttacatgaactgagttttacatttactacaaatgtgtgtacctataaacaatatatggtattgttttgcaagctttaaaactttgtaaaaatggcatcatactatacataacctcattaaactcatttttggcttattattatttgtgaagttttttcctgtagatgcatctagctatagtttgtttttattgctgtctactgttccactatgtgaatacgccataatttatttctcttttctcctattgttgatcatttaagctggttcctatgcgtggctatcatcaacatgctgcaatggctattcctgtttcctggtctgtatatgggatttctttttttgagacagggtctcactctattgcccaggctaaagttcagtcgtaccatctcggctcaccacagcctcaacctccctgggctcaggcgatcctcccacctcagcctcccgagtagctgggactgcaggcacataccaccacatctggctaatttttataatttttgtagagaaagggtttgccaggttgcccaggctagtctgaaactcctgagctcaagtgatcctcccacctcagcctcgcaaagtgctgggattacaggcgtgtgccaccacacctggccagggagagtttctttaagagagtttcttggataggaaatttgctgggcctagggtctgtatatctttaccttgactagagagtgcctagctgctccccaaactggttagaaccacggccattctcaccaaccatctctaacagtgccagttcctccttgtccttgtcaacacttggtattgccagacttgaatttttgctagtctggtaggttttttttatgtttaattagttctccttgctaactagtgctacttcatttctgctgctaagggtgggcatgtgctgtcaatagataaatgcaacagattaaaaattgaagagcttccatcaataagggattggctaaatacagtatgcctcacctgtacaatagaatactgcacaatcattaacaaagatgagtgtgctgatatggaa

SEQ ID NO: 1886950 - DNA, 4001 bp, Homo sapiens; identical to SEQ ID NO: 1244261

SEQ ID NO: 1886951 - DNA, 4001 bp, Homo sapiens
tgcctgcctgtagttccagctacttgggaggctgagaagggaggatcactggagcccaggaggtcaaggctgcagtgagccgaaatcacgccactgcactccagcctggccaacagagccagactttgtctcaaataataataataataaaataaataattatgtttctacaattgtagtgagaccagcttttctgtatcatgtcaacaattcttctagtgttagcccttaccagcctcagtttccttacctgtaaaacggagataataattgaactagcctgtcgcatgggtgggaagattgattcctgaaagcggctggtgcctggggaggtgggacagggtaagtaaggtggacaatacagggctcattcatgagcagcaacccccgtgggccacctgagttctgtcctactgggagcctctgggagaaacaacatagaacaccctcagaagagccatacccggtggggaggaagcttggtacttttcatcaagcaactgtctttcactatcagttgcaggctgatccagggggcatccactccctggcactctggccacatgtgtggcagtcatgttcctatggccagagaaaaccccctgagcagagaggctcgggcacttacagtagaagtccctgatgttgggtgggatgtcaacaccatctgatgccattcacctgcagctctgccattggctggctgagggagcttggctcctctagaaagatgtatttggccgggcgcagtgactcatgcctgtaatcccagcactttgggaggccgaagggggctgatcacttgaggtcaggagttcgagatcagcctggccaacatagtgaaaccccgcctctactaaaaatataaaaattagccaggtgtgatggtgcgcacctgtaatcccagctactcgggaggctgagacaggagaatcgcttgaacctgggaggtggaggttgcagagagccaagatcgcaccactgcactccagcctggacaagagagtgagactgtctcaaaaaaaaaaaaaaaaaagtagatatatttgactgggggcaccctaaggtaccttgtggtgggcccagtcctccatcagcccacatcccccaaggctgggcactgttaagctgcccttgggtgggccatttagcctcaagggactttgagggcaggggccatgctcgttttgctcatcactgtgtccctggtacctcgagcagtgcccagcagatgccagcctccaagtccacattggctgcctggctgacagcacgtggtgcagaatgaggttatggcaaaggaaaccctgacattcagcctcaaacccggccccaggaccccaagcaatggaagaccatgaccactgcctttgcatctgtgagtaggttgtggtgtaagatacgttttaagatctatgtatgtaagataacgtttttaactttcaaatatcacacttcggatgcagaaagggcaacttataggagctttaaattcgtaggtggttgtctgggttaccttatatgactcggatctggggtgggctgcctgcactgcagtccgtggatctctgtctcagtctccaggcccaggacgcagcttggaaacctaaacggaattgtctttatcacaactcacaccagtcacttaatgaaatcgagctgcacaaatcgacccaaaggggtgccctccactcctgccccacgtgtcctcggacgcttcccagatgtggtccccggcactccagggcccaggtaaggggccagggttaccttttggagaaatgccatcctcagcctgtactgccggccttggtaccggattgtcatctcctggcgcctggatggattcacggccagagcaccagtgggagacaagaggagaagcccccaagttcgaaaggcagcctggctcgccccagccctgggtggtcgacggggaggcggctgggcggggagggcgcgggccgggcctccctgaccctcactaggcgcctccaacttggaaagcagctggaatccgcgccagccaatccgcgagcgacgacgcgggctcattagcatgcgctgcgcgggcgtccacctgccgccaggtggcgctgtccggcccccgccgggaccccgccgagcggcaggtgagacccgcagggcagggccccggggggcggaggggtacggggggaaaaggaggagggagaggaggaggtggagggagagggggtggaggaggaggtggaggtggacgaggaggaggaggagctgccgggaggagggagaggaggatgtgtggcagagggcgagccttagaccgcaccactaaggcctggggaagtgaaaacagatgcaacacgctttggctccctggctagccagccccaagtcattgaatggcactaagcaaattattcgggttttgccattaaaatggcaaagccacaattacttttgctccaacctaatatttaaactttatcagcgtcagttaccccatctaacccgagaaaagcaagtgggtaggaaatgactcctgtcgatcatgtgctgtgaggactgaatgaataactgggttaaagactggcagtggggtgtgcttggtggtgaagaatgctgctcacgggccaaatgggctggctctgagccctggatttgccacctagctgtaggatctcaagcaagttatggaacctctctgggcttcctttgtctcatctgatgagtgagaatcactgcactctccccagggggtgggcggcggtttgtttggttctggttttggttttaagattactgagctgattcatgtacaagcgcttagaactatgactgacacttggtgaatgtccagtaaccaatagtttctctcctatgtctcttgggaccttaaaaaaaacaatttactaggcgtagtggttccattatatacatatatacattatatacatagtctggcatatatatatatatatatgtatatataatatatacacatatatatattattctgagaataattctcagaattctcaaaataatatgaaaactgttggagtcataattggaggtaaaatataatctctggaatcagattacttggggtcaaatatcaactccattacttactctctgtgtggctttgggcaagttacttaacccctctgtgctttgatttctgtaaaatggggatggtacaatgataggggacaaaggagtaaagaatcaatagataccagttgttgttactattgtcaacattaaaatctttaaagatagtttaaatatggaatgctagctacatctctggcaggaggagattttccaggtttaacattcaggatcagggacgttcccatcttttatttctagagccaggtggcctgagcatggcagacaaagctgatgtcagatggaggcatgtgggcatttatcataagaggtatgctcaggagatatgtcttcagatcatctgtgtctcattcccatggaagagccgcgttcccaccaagctacaaagacatcttagctctaggttagagtactggaataaaagtttcagaaatgagactctgaagtctggttgactcacagggaaattactaggcagaaagccatgagatgtagcttccagccctagcttggccacagccatggtgaatgacaacgtggaaaccaggttttcaaatttagttgaatgggttcagcaaagcaatttcaaaatcatttcaactttgtatgtatctgtgattggttcccatattctcttattttgctaatttgggctttctctctcttttttcttttattcttttttttttttttttttgagacggagtctcgctctgcagcccaggctggattgcagtggcgtgatctcggttcactgcaagctctgcctcacgggttcatgccattcccctgcctcagcctcccaagtagctggaactacaggcgcccaccaccacacctagctaattgtttgtatttttagtagagacggggtttcagcc

SEQ ID NO: 1886952 - DNA, 4001 bp, Homo sapiens
tcaggctccatccctatggaactgccctcccagggagcaggcgtagctcccacacctgattcttagccaaagggggagcctcaggcagtccagccccaacaggtcaccagtgagcaagcttaagatccagcccccctacccacccactgtatgattctgcaaaggcttactccacaggtgcaacgcccctgcagggccctcccctttccctagcaccagccaactagacacacctgctcgttccagccaaactcctccaccttgaagttggctgactggtctccatctcttcaaggaccctagaaccccaaagcccggtgaggaaagggaccagaagagagaccaggccggccaggagaggaggagctgggcattgcacagacctgggagagaagaggctaattccggggtgggccgtccgctcaggaagggagacgctgaggccatgccgcatgcgccagagctggtgggcggggcctgccgtagaccgcccacctggggagggggtggggcacgccgtcaggctcacaggtgttgttggcagctgggcaggaggtgcagaggctgcaggtggatactgccaggtaaggcagggtcaggaagatccgactgcttccatctgaactcacatcctgccccctaatatctgtcagaggtctttagccttgcaggcagaggcctggcggtcaccaggccaccagtttcttctctggtggccagcacagagctaacattcctgccctggaacaggcatcacatgggaaataacctccaggcactcacctggggccgtgtcttctttgagccaagatgaggtcaacaagtcaccggtaagcaagcttaagatccagcttggccgggtgcggtggctcacgcctgttagtcctagcactttgggaggccgaggcgggcggatcacgaggtcaggagatcgagaccatcctggctaagacggtgaaaccccgtctctactaaaaaaatccaaaaaaatcagccgggagtggtggcgggcgcctgtagtcccagctactcgggagaccccatctctaccaaacattttaaaattagccgagcatggtggcgcatgcctatagtcccagctacttgggaggctgaggcaagaggatcacttgagcccaggagtttgaggctgcagtgagctatgcttgccccactgcaatgcagcctgggcaacagagcaagatcctgtctcaaaaaacaaaaccaggctgggcatggtagcttacgcctgtaatcccagcactttgggaggccgaggaggctggatcacgaggtcaggagatcgagaccatcctggctaacacggtgaaaccccatctttactaaaaaaaatacaaaaaaattagccgggtgtggcggccggcgcctgtagtcccagctactggggaggctgaggcaggacaatggcgtgaacccgggaggcggagcttgcagtgagcccagattgcaccactgcactccagcctgggcgacagagggagactccgtctcaaaaaaaaaaaaaaaggatccagctcccccacccgctgcaggattttgcaaagggtcaccccactcctgcaaggccctcccctgcccctagcaccaggaaaccacacatgctggggtggcacaaacactcctgtacctcaaaacttgcataggaaaacttacagaagcaaaaatggaggccttgagacaaggaaagaaataagaggaagcatctagaaagccggcaggtttcttggtgccgtcatcagcacagccaccctgccactcatgcccggagagccccttccctccagccggctccactagcattctcagccggagctgaaagagctcctacctttctcatagcagagactcactctgtccacaaggagggaagccatccagaatcgtcctccctctcccgctggggaagcccccactctccagctgccgccccaccccccacccccaagaacgcagctcgctccagtctccaggcctttgttctgccccgctgtggcttctgctcagcccctcccagtgctgtttccagccccaccccactgcactgcataagcccaagggaaactcccccaccctcattaaatcccagctctccctggaggattcctgcgtttaaggcccagactccttcctccagtgaaagctccgagtcacccctggtgggtgcatgcactgtttaaagttgaactcctcagctttgtcattaagttttcatgccttaggctgcacgctgtggctcacgcctgtaatcccagcactttggaaggccgaggcaggaggatcacttgaggtcaggagtttgagaccagcctggtcaacatggtgaaaccccatctctactaaaaatacaaaaattagccgggcacggtggtgggcgctgtggtcccagctactcggggaggctgaggtgggaggattgcttgaacctgggggcagaggttgccgtgagccgagatgttgccactgcattccagcctgggtgaaagagcgagactatgtctcaaaataaataaataaatacgtttttgtgccctagaaattgttaatatttctcttctatttgtgtgtgtcttgacttcccaagtgaaatgcaaactcttcaggggcaggatgcatgtcttacacagttcagtttggtccacagtgtgcagtgcattgactgatggtcagtcagtcattctgaattgcctgtttggattcctggtcagtttttctcacaacaatgccaacatgtaaacaggtgtgtggattccttttctactgctgccgtaacaaatggccaccgatccagtggcttaaactaaaacacatttattatcttacaaattcttttggccagaaatctggcttgggtctcactgcactcaagtcaaggcatcagcagggctgtgcaccttccggagggtctagggcagaattcacttccttgctgtttccagcttctggaggtcactcacattccctggctcatggccccttcctctgtcttcaaagccagcaacattgcttctctctgacccttcttctgtggccacgtctctaaccacagacaggaaatgtctacttctaaggattcatgagtaggttaggtagcaggataatccaaaaccatctcctatctcaagatccttaacttcgtcacatctcacatctgcaaagtcccttttgccatgtcagggggcacagtcacaggttctggggattggaatatggacacctttgtggaacccttactctgcccaccacagtgttctatgaacacacaaaaatggggtaggtgggctcagtgatcgtacaaatgtgagagtcactccattaagcaaatttaaacacaatttcacatggcaggactgctcagagcctgtattatgctaataagcatggtgaattttcaagacaggcttatagtgagcagccttttgcaaaagtttggctgcacacatgtggccccagaacccctttttgtttagataaccattggcacctccataagagagctttgcaggcccaccgggttaggaaatacggtgctggagcttcccacccgttctgtcttccctattccctccccatcccagccttcccaggccccgtaagatctcccccaaggccatatcatgtctgagctctggaactccttggacggaaccatggcttgggtgaaaatagtaacttgaacctttcattctaactgccaatcaaatttcatttggaagtggtgaaaatgccctgtgttgaaggctctggctgacccagatatgatgggctccccatgacaagccaagatccctgtgcctctgcgttagtgactttgacacagggactgctggtccccggggatgaggttaagctgctgttgagtccctgaccttccaggtaacatcatccaaaccaaactcacaggacattttgagaggttctcctctcaacaaaaatgcctctcagacctgccgagagagccctcagaacaacttcctcatctg

SEQ ID NO: 1886953 - DNA, 4001 bp, Homo sapiens
ccttaacaaaggaaggaaattctgacctatgctatcatgtggatgaaccttggagacatcacactaagtgaaatcagccagtcacacaaagacacataccagctcagcagctgcagcacggtagccaacaatagcagctgtggcttgtggagaagtttatttctccttctgtaacagcccagggcgggtgcacccggtctatgcagccctactcccttaggggacccaggcggatgctgctttgctaccttgacgtggagtttctgagctcgctctgccggttgccacctgggtccccaggtgggagggtggagcacctgccaggattgatgggctaagggcggaactttccccttgcattccatcaggggtatttatctttttttttttttttttttttttgagatggagtcttgctctgtcacccaggctggagtgcagtggtgcgatctcggctcactgcaacctccgcctcccaggttcaagcaattctcctgcctcagcctcctgagtagctgggattacaggtgccaccatgcccagctaattttgttatttttagtagagacggggttttgccatgttggccaggctggtctcaaactcctgacctcaggtgatccgcccacctcggcctcccaaagtgctgggattacaggaatgagccaccgcacccggtctcagttgatatttctaagaatctgcatagaatagaccagccgaccctggatcctatcagagggtggaggctgggaggaggaagaggatcaggaaaaataactaatgcgtactagacttagtacctgcgtgctgaaataatctgtacaacaaaccccaatgtcacgggcttacctatataacaaacctgcacgtggacccctgaacttaaaaggtttttttaaaaaaagagggtcgggtacagtggctcacacctgtaatcccagcactttgggaggccaaggtgggtggatcatctgaggtcaggagttccagaccagtctggccaacatggtggaaccctgtcgtctctactaaaaatacaaaaattagccgggcatggtggtgggcgtaatcccatctactcgggagactgaggcaggagaattgcttgaacctgggaggcggaggttgcagtcagccgagatcacaccactgcactccagcctgggcgacagggcaagactctgtctccaaaaaaaaaaaaaaaggggaagcctgttgcccaaaagggctgctgtggtacctaaaaatgtgggctttctccttctgggagggggtaggaagaagtcgcccccactctccaggcccacggctgccccgcccctgctcaccagccggctggctgtggcaaaactaaagcctgccccgtgccctgagcccggcatgttgttcagcctctctgaaatggtctccttggatcatgggcagagatggtacgatgggatcccacccgaggggtcccggccggtgctcacggggctgggaccagctgctcttactctgtttttctacctttctcagccacttggaggaagagagaattttgttaccttttacaggtaaggacgctgaggttcacaggataagtcacttccagccaggtgtgtgtgacctcagatccatactcagagggaggtgggctgggcagagcctcccacctgctcccctggaggcccatgagtctgggcactggggccccaattcctataaaccggggttgattacggaggactcccctcacctgcaaccccgcctcccaccacagagcccaggcagcagggaagcctggagacaggcgcagagcctctgggcctgggtgcctacccctgcccacccccagggcctcaggccacaggagaccacctaaagcaggagccgggagtagggcccaggctgggctggcacagctgggcctgtgaggggtggaggggccgctggggaagggacttaccagcagcagctctgctgggacctgggaggctctcctcatttccagtaacaagcgggggtgggggcagtgggagggaggaggcggctttccccaggtgccagctgtgcttgaagacagcctgtcccctctgctgtctcctgttctcagctccttaatcccctccccgacctcgtagttgactcctgggctgactcctcccctggaagggaaagaagagccgggctcacccacacccaacaggtgcagcagctgcttgaggtcacagttgctgagaagggaagctgaggccagtggcagctccagccagggttggtgcagcctgctgaggggtcgaggtcacccaatcacccacccagctccacctgcccccacccctcccacccagcctggccaccagcccagacaccttcctcacatggcctgaagacccctgctgacctgtggcaccatgtggcccagcagggtggccaggctggccggggtcatggggtgggggacgctgctccccacctgccctggggtggtcggtgctgttggggaggccactctctaggggcatctgccaggtaggcagaccagaaacttaccccgagttctgtgacccgctccggggagcggggcatctcatgtcctctcagccacgtctgaaagctgggacatggcagagtgggcagggctgccctctgagctgacccccttcccctcctccccatcttgtctctcctcagatctagggctcactctgaggcgtgggtgacacttgccccccaaccccagcctcttcagtgcagggaggcagggcctgaacttcggagggccttggggcaggttcctggggcttgcagtgaggcctcccctttcccagggagaggaagggagaagccgcgtctggcgagggaagcctgtaccctcaccctcactgtgtccagatctgcacccctaacctggcctggggagactggcaccaggtggagctggtccccaaggagccccaaaccccagaacatctgctgcaggggtcagctctcagggggccccagggccagtcctctctgcaccccaccttccctgctcaatgtggcttgtaggaggttatgcaaagcattatgcaaagcacatgcaaatgagacccaaccacaactggtcactctctccaggcaagaccactgaagccctctggtcatcagcaggaatgcaggggcgcctatggcaggccggactccaggtcaggccttggggcagtgaggaagaaggtgcatgccaggtaagctatagtcaaaagggagggacacacaccaccaggcgaatgaatgaagcaaatcaatggcactcctccctgccccagaattcaaaatgacagaccggtgcagacagatgcatgtgtgttctgagaggtggttgtgtacaagcaagctcactccttcagtctcccattcattcacttattctgcaaactcggtgtctattatgagcctgggctgttccaggggctggggatatcccagcagatgaaaatgcctgctttgcagggctccagtagggagagaaagatacaggtgacaagtcaggatgagcaaggaggacacaccggtgtatgttccagaaaccataaggaggctggagccaggcacagggagccctgggccttgggaagagtatggtctgtgcaggggccatgtagtgggagggggccctgcaacatcaacccaggtgccctggggaggttgtggtggaaacaggcagagcacggagggaaccaagttccccgggcaggagatgccaggggctgcggccaggggtggcagtggaagggctgagaagtggtcggattctgggttaggaagagaaagctgccctttgccctctgaagcttcgccgaaaaatcagcggacaaaaggcagattcataggagaaaaggctcacaaaatttactgtaactgcatagcacaggactccccggacgtgattacccagtaatccagaggggtccagaacctgccatgcccttcctcatgggagaagaggtggtgggaaaccacctctttgaggc

SEQ ID NO: 1886954 - DNA, 4001 bp, Homo sapiens
ggtgctaagagggaagcagagagcaacgaaggctttgtaatagactaggtgagagtgaatggtaatttggaccggagcggcagtggagatggagaaaaattaacgctattgggttaatgtattttggaggccttgaatgccaggacttgaaggattggataggaggcaataagaggaaaaacgggccaggtggggtggctcacacctgtaatcccaggactttgggaggctgaggccggcagatcacttgaggtcaggagtttgagaccagcctggccaacatggtgaagccccgtctctactaaaaatacaaaaattagctgggcatggtggtgggtgcctgtacttccagctacttgggaggctgaggtaggagaatcacttgaacttgggaggcggaggttgcagtgagccgagatcgtgccattgcactctagcctgggcgacagagagactcctcaaaaaaagaaaaatgatgactcttggatttgaatctaacaatcacaaaagtacacaaacataaacatagaggtattagcgtgttcactacagtttgcattagcaaaaagctggagcagcctttaagcattaattcagcaatagaattattaaatcatggtgcacccatttcattcataccacagtttaaaaaacagcataaagaaggccatgagtgaaaacaagccacacgcagaccccaatcttgtaaaatattcatttatgtgcttgtgcatagactaatattaggaaagtatacacgctactggggcagggctttgcgggggaggagcagtttttctttttactttatgcctttctgtactgtttgaattggcttttgcaaggcgcacgtcttgtatcatttctgaagttgcaaatgtagttaaaaatgtctgtgatttcaagttacctagagagttattgattccttctctttccctgccgctgccgagttgcgcggaggcggaggcttgggtaccttcaagattcagcttcacttgtaacccaccgccacggccgaggaaggcattgctgctggaggggtaatggatgttaatactgcttcacaagaggtgctgaagaccgctctcatccaccatgacctagcacgtggaattcgcgaagctgccaaagccttagacaaacgccaagcccatctttgtgtgcttgcatccaactatgatgagcctactatgtatgtcaagttggtggaggcctttgtgctgaacaccaaatcaacctaattaaggttgatgacaacaagaaactaggagaatgggtagggctctgtaaaaatcgacagagaggggaaaccccgtaaagtggttggttgcagttgtgtagtagttaaggactatggcaaggagtctcaggccaaggatgacatcgaagagtacttgaaatgcaagaaatgaagaaataaatctttggcgcgcgtacacacacacacacgttactgattcctaggcagggtgcggtggctcatgcctgtaatctcagcactttgggaggccaaggcgggcggaacacctgaggtcaggagttcaagaccatcctggccaacatggtgaaaccccatctctacaaaaatacaaaaaaaattagccgggcgtggtggcgcgcgactgtaatcccatctactcgggaggctgaggcagggaaatcgcttgaacctggaaggtggaggttgcggtgagccgagatcgcgccactgcactccagcctgggccacagagcgagactccgtctcaaaaaaaaaaaatgagagttattgattcctacagcgaagatgtcccaagactccgtccgctaaatggaaatcgttccgactttggcgccttttgtccggaccacgtgtacctttaacatcacaggaccgcctcggacacgctcacaggcagcctcatccgccatcactccgggaaccgagcaccccgctgcctcggcgcccaggctgctctctccgcgcatgctccttcccagcttgagcccgcgagtccagcctgccttcactcagtgcgcaagaccgcagccccctccccacgccccctccccagtaggcggccgtcgcggtgtgtttgcgtcatcgcgccacgccaccactggaacccgggggaagatggcggcagccgttctgagtgggccctctgcgggctccgcggctggggttcctggcgggaccgggggtctctcggcagtgagctcgggcccgcggctccgcctgctgctgctggagagtgtttctggtttgctgcaacctcgaacggggtctgccgttgctccggtgcatcccccaaaccgctcggccccacatttgcccgggctcatgtgcctattgcggctgcatgggtcggtgggcggggcccaggtgagtccgtggcccgcgtgcccgcggccctgtggggaggatggcgcggcacctgtgcgccgggattacggtgcagtgcaagtgcgatagggaggttgaaggaaggagagctgcgggcagaaaggggatccaggtatcagtccggacgggatgcacgtatttctcctttatcggccatgagtttctccaggggaaaaatgggccttatttttctgttgttaggctattggtcggcacacaggaatcgattaggttccaggcccggtcactcactagttgtataatctaaaagtctctttttcctctggcaatatctgtttcggggattgtttcgactgactgaatgacgcattcaacaataaacatttaccgagctcttattgagggtcagatactgtactaggcgctccggttacagacgtggtggcgatacacaaaatgctgcgaaacaagatgagaattgaatatcaggggtctctaaccttatctgaagactggcagagatttttccaaagaaaccggcgtttaagctgagaccctaaggatgaataggggttgggtagggaaaaaatatgggaggggctgttcagtcagaggagagctcatgtgggaagaccctgtggtaggaaggaactggaaagaagggcatcgttcctggggctcagatgtggaggggaagagagtgggtacagatgagactggtgagatgggtaggcagtggtcgggtcatgcagagcgttttaggccgggttaggagcctttggacttctataagaatggaatctgataaccattcagttctgcaagctagacactcaagtaattctaaactcttcttcatacacctccataagcaatctgtcaagtcctgttgattttatcctttgagtagttttcagatctgtccactcttttccatctttctcattgctcccattctagcttgaacccccaccatcttgtccgggtgaaggcactgattctaagaaggcatatttctagcccataatagctgctccttataacaatctcctatcttcccttctctcccactaaacctcccccaaattctacccatccttcaagacccataaacacgagatcttctgtgtccacccttcattcctgggaccttcctagctctatgctaccttccaggaagatggttgtcacaatttgctgggtgggtcaataaccttagccccagatttatcacagataaccctatctgtttgtctttaacattactctgcataattgagggtgacaaaactatatctctgctatctcagcccaatatcagaggctggagctgattatgtattttctcttgtctctaaattcccctcttctaatttatgtggttttcatcagtcagttatattacagtggggtttttctgttttctttatctcacaatagtcccagaattattattatttttgagacaaggtcttactctgtcacccaggttggagtgcagtggcatgatcttggctcactgcaacctccatttcccagcctcaagggatcctcccacctcagcctccagagtagctgggaccacaggcatgcgccaccatgcccggctaatttttgtatttttggtagagacggggttttgccatgttgc

SEQ ID NO: 1886955 - DNA, 4001 bp, Homo sapiens
ctgggctctgctgggtggtttttctgtttcacatgatgttggctgggactgcagtcatttggaggcttcactgaactggtaagtccaagatgactcactcacatagcagtagttgctgctgcgtgttggcttggagttcagctgaagctggttttttgttttctcaagatggagtttcactctgttgcccaggctagagtgcagtggtgtgatcttggttcactgcaacctccacctcccaaattcaagcaattcttctgcctcagcctcccaaatagctgggattacaggcatgtgccaccatatttggctaatttttatatttttagtagagatggggtttcgccatgttggccaggctggtcttgaactcctgatctcgagtgatccaccagcctcggcctcccaaagtgctgggattccaggtgtgagccaccacgcccagcccaaaactgttgattggaataccttgtctcctccatgtcctctctcatagcatgacagcagggctctgagatggaactttccaagcatatttcttaaaaaatagaatctgcagatctcttaaggccaagctttggaagttgcaacattgtcacctctgctgcattctgtggtcaaagcaagtcataagacaagcacaattcaagaggagggaaagggactacctgtggatgggaggcagagcagataatttgcagctgtctttaatccatcacagctgattgaggcaggtatgaaaggatgaatagagttttgacaggcatagctttctaaaggaagagtattctagaggaagaaataggaagtcttccatttgaatagtgggaagagcacctgaaggggtctgggaagatggaacggtgggaccatgtgacagggctttgaacagcagttagaaaagcttggctctacactaacaggctttaagaaaacagtgtggaggacctctcagttattttattatacctttccctacaaacccagtgttaatagctctggatttggcttctctctctaaggtgtgggaagggatggtcactccttaggttattatgagtgatgctgacttaggcattttggaggagacaaccctagcagtcctgcaggactggccacaataggagtttaggaacatgcaaacctagctaggcttttcctactgcctcaaagggctagttatttagtcttgcccttgtctgttccccacagtaaccctccactgagtgaagaaatgttgcctcctggagagtggatgtgtcaccggtgcactgttcgccgaaaggtaataatgctgctttctgaagactgtccagaaagcctgatccagagcactgatatgctagagctaagacggcctagccctgaaggcattcttgtcccttcttcttgtctcttccagccctggaatcaccccactcttcccatggtgactgtttggaatccagtagggcctaaaaatccaaacatgggctgctgaaatgggcagaagaggtgtgttaacttactgagccatgtttagtcactagtgacaggagtagtcttaccttcttgttgtcctcctaataagtggccttatccatggctgaaaaacaaaggctgcttctccagcttgatggaaaatggagttttctctcaccccagggcaaataagtcactggtatccagagacttggcatactgacggagaggattttgaacgcatttgtaccccaagttgcctaatctttctttagcttcccttccttcagctttgataattcagtactggcttcaagaacatggtttattattttctactttgagaactcttgtgggtaacaagagctaaattctcccttattaaaaaaggaagtaggtgtgcttgcacccaaattatgattgacccaaccctcaaattacaggctatggattagaatttgtctgtgcattgtaatccacccccctgtgctccccacactaattatacaccaagcaactttcctatgttgtgacctcacctctatttgcctggtccccgaacatgatgtcacaatgaatgatgacttccttggttgcagaaacaggatgagatgattaagattgtggtttatgtgtgtaacagtttcagcctttaagaaagaaagtaaacaagcagacattatttttcaaatacgtgcataagggttcatatttaaaagcaagccaaagccaggtcaaccacctaaccacagctgtagttaaatttctccataaaccaggctgtcttccagcctctccaccttccaagatcctttcctgtgcatccctaattaggttagagcagggcctgttagaggcacctgccagccaggagccctctcaaacttgccactcaaaaaagctggacctgaaaaggtttaggggagctgaaggaaaaggggtaaagacggtggagaaaaggaaatattatgttagtgcccatcgtgtgccaggtgttttaattacgttatcccattatctatccatccagccatagatggataccgaatgctggccgtaggtttccattttagaaaggaagaaacggaggctcaaaaatgtagattaactttcccaaggactcaaaggtattgacagaaccaatgtttgaaccaaattctctcattccaaacctctgttacctcttcatcagttttctagaaggagagctacttgttggggattacagtatgcccttttctaacatggcacttctcctgagatgcctctcttacctttcacatggacctctgcctaccagtgccaagtctgccttttccaccatcaccagcactactcccctttggcctcttgtatttacactgaagtggattgaaataatacatcctctggccttcatcagctcctgacattcaggccctatcatgattcgtagtggaagactaggtcctactccaactccaaattatccctttcgtatatatgaccctttttatctccctccaccatatccctgagaggaggaggagaaagatttttctgtctcattttacagatgaagaaattcctgcccaccagcctgagtcaccacaaggtcagaggggatccgtggcagaaataggacaagatcacaggtctcctacctggagatcagtgttaaaccttcatttgaccactctatttggagtcctggaggaaaatgtactatcagatatccagtcctactgagtacacttaatctttttccatttccccactttctaagaagtgtcacttattttgagcaaagtttttatttttaaaaccattcaggaggtcagaaggctctatagtgatctcactgattttttttttttttttttttgagatggaatcttgctctgtcgcccaagctggagtgcaatggcgcaatctcagttcactgcaatctttgcctcccaggttcaagcgattctcctgcctcagcctcctgagtagctgggattacaggcacatgccaccacacccagctaatttttgtgtttttagtagagatggggtttcaccatgttggccaggctggtcttgaactcctgacctcaggtgatctgcctgcctcggcctcccaaagtgctgggattacagacgtgagccaccgtgcctgccccattgatttttactattggtctcactaaatttattctcactgtgttacctttttagccctttaccctatactttatagatgttgtatgtcatacaatgagttaatgttaatgatatatattttgtatagttattcctaacttaccatgctttttggtgattctctgatgcaacagttttgtcagctttagttcagttagagttgtgtcaactttaacagaccagtgttccaagtgaccaggtagatgagtctgtgatatgtgaaggccttttacagttttgattagtggtctaccaggactttgtagcacccatctctttgtttcatggtacttttcatgatgggcccacctgttcatttgcacagaaacgagagcagaaaaaggagctgggtc

SEQ ID NO: 1886956 - DNA, 4001 bp, Homo sapiens
gtaagttatttgctcattcttagggctagggagtgtacagtcagatttgaaaactaaggcttttcactctaggtatagggctaaaagtcccaagtgaaaacacagaaataaacttaggaggacaacaggaatgtgaatacattttctttaggcatgagagcccacaagtttggtctgttggtagctatcagctgaagcaaaaacatatctggaccttaccctgatgccttactgaagagagcaccagctttcctgtcagaagccatcttcaccttcgcaagtgtttttttgtttgtttgttttttgttttttttgtttgtttgtttgtttttcagacagggcttcactccattacccaggctagagtgcagtgatacaatctcagctcactgctgcctttgcttcctgggctcaatcgatcctcccacctcagcctcctgagtagctgggatgacaggcacccaccaccacgcctggctaatttttgtgttttttgtagagatggggtttcgccatgttgcccaggctgatcacgaactcctgggctcaagcaatctgcttgcttcagctttccaaagtgctgggattacaggtgtgagccaccgtgcccagcccataagtctttatttcctgcgcagtcttccaaaccagatgtcccctgtccctctgagatgaggacctttggtgaaaagtggatgtttttagatagaggtagagcatgtctaagagtccaaacctttaaattatcctgagaacagtttggttgtatatccagaaatgaacactgccatagtctgccatggtgacaagaggttcaaagggtgttgagaaaactatttgtgtcccggatgcagaggagaggagaagccctgagatacgtgaattagacctactggacaggcctttatgagcaaaaaagctgtatgtgtgtgaggggagaatgtggcatgagacagtttttcttctggagacaaggaactctgttctggtgagcttcctgctgtgctctaaggaccttcaagttgccagaggatttttagcatggactgggccccatgaatgtccggtgacaataaagatattcctggataaacatttcttttttttctttccaccagggccctgtccatgctaacttcttttaaacttttcaaaccgattgatggtaaagcatacatcaagtcatattcagtttaatagacatttagcgggtgcctactatgtgtaaggccctgtggatgcaaagcagaagaatatacagagatctctgcagaaagactgcgggggcttctgtagcatctccattctcagccacccaatcctacccaaccacagtatctcttgggagcagatgctgctgatgtgggcagagcagagttagcaaaggcacgacttgtcacacaccactgccacaatccgtggctgtaagagggcctcagcgacctttttgggcgtgggctgtttggttcagcttcctcttctgagaccccatctcctagctgcatatcatgctagcaggacccagagagatttatctggtgacctttctgcatgcggaatccaagcagggggaccgagaaaatcagctccgaagcggttaattttactggctcctaaattgataagcggtggtacgtcagtctgaaatgaactcgccttgttcgacggggttctaagacagcggaactcaatcaacagcgggccgcaaggttcaaggctgcaattcatcccgccgtgcctctgaaaaatgggaggtgacagttcattttgccagtgacagtctgtcggtctcgctcgctgcttctcctgtcgattgcctggctgaggtgaagtgcagctcagaaacaccctcgtttggtattctactcagctgagcaggatggtcccaggacccaaggtgtgcaaatcttactgcccctacagcttgtcttcttcccttctgggaagctctgaactgctcatgcatgattatgggtcccaggagtcatcttcccacttcctgtccttcacctttccctccaaccttcacttccggtggactgggcttcctcctgtcgctgggactttgtgaaagaaagctaacctgctcaggagccttccagcctaccgatagaggactgcataggcagcgacaaatgggcgtggtgcagagaagttactagtgcaagtgggggcttgagggaacaccagacacaaccagcttggctctgccttggcaaccacagctttagttttagagaaagcccttgaacaagggcagagagaggggaaggagagagagagaggttaccttatgaatgcatgcacctaatcccagactgccacgtttgcctagcactttctacttctctgaaaatgataacacatatttgaattaaagttcatgtgccctttgctaactttcctcattttgataaccatactgggtgtttgtgggtttttttgagacggagtctcaccctattgcccaggctggagtgcagtggcacgatctgggctcattgcaacctccgcctcctggttcaagcgattctcctgcctcagcccctgttactgggattacagacgcatgccaccacgcccagctaaattttgtatttttagtagagatggggtttcaccacgttggccaagctggtctcgaacccctgacctcagtgatccacccgccttagccttccaaagtgctgggattacaggcgtgagtcactgcgcccggcctcgtactaggtgttatttttaagggaatatcctcattcttagaaaataccgttgaagtttttagggaaaaggagcgtgatgactgtaatttactctcaaattcagaaaaaaatgtaaattaatctagtactaattacttttctataattaacattttatttattatgaaaaataaagtaaatttaataattgatgattattaaatttaataattaataatcgaagttaataattgatgattccaagtgaatggtatacttgagttctagatactatgataacttttctgtaagtttgaaattatttcaaaataaaattatttttaaaaaacccaacaggccaggcatggtggctcacgcctgtaatcccaacattttgggaggccaaggtgagtggatcacttgaggtcaggagttcgagacaagcctggccaacatggagaaaccctgtctctactaaaaatacaaaaattagccaggtgtggtggcacgcacctgtaatctcagctattcggaagtctgaggcaggagaattgcttgaacccaggaggcagaggttacagtgagccgagatcgcaccattgcactccagcctgggtgacagagcaagactctgtctcaaacaaacaaacaaacaaacaaacaaacaaacagacttaccttgtagcactcactcagtaatcctttattgaggacctactatacaccaagcatagcagttgctgggaatacattaggaaataagataggtaagatctgaaccctcaggaggagaagacaggtggcaggtagacaagtattaggttggtgcaaaagtaattgctgtttttgccattacttttaataattttaataattacagatgggatgtgagttttgaatagcaggtgctaaatgctacaggaatgtaggagagggaaatataacccagtctggggagccaaggttggttaaccagacaaaatgaagttgagacttgaagcatgagtaggagttagctgggtgaaggggaaggggaagagtgttgtagacagaaggaacagcacatgtgagcaaacggaagtgggagtgggtatgactcattgaaaaactgcaggaagtctgttactgaagatgatggagagtaaagggtccatgcaggcagcaaggctagaaagataagcaggaggttatggtggtggcgatggtagacgcttgttagccattgtgaggaagtgaaatattgggaagctactaaaattttaattaggaaagaggcatgggcagatttttaaaaatgac

SEQ ID NO: 1886957 - DNA, 4001 bp, Homo sapiens
agggaccacagcaatagacgggcaaacaaatggctgtcagcaccacccacacagccagacggaacatttgcatctcactgtgaacacagcgcctggcccagagtgctcctccagtgaatgcctatggagagaagagagattttgcttcccagttcaattttcctcttgatcttcctgatcctctagttccttgtctaccaaatggggtggtaatctctacttcctatcttgtcagattgtcatgaagaacaaactaaccaatgatggcaaaagtgctttgtaaacactttgtaaactctgtatgaaaacatacaggaggaccgagcccagcacagtgcctggcccacagaggctgctcagtattgaataaatgaacgaattacctaatccctacaagaaggtatgctccccacaggcacagacccagcctgtttctcctcagcactgtttccccagttcctagcatggggaaggtgcctgacaagtatttgcatggagtgaatgaatgaatggtgagacttaatcctatcttcggggatcttcgagaactttggaggtggtgaggctgataccccagggcaacaaaccacgctggctcaataaccctgaaggcagctattatttccccatttacagatgaagaaacaggcttagagagattgagtgacttacccaaggccccacagcacctagtcagtgatggatcaggatgggaatcccggactcggcctccgatgcccatgctttttctaccacagaaggctcctgctgctggggatccggtggagcactggcctccgtgaccatcccctggacaagctggaatgttcttttgtggtgggaggatatgtcataactgcacagcatctcagcgactctgcagcaggaggctgctgggttcattaagaggccaagattcactcaggatgtgccaggtctagaaacacacacgtgcccaggacatctgtgtctagatgaagagactgaaggcagagaggagagctgctgatggactttcctgacccacaagtctctgtcatgtctgcacacagccagcaccttcccttttgcaccctgagccatctcagtctcccacagaccatgttcccttgggcagggactcatcacacaaccgctgcccttcccctccccgactgaacttcaggctctaccatgcagctcactgcttcccaaagtatgttctgtgggactatgtcttgggctgtttgtagacattgcttgcaaaaagattgcctgtgatggaaaaagcttcggaaaactgtatcaaatatgctaacctggctgcatgctaaccttgcaggacttctcagatccctgattatgctcatagggcatgtgaatctccaagggctggggagcttcagtaaagagcattttctacatttattttggccctaagctgtttcttcaggagcatctcttgggactgttgtgccccagggcactcttgggaagtcattgctgtagctgtggagagtccctgaggcatttcagcagagtcagaggatccgatcagtcagtgtcttaggaagactgtagggtggactggaggagccaagatgggaggcagagagggtacttaggaggctgcatcaacagtctgcaaaagaggaaaagagccctcctgccagccgggcaccatgctaaactggggtgtctgtcttcagtgagcttgcagttgaagcaggtgggctgagcgcccaccaggagctctcctccaaggcagaagatgctaagtgctgcaaatggagccgcatcgtcaatccaagaagactcttgataacttattcaactggcactccgtggctttggccagcttcctttcattttccttttcaggaatcaataaataatttgaagttgtcaggtggtacttcgttgttgtttttataaccctcattgatagggttgatggtctcagtgttcattcccaaaagtcacgtgaggtcagtctactgcctcactggggcattgcaactgaatggggagacttggctctaaggctttaaagtggtaaatgcccagtttatttttagtctattgtgttgtcacaggttcagttccatggcactgaggacagtttaggttcagccagccctagggtataggtaggacttaataacatctgcatcctctcctgcccccagcctctgcccctatcttgcactcactctgcagctccatttcatgggataatgtaatgggctaattccgcaccccctcctccttcctccccaggtggatcagggagcaaccaggtccccagaaacactggacaacagcagtctttcttttttttcttttttcttttttttttttgagacagagtctcactctgttgcccaggctggagtgcagtggtgtgatctcagctcactgcaacctccacctcccaggttcaagcgattctcctgcctcagcctctggagtagctaggattacaggcacgtgccaccatgcccagctaatttttgtatttctagtagagacagggtttcaccaggttggtcaggctggtcttgaactcccgaccttgtgatccacctgcctcggcctcccaaagtgctgggattacaggcatgagccaccgcgcccagcccgagcagtctttcttcactgtccctccaaagagtcaatgtgggagactgcctgttctgtattagtcttccatctgcaacttggctattcattcaacgattgtggctgtcagggtactttagagtgagcattgggctgcaagtcaggacatttgggatctggtcctgcctctgccgctactgtgtgacattctctgggcctcagttttctcgtatggataataggtatttgggtcttttcctttgacttgctgtgattctcctgaaaccccttcctccagagatcatctctgggttcacagctggggacattggaaacaccttgggaggccgaggtgggcggatcacccaaggccaggagttcaagaccagcccagccagcacagcgaaactctgtctctactaaaaagataaaaattagccaggtgtggtggcacgcacctgtaatcccaactactcagaagactgaggcaggagaattacttgaacccaggaggcggaggttgcagtgagccgagattgcaccactgcactccagtctaagtgacagagcgagactccatcaaaaaaaaaaaaaaaaaaaaaaaggaaacaccttctcctccctgccccaacaggttgaattggaatgggatcctttccctcagtccctgtttctctttggaaccaacctggaaaacagatttgtttccaacataaaaatctagttgagtcactccccttttcaacaaccttcagtggctccctattggcttcaggataaaagcatctttagaatgacataaaaggtccttggtgatccagcttctgcctactctccaagcacctctcctgcctcttggccacattaggcttcagcttcctgaatctcactgcaattccccaaaaggttcatgtcctatccctgtgcctcacgcatgctggttttttttgtttgtttgtttgttttctgctcagaagagcttcctcctgtttgtttgtctcacaagttcctatttggccttcaagtctggctcaagttctagctcctccataaagccttccctgttttctgagcaaatactaggtgtaactcactgtgtcaagcagtctccatgcaccatcatttaattctcacaactccatgagataggtgtcattatttttcccactttacagatgcggaaactaaggcataggtagggcatagtaatacctgcattcttccctgtccccagcctccacccctatcccacactcactctgaagctctggttcacagggataacgcaatgggctaaggcagcacccccttcacctccccaggtggatcagggagcaacctggtcccctgtaagtgacttgcccagcatcacaaaatgagcagtcaggatcaagacctca

SEQ ID NO: 1886958 - DNA, 4001 bp, Homo sapiens
acagcctttaatgtcacctgtaaaacatattcccaaaggtagaatatgttttctccagagtctgaggaggcctaccagatgagctttcttatctgctgggcaagaatttctccttttctttggaggggatgtctagtcatgcttctgactaccaaaccactaaagatctcactgatgttagtaagacactaaatctttgtaggagtttttttcttcccatcccctggaatgcatgcacttaccaaggctccttggcacttttctggtccaattaacatgatgtcatctgaagagtagaccaatgcagccaggcgccatggctcacgcctgtaatcccagcactttgggaggccgacttgggtggatcacctgaggtcaggagttcgagatcagcctggccaacatggtgaaaccccatctctactaaaaatacaaaaattagctgggtatggtggcacacacctctaatcccagctactcaggaggctgagacaggagaatcgcttgagcctgggaggcggagtttgcagtgagctgagattgtgccactgcactccagcctgggcaacagagttagactctgcctcaaaaaacaaaacaaaacaaaaaacaaaaaaactgtggtggccctgtcaccagaagtatgtaagatctaagatctagtttataattccctgtctagggttttatagctcaaaaccaagtactgaacagagcttggcctaaattaatggttttcaaacttggttccatggtatcctgggggtttcttataattctcggggggtttcatggagattcatattcaggggatcatttctcatcactgctgtgaccatggcaactccattcttgtctgttcacagattaggactctgcagaaggttttgtttgtggaaaggcttttactgctgaaagctaacagtaggacattctatggaatacctgaccagtactccttgaaacttcagtcacgaaaaacaaggagagactgagaaactctcaagaaccagaggagaccaaggagacacaaacaccaaatgcaatgtgatatcctgggtggaatgccggaacggaaaagggaccttaggagaaaaattcatgaaatccgaataaagtctggagtttagttcacagcaaagcaccagtgttgacatcttcattttggcaaatgttccatgatgatgtaggaggttaacattaagagaactggataagggatatatgggaactttctgtactttcttttcaacttttctataaatctagaattattaaacccaaattgtaaaagtttatttttaaaagatagcattcaaaaaccgtcagacaaatgagctccaaatacatccagagatgagaagaaagacggtgacctgattctggaagttcagatgtccatgttggtgacctgattcaggaagtctttcaggaggatatcaagcttggatcttggatagaactgggatgcgaggcactggtgattgggcaatatccctgcctgtaggattctttgtggaatgctggatattcatattctggtcttttcttatctctggttgcctcagggaagtaagaacccatctgggaaagagaggacaggactgaagagggactcaaggaagttgagcttactggattgggggtgaatgttaaagttccagtttgaacaggtttggagggagagacggatggtggggagggcatcataccttcacccttgctaaatacttcctcttctttccagcagagcccaagctggagaccaggagaatctagaggaaggaggtgacacaggcctgctcctagtctgatgggaaaacctacgttataccctcaaagaaccccaatctggtatgggagacacactccctgacttcagagagctctctgtctgaacgagtggacgcaatgcctacctttaaggagaccgtctgtctgatgggagggacacagcttcttcctccaatccgaaggggagatgggacacatcacatgcacactgctggtagctgggctgacctttagacattagtattcagggacaaggatagcctgggaggaaggcttgaggatgacctgtggtcctttgtgaagagaaggccagtgtaaagggtgccgggatggagctgatgcgcccccggggagtgggccctgctcagacctagatgtccatattggtgaccaagctctgatctgttgtccccacaggggtctaccagctgaaaagcagtgaggagacagggaaggacaggagacacacagagccatatatggaagaagatctgaaatggagtgataaagatagatatgaggctgggcgcggtggctcatgcctgtaatcccagcactttgggaggctgaagccggtgggtcacctgaggtcaggagttcgagaccagcttgaccaacatggtgaaggcctgtctctcctaaaaatacaaaaaattagtagggcatggtggcatgcgcctgtagtcccagctactctggaggctgagacaggagaattgcttaaacctgggaggcagaggttgcagtgagctgagatctagccgcttcactccaacctgggcgacagagcgagactccgtctaaaaaaaaaaaaaaaggaaaaagaatagatattagtatatgataaaaatgcaggcagaagcgaagagagattcctgctcccagacctcccctcaccccctaccctatcccccacccctgccctggccccagctggcaccccatttgcatctccctgtgtccatgctccccagtcaggcgttacctcagtattttctttcactaggggtcaaaggcaaaacagagccaatatccacatgtgccagcttgtgggggaggaggaactctggaaaagaaggagagtgagagcaggtacagcccccatctaccatgtggtacacaccaggctgggtcaggaggagggggcagggaagagccgtcccgggggcctgtgcagagttgggcacaacacagcagtcagtaatagttgatgactgactgaatgagtagcatgcaatcaatattagagaatgggccatagcacagtggttaaagcctgcgttcaaatctcagctctgcaacttcctagctgtgtgaccttgggcaaattacttaacctctctgagcctcagtttcctcatttgtaaaatgaggataagaatattgaaaggaacctacatcctaggattgttgcggccttgcatctagctcatgcctacacggaacttacaacagggcctggcacacaggaaacaccaaaaagcccttagcctgtgtcgtgcaggtactacatgagtgtgattttcctgtctgtgacatgcatgtgtgctcactggggatatggtgtgtgcagggggtgcttctgggctggtgacagtgagggtggcaggtggtattggagagtgggaggagcactagctttgtggccaggccaggcagacatgggatctattcacagctttaccacttcccagccaggggggaagccccagcaaggggcttcccctcacaacagaatgagcataagcccttcctggggcattgtcaatgaggaggtgcaaagtgcttcttcaaacactaccgagagctgtaatttttttttttttttagatggagttttgctgttgttgcccagattggagtgcagtggtacgatctcagctcactgcaacctctgcctcctggtttcaagcgattcttctgccgcagcctcctgggtagctgggattacaggtatccgccatcacgcccagctaatttttttgtatttttagtagagacggggtttcatcatgttggtcaggctggtcttgaactcctgacctcaggtgatccacccacctcgacctcccaaagtgcagggattacaggcgtgagccaccgcgcccggccaagagctgtaattctttccaacattctgcgtggtctgttgtatgtggctgtgtgtgtctagaagccatgtagatttggaaataggggacgtgtgg

SEQ ID NO: 1886959 - DNA, 4001 bp, Homo sapiens
cactcaattttgctgtgaaaccaaaactgccctaaaaaaataaagtgtattaataaaaataatttcattagagaaggatgaagaagaagaagagagagaaagggaaggagaaggagatgaaaaagaagtcgggattcagagatggaaagtaaattttagttgaccatttcccttgtgccaggcactgtgctagatactttaaatatacatcttattttgctatattctcaaaatagtgcaagatcaagattcttatctctatgttaggtataattaaattgatagttatagaagttagatcattataacaaggtcaaacaactagtaacagacattttaactcagctgtactgatggcaaagcccaagctccttcaattacatcctcctcctcctcctcatcatcactcacagcatcttcaccttcatcatcaccgacatgcattgagctctcagatgcatcatccctgtgaacacacaatctttttatttaattctcgcaacaactccattttgtagtcaagtacactggtgttcagacaaacttaaataacactttccagatcgcacatctggtaagcagcagagcccagagctatctgattccttacttttaaccatgctgatctactgtttgtcactattttcagatagagcccatggttccccttactggataacaaatcatttttcctctcttggatgtaacctccccatctacaaaatgagcagtttgtactaaatgatttaagattcctttccaatctaatctgacaaactaatctaatttcagagcagccgcgtggagggaatgtttttgctttgggtttgtatttctgaaataacctgtcttctctcttcccaggagaccagcagtaaatacacagatggataagactcaaaagaacctacaaatcctgtacaatgaaatcacgtggcaagaatgtggttattctgagaaacagaataaagcagcattttgctgtgccttttcacacagctgccaatcaatggtacatgctggcatactttcagaatagctgctctgtttaacccaatgacccagaggcagcaatttggagcttagcaagtcacatcccatgacatccaggatgccctctccacctacctgcacccagtcaatcaccaagtcacagggatttcacctctggaataatttcaatcaccacctgcattcccaatggcttcgtccaggctcttatctcttagctgcactatagcagtaacctcctaactgcctctgcacactatagtcctccctcctctgtgctattagagtaatatttttcaaatgcaaatctgatcatgacactctctctttttttttttttttttgagacggagtctcgctctgtcgcccaggctggagtgcagtggtgcgatctcggctcactgcaagctctgcctcccaggttcatgccattctcctgcctcagcctcccaagtagctgggaccacaggcgcccaccaccacgcccggctaattttttgtatttttaggagagacggggtttcaccgtgttggccgggatggtctctgtcaggcctctgagcccaagccaagccatcgcatcccctgtgacttgcacgtatacgcccagatggcctgaagtaactgaagaatcacaaaagaagtgaaaaggccctgccccgccttaactgatgacattccaccattgtgatttgttcctgccccaccttaactgagtgattaaccctgtgaatttcctactcctggctcagaagctcccccactgagcaccttgagacccctgcccctgcccaccaaagaacaaccccctttgactgtaattttccattaccttcccaaatcctataaaacggccccacccctatctccctttgctgactctcttttcggactcagcccgcctgcacccaatgaaataaacagccatgttgctcacacaaagcctgtttggtggtctcttcacacggacgcgtatgaaatttggtgccgtgactcggatcgggggacctcccttgggagatcaatcccctgtcctcctgttctttgctccgtgagaaagatccacctacgacctcaggtcctcagacccaccagcccaaggaacatctcaccaattttaaatcaggtaagcggcctcttcttactttcttctccaacttctctcactgttcctcaaccactttctcctttccactcttcaatctctcccttgtcttaatttcaattcctttcattttctgggagagacaaaggagacatgttttatccgtggacccaaaactccagtgccggtcacggactgggaaggcagccttcccttggtgtttaataactgcagggacacctctctgattatacacccacgtttcaagggtgtcagaccacgcagggatgcctgccttggtccttcacccttagcggcaagtcccgcttttctggggaaggggcaagtacttcaaccccttctctccttgtctctaccccttttctgctttcctggggcaggggcaagtacccctcaaccccttctccttcacccttagcggcaagtcccactttcctggggcaggggcaagtacccctcaaccccttctctttcacccttagtggcaagtcctgcttttctagggggcaagaatccccaatcacttatttctgcaccccaacctcgtatctctgtgccccgaccgcttatttctgtgccccgaccccttatttccatgccccgaccccttatttctgagtcccatcccttatttccatgccccgacctcttatctctgcgccccaaccccttttcccacttttctggaaggtaagaacccccgaaccccttccctccgtttctctactctctcttttctctaggcttgcttccttcactataggcaaccttccaccctccattcctccttctactcccttggcctgtgttctcaaaaacttaaaacctcttcaactcacacctggcctaaaacctaaatgccttattttcttctgcaatgccgcttgaccccaatacaaactcgtcaatagttccaaatagccagaaaatggcactttgaatttttccatcctgcaaaatccaaataattcctgtcgtaaaataggcaaacggtctgaggtgcctgacgtccaggcattcttttacacatcagtcccttcctagtctctgtgcccagtgcaactcgtcccaaatcttccttctttccctcccacctgtcccctcagtaccaaccccaagcatagctgagtctttctaatcttccttttttacagacccatctgacctctcccttcctccccaggctgctcctcgccaggccgagctaggtcccaattcttcctcagcctctgctcctccaccctataatctttttatcacctcccctcctcacacctggtccggcttacagtttcgttctgtgactagccctcccccacctgcccagcaatttactcttaaaaaggtggctggagccaaaggcatagtcaaggttaatgctcctttttctttatcccaaatcagatagcgtttaggctttttcatcaaatataaaaatccagcccagttcattgctcgtttggcagcaacgctgagacgctttacagccctagaccctaaaaggtcaaaaggccatcttattctcaatatacattttattacccaaatctgctcccgacattaaataaaactccaaaaattggaatctggccctcaaaccccacaacaggacttaattaacctcaccttcaaggtgtacaataacagaaaaaagttacaattccttgcctccactgtgagacaaaccccagccacatctccagcacacaagaacttccaaacgcctgaaccgcagcagccaggcattcctccagaacctcctcccccaggagcttgctacatgtgcgggaaatctggccactgggccaaggaatgcccgcagcctgggattcctcctaagccgcgtcccatctgtgtgggaccc

SEQ ID NO: 1886960 - DNA, 4001 bp, Homo sapiens
tggtcctattcgtttttgaaactctctcacctagtattcattaataggactaagtgagaacagaacatccaagacctttaacaagggaccatcccttttgtgtttcctgatgttttaagagacaaaagtgcttttgcagctgtggcttctaagactaagagaagagattaaacaaagccaaatttactcaaagcacaacatatctgtgcatgtattcaggtctgtctctagcatcctagtcagaaaagcagtacctccctccatagtctgatacagatttcagacttgcatccccctaggacaataccacttgcaccattggaaaaatgcattattgctttctctagcagctgattaaattctagttccccatgatgcatggaacttgcttgaggactggtggagtacctggactatagacttcattctgaaatcccaccaactcccaaagaacccatcatacagcccatggtgcatgcacactccaggtaccactaccatatgactacaggcccaaccaccacctcttgaaagccagagtggacctacctctcttgaggctggccttgtagccaatctagttggcttctgtgtgttccatagccttgccatgtgccttggaccatgcaatattgatgatgatacaagtaatcctttagtgagcacttatcagtgtaccgggtgctgtgctaaatgtgcttcaaacaacatttcattgaactcccacgactcaatgaattcatttctattgcagatgaagcctctgagaagttaggtaatttttctctaggttacagtgcaagtaagtacaagagccaggactaaaactcaggcttgttagaagtgtccaaaatccatgttcctaatgacttgtagcatgagggttcccagaagctagctctgagatggagatttgtatgcaggagatttacgaggaatgtgcttcggatcaacacctgtggaaagaatgagttggaagcaggatggggcagatgaagaagctgagcactgatgaagtcccagtgaaagcctcagctagcccccagggaactctgaagctgggatggccctttagaatcatcctgttgtgatatagaagctggaaagaggagaaacctataaaataattaagaaacaattctatgtcatcactccagggaagctcgttaatttattcacttacttgcccactcattctttgattcactcattcattcattcagtgtgccagattcggtgctggattctgggggacaaggtacaaagtgaagtttacagtcaacacggagatgatgaacacatgagctagcagaacacagtcttacgggtgctcagatagagatgtgcacagggttccatgagagaatggacgtggggatgcactgaaagcaagtgggaggagccaggatgttgctgcctcctcagaggtgactgggctttcctagggcaggggaagaagggcattctgggcccaggggaaagactgagctttttagttttctccagatgggtttttttttttttttttttgagacagagtcttgctctgttgcccaggctggagtgcagtgtcacaatcttggctcactgtagcctctgcttcccaggttcaagcaattatcctgactcagcctcctgagtagctgggattacaggcgtgtaccaccgtgcctggctaatttttgtatttttagtagagatggggtttcaccatgttggccaggctggtctcaaactcctgaccttgtagatctgccttcctcagcctcccaaagtgctgggattacaggcgtgagccactgtgcccagtctcagatagggttatcttagttaatttgggctcctgtaacaaaagtcaagacagagtggcttgtaaacaacagacattgacttcttatagttctggaggctggaagtcagatcagggccacaacaactttctggttagggccctcttctgggttgcagactgctgacttcttatcctcacatggcagaaagagctagagagctctctggggtctcttttatgaggcactaatcccattcatgacagctccacccttatgacctaattactcccaaaggccccacctccattatccccttgggggttaggatttcaatatatgaatttttgggaaacacaaacatttagcccatgacaggggccaagggagtgaggtgggatcagaaaccaaggccctcagatgtgtgtgtggcagggagggtggtgggtaagaaactcatcagtgcggtttctgcacacgccctgtttatccaggccctttgattctccccaagagggaggagaccagcgaggagaccagcattgggcagaacagagaaaagaggtggcaaattattacccattaagttccagagccacagaagcagttataaagtagaaagatttgggaagaaggtgtgatcagcagaaagcagattttcttcctccccttctgctgggacagatgaagatgtggcgggcacgggggatggatgtaagagaagctgtggtagggagggctgactaggaaaaaatggatggtggggaaaacatactagttagctcttcaaaatttatcccagtgcagaggagtgcaggtgaacggacaggagataaagagagcagatgaatctcaggggccagggacaaaccagtagtcagggcagtgggagcctgacaccaaaggggtgtgtctctgccggggtctgtggacttcaggctggtgttgggtccaggagggtctgaccctgcagtggtggaccaaggtggggctgagggggtgaagggtgagagcacaggccttcaagaaggtaaagagtttgcccatggagaagaggacatagcggaatctacaagaggtcctatcagctaccccatgcttgcttctaggaacaaggacacgtggtcagaggcacaagggagtaattgtcagggatccaagtcacttgcagaggcctttctgaatggtgggttctgaggtggctgtatccaggtgtggcgtctccacccttggccttgcatggagaacccaggaagcgaagctacaagggcaaagcagaaggatggggatgtaggcagtgactgtgtccccctaaaattcatattgatgttctaatccctggtaccttggaatgtgaatgtatttggagatagggccactaaaaatgtcattaagataaaatgagctcatgtggtgggtcctaaccaatatgactggtgtgtttacaagagattaggacacagaaaacacacaggcagagagatgatcatgtggacacacagcaagccaaagagagaggccaccaaagaaaccaactctcagagttctagcctcccaatctgtgagaaaataaattctgttgtttaagccacccagcctgtggtactttgttatggcagacctggccaactgtgaacaatggccatttgatttcttctctcagtagattccaggcatgctgtcattgctttgcagatgcttactgagcacttgctgggtcctgcacccagctggctgctagggatagtgaggggcacgaggcactctctgcccttgcagagctcactggaggaataaacctttgtagaggaaggtttgatgggctttcctggaagaagtactcataggaaaacccaaaagctcaacagatgctgtctccttggttaacattaggagctatgatctccatcttcccatggcattagaggtttagatactgaggatcagagaggcaagttcagcatcagaaggcaggaagaggcagaaatctggacaccgattcctaactctaaagctgcgtcatctctagtgcatctcatcagctcttcccaatggcaccaatcaactttagcatactggccagccggaatagatgtccttgggcattcttaagatctgagactgtgatggttaattttagggtatcagcttgactgggttgaggaatgcctcagtggctggtggcgtccatcattcctgggtgtgtctgtg

SEQ ID NO: 1886961 - DNA, 4001 bp, Homo sapiens
ctcagagagccggcaagtggaacagagatttaaagccaggagccttagccctaggctagactgccgtataacagactaggaggcacccactctcagatctgggcagggtgggggctgcagttattggggtacatctcaggtgatattggggaccagctcctctctacccattgcccagattctgaggacctctgagggaagagccacatctcagccacattcatttctgtgtccacacccagccgctgcttggtaaatagtagatgcttaatgtttatttttggtttatgacctattttactttgccatcactgattgtaataaaacactgagcagaggaaacaatggatgaaattaattctggaagtggtaaggagatcagttgtggaagctagcatcgggaaaggctttgtgaactagacgcagataggccttgagggttgggtggagagtgtggggaagggctgtgtgaggtggggtgatgggggggggtggctggcagccagagacccagaggagggagcaggggttttgaagctgggggtctatgattggattctgactgtgctttgtgaccttgggcaagtcattccttagaacttctgtgtccttttctgctgtaactacgaggcgggtaaggccatcgcacagaggaaatgaggctccatgcaatgagggagttgacaaccatggacattctttgaggacttctgtgtgccaggcactgtgctttatatccattatgtgtatatgttatgtaatatatgaaaattacaaggatgttgtggctgtgcctagttatggatagcactcaataaacagtgcgtgccttcctccccagagtaaccctcctgagtcaagattataaatctaacaggtctctcaatgccttttgcaaacaggtctgggccatttataacatgcatgtgtcctggaaggtagacattcctgctgcctgcctttccctatggaagctggcagctccatttctgtttgcacagtaaccccttcctctgtagactgcatgggcaggtcccacatccatgaggacctttttgcagtagaacaaggaaagttatcatttacaagtaggtcccctggtgcttggccacacgctggtccctgtccacaaggacagtgcctgattatgatgtctgagaagggaggagggagggtctcttccgctcactttccagtatccacagtgaccagctgggaagcctgtctgtgttaggccgttctcgcgttgctataaagaaatacctgagactgggtaatttatttaaaaaagaagtttagttggcttacagttcagcgggttgtacaggcatggtgccaacatcgctaggcttctggggtggggcctcagggagcttttactcacggaggaaggcaaagtaggaacaggcacgtcgcttggtgaaagcaggtgcaagcaagcgagagagtgcagggaggtgccacacatttttaagcaactccgagtaagagctcactcatcaccaagcaggtggcccaaaccattcacaagggatccacccccatgaatcagaggcttcccaccaggccccacctccaacactggggagtacatttcaacatgagatttgggcggagacaaatatccaaactatatgactacctgagtttgcaaaggagcagaagggcttgtaccagtgagggaaaaggactgcagagtggttagggacccttcccctgccagattgaaggaccagggcttcccagcacagctgccaggatttacaggggtgcaattgctgcctcaccaaccccctagccccttactggcttcttaaggccttgccctcacctggccacatactcacgctagtcaggaatccatcttggcctctggccctgggcaagaagagcaacaggatggaattgaaaccctggagcagatgttagaactgagtagaggtgacctggctctctgaagctcacgcaggagtgatggtgacatgcccatctcaagtgggagctgcacatggagggcagccgaggttcctgcgtttccctccccgggccacttcacctcccctaggtgggttccaccccctctccttgttacatcatagcctctttctccaacacattcaacagctctctctcagcagtgccagcttcctgggtgtaaggcctgagccgtcgcttggccctgtcctcagaggccccccacgctggtctaatgctctgctctttgttgccgtcttgcaaatcctagtcattgttggtcaaaggaccccttgtcgtctttttgtcatgggccctgttcgttctgctgtgaggctgactcagggccaggtgccgtgcaggtacacagtaggagttgaactctgatcaagggcttgttttgtgtttatcttccttgctttgcaagttccttgagggtgggtctccccgaatcttgattataaacctgcaagagccttacaaaatgtcctgctttttgtggggtctccagaaaggcttgtgattggcagagggggcaggagagcagtgaccaggaagaaaaaaggctgtggccactggatggcaaaggagggctgtgcagggaggtatgtgtgacatgtggtctctggaggccaagctcacccctcctgcctcagtagcaagatgtgtgtagctgtcaggctctaggcaagacactttacacttgagtagcatctcccctcctcttcaccatctccctgggcagggctcagggcctaatgtccggaggtgaggatcttcagagaaacaatgttggcctcaaacccaccagaacctggctggggaagaggtcaagctgatcaggcgcaagaccaggtcaggcctcttatgtctgttaggaaacgccacagaaggacagatacccaccctagaagctgcaggacctcctctcctcctgagccctttcctccctctgctcccctcccctttctgttagccagacagtcagacggtcaaggttgatacctgagcactggggaattttatccatcgaaataggcctctccctctggaggactaaacagtctcagacacgacctgtttggagtgagaaatgaaactgcaaacactggcctcttcaggccaaacaggctttccttgtcctggatggtacatcaaggccacaggtccagggcttggatttccctctgggccccaaggccgcgtgctgactgggttcttttgtacagagaccagggaaaaacaaaagccctttacttcccaaagcttggcatactcctcagactgccagccaccatccccaaagatgccagggcagtgagcttacctttgcaagggcttcggatccactggggaggagtggccactcatagtagctgcagggaagctgttcttgcagaagctccagcacctcctctgaaagccagtgctaagcattccccgctagggagagggtgtaacgcagggccacagcacccactctcctggcttgggctggggctataggcagatcgggattaacatcccagccctgcacacaggtactgggtctggaccacaggttagatgtctgagtctgagcctcagtttcctgctccgtgggatggatatatagctataaaggtcattatcgggtccgctggcaaaacaagcgtatggaaggtaaagtattgcattaatgttaaacgtactgagactgataactgtgctatgattacgtaagaaaatgccctcatgtttatgaaacgcataccaacttactctcaaatggaaaaaaaaatcctggccaggtgcagtggctcacgtctgtaatcccagcacttcgggaggctgaggcgggaagatcacgaggtcaggagttcgagaccagcctggccaatgtggtgaaacccctgtctctactaaaaatacaaaaattagcagggcgtggtggcgtgcacctatagtcccagctactcgggagactgaggcaggagaatcacttgaacccgggaggcggaggttgcagtgagctgaggtcacgccac

SEQ ID NO: 1886962 - DNA, 4001 bp, Homo sapiens
acttctaatctttaggcagcagaaggcccattaatactcatttacttagggcctgtctacacacacatatgctgtgttacggctcaactcagctctatttagccatttagaacggtgggtctcggccttggctgtaccctggatcactggggagctttaaaaaatcctctttcgggctgcccactccagagtactgatttaataggttggggtgtggccttggtgagcagtcacggctgaaaaatcactgatgtagatttcagaatgaaccaatgggattttccagtctgctccttcttctccgtccttcctctttggagaatggttaaagacagaccaaccccacccttttcaaggccagagcacacggaaaagtcttatttcaataaactacacattattcctgagctttacggaaggaaccgatttgggttttgcctaagctggcagggagagaggtggagacagtgccttcccatgttctgcgtaatcctggacccaggcagcggctgtctccaccacaggccccaggcacctgtggcctgggcagtcctgccacctcagccgagtctcactcttgtggccttagctccttgagtttacagagcataatgcctgttaagcctgacacactatagtatcatggtattgcatttgagggtgtttatttatactaacacttggagcgtttgagtgggagcaggaagagaaattcaagggcatttgttctgggggagtttggagagctgggtttcttctcttccctttcccctccctccttgcatttgaccagataatttaaggatcatctgaagtgccgtttcctgctttgttcttgatatgtgtggcttgcgggtgtgtatatttatatccccagaggagtaggacatttctcagggcatgcatcggccacagcaaagctctggagcagcctcacagcacagagagtttgcaaaagcccagtggccaagtcaatgcttccagagcatcgtcccagctgcctctggagtccatgttagcattccaggcagagagtctttatgcatggatcttaggggccatctcatagaatttcctcctttcacagaagaaaaactgaggatagaggagggaggtgactggtcctcagtgagatcctggtggggctgggattagaacctggactccctccatgcttggtgcggcactccccaccacacccagctgcctcccaacacctgctgagttacgtaccagcaacactgctctttagctgtctcctgggaacaagttttttgtgtcctcagatcagttcagcttcactcacctactatgtatttggggagccaaaactgtaaaaccttcagcagaagaggcagtggtccaggggacatactgtaggttcccacccattagccagctaactggacaatagcatttttgacctccctccatgtacctttgcattgtgtcctttttttttttttttgaggtggagtctcactctgtcatccaggctggagtgcaatggcgtaatctcagctcactgcaacctccacctcccaggttcaagcaattctcctgcctcagcctcccgcgcagctgggattacaagcacacaccacaacgcccacctaattttttgtatttttagtagagacgggatttcactatgttggccaggctggtctcgaactcctgacctcagtgacctgcccacctctgcctcccaaagtgttgggattacaggcgtgagccaccacgcccggcctgcattgcgtctttaaagttttcctattcagccagcacgtgagctgggctgtctcaagtctaacccctggatgtggtcagtaccatctggctacttctaaaatcacccagcaagaatgcctggctcacaataaatcttttgactcattagaaagagggttcactcattcactaaatgaattaggattagagaggcatcacccactgacttgagtggtaattattgctgattttcacggtgctcatttagtgaggaacatgttgccagtttctcttggcgcttctaggatctctgtctccaaccttgctgatggggtgagatttagaagaggtccgtccacaccttaatgcctgtgttccatgtggaatgttccatgaagagcgtgctccatgtggaatgtggaacctgatagtttaattctctgccacatttagcactttcccttattctgccccttttctttcctttgctttctagtattattttagactgtctatcttctgattacaagctttctttgttgttttgggggatttttttagaatgaggaccacgtatgagttacctatggccacaagaatgctgtgtaactaaccccaaaacttcaggggcaggcagtaactgtttatctcacgtgtttggagtaaacttggagtggttctgctgatcctggctggcctcacttgcatgctttgagggtgactggctgtccacccatctaggctggcctcggcacagggaagttggccctgctccatgtgccacccatcctgcatcaggctagcctgggcatgcccttgtcatggtgatggcagaggtgcaagagagaacaagcaggaacttgcaaatcctcttaaggctaggcccaaaacaggcatactcttccccccaccgcattttattagccctaacaaattaagcccagattcaagggatgaaagtagactccacctctttgggggagaaggaccgcaaactcacagaggaacgggtgtgagaccattcatatcatcagtccaccatagacctgtgtgagttgtcttttatttgtacttaggctgatgttttgcaaatagcgaatgcctcatacatgcatgttgcataaaagtaaataaagttaccatttgctaagttttctattcaagattggattggctgcataatctagacatgagtttatctgttagatagatctagacatgagtttatctgtgaataagagtttatctgttagaaggaaagtttatgtcatcctagtagaatctggatttttctttcatcgggtgcagggcaagttggttgccactaagaaatccctcttcttatcatcttttccatcgtggggtctaccatcatcatttttaggattttagaatataaacatctgagagaaggggaacaaagagagggagaacttgccacactgaagtgtggaacttgctcctagatgggaaattttgtttcatgtattgaccactgagtgtatgttaaagaggaagaagcaacctctgcccagtgtctttaacctttgctcttgcttcttacccttagagtagctcatggaaagaggggtctctgggccagcagctgcatcagcatcacctgggagcttgttagaaatgcaaatactactgaatcagtcactctggctctgaggcccccgggagatctgtggcttaacagtccctctgatgatgattctgatgtggatgatatttgagaatccctgccccaactccagcagccatagaaactaacagattaggtcccctttgttgactctcacatacttctgaggatattacagcatagtctgaaccgtgcagtagtcagaaatatgttcaataccttctggtgtcaggacaaagacagaggcatcccattccccaccagcttacctaaatgttactttactttgcttttttggggggggcaggtgggggaggttgtgttttgagacagggtctcgctctgtagctcaggctggagtgcagtggtgcagtcatggttcactacagcctcaacctcccaggctcaagcaatcttaccatctcagccatctgagtagttggaaccactggtgtgtgccacaatgcctggctaagtttttagtatttttttgtagagatgaggtcttgctatgttgcccaggctggtctcaaactcctggcctcaagcgattttcccacctcagcctcctaaagtgctgggattactagacatgagccagcatatccggcctattttgctt

SEQ ID NO: 1886963 - DNA, 4001 bp, Homo sapiens
acttcaaaaggcagcttctgggattaaatggaacgcattgcatttaaaacacttagaatagagcctgacatagagcaagggattcatgaggattacttattattatttataaaccatactattaacacatctccctgttattctacagtttagtccttgacacacacacacacacacacaagagcactgatattcacatttcctaaaagtgaaaacccgtggctctgacttctgttagttgaagttcttcgtgcccttctgtccaccacaccacagcctggaaatgagcaagctcttatccctattatacttcagggaaggggagcagggagagggaggatttatgccctggcagcatggcctttgaagggccactgctagctcatagtaacccttgggaacacttgaaagaagtcatcttctggttggacactggcttgtaccgtgacacacaggctagcaagcagtgtgccggctgtattttagcacccgcttgctccatcggttggatactcttgcgcagtgaatgacctgtgcaaccatacgtggcagatctgaccttcaggccctggaagggcctggaaactaaggactgttggagaaagggggtactagcttcgctttctccaggcagtccaggcgattagccccgcacaagccctaagtgtataaatcatccttcctcgtctccctcccttcctcccatagaggccacgcctcccattcatgaacacaaagactgacatcagaaaacccttagtgtgaggggataccccaggccttaactggtctctgaaatcccccaactgaggttgttagaggacagaactgtggaaagcagtaaccagagggaatgatttttccaggtttcccctgacacataacgaacactaacttttgatgcttcaaaccagagcaggccagggccagggcaagtctgacttcctgaccatggtttggagaggcgaaggggaaaagatgggagtgggagctatccccggcagcttcttaatccctactgtatggccaaaatgcttggttcccaataaaggctcgtcagcccttgaggtagacacttctgtataaaacagaccagaaagaaaaccgcaggcctgaggatctttcctgggagtgggatggagtgagggcaggcaggctcccaacgcgcacgttcacacccactctcccagaagtagtctcttgagcctccagaggggctgcttcctgggtgcacctcttttcagctagaagcaagtcaagcctgacctgcgggatctggcagggctctctgtacttggattctctcctttataaagtgaggggtgtggatgggtggtttttgaaggctcctcacagctctgacaggcaccacctctgggggcttctattcactctcctccaaccttgtctacctggacaggcagggacagacgacaagaaatcgctcactctcacccccatcccaggaccccaaggccataaatgtgcaaggacagcagaggcctgcgtaccaaagacacatccccatcaattttgcttcggctctgtctccattgctcctgtagacaaataccggctgggggcccagctgggagtttaggtccttcagcctcaaagaacaaaggaggaagaagggaccttcccggaaggtgaggggagggagtcctggggctcctatgcctctccctctccatagggctggctgtccctctctttctcacagatacgggaggagggagtgtcctgtcttttcctctgaggctggtgacttcatctcctcccctctctaaggttggggtctctacctcagccccatctgttccctgggtctgaaatctccatccccctctcccttttttctccttgggactgggggtctccacacccttccctctcctcctctctcaggaccatgtctctttattccttttcaggcctggcctctccagccccggggggaggggtccgcattcctctcctttcttaaggccacggctccctcccccacccgctccagctcctcctccccaccccctccctccgccccgaggcattgtgggaggaaacaagatgtggggcgagagcggcgcggggagaagcccgcagtgcggggccgggcgggctcagccaatggggagcgcggacggcggcgcgcgcggcgggggggcgggggcggggcactatttcagcgggggccgcgcgtcggccgcgctcagcggcagagcggagcggagctgtgaggcgccagtgcggagcgggcgggcgggcgggcggcgtgaggcggagcgcgggcggccggcgaaactccaagggcggaccgcggcagggagcgatcggcctcgggctgcgggagccggagaccgcggcggcggcggctgctgcagctgcaggaggagcccagggaacaccgcccctgcctgtgctctgcctcgggccatcgctcctccccagggcccagtgcggactcgcctccgtgaaggtgagcggtgggtgggggcgtcccccgggtggcgggcctgtgtccgtcgcgtgcgactctacacgacccggccctcgccgcggtggccctgcggcctccttagccggccccaaggcctggaacagggctggccccgcagcccttggcgttgacggtccgggcagcgcagcgcgcccccgccgcccctccctctcggcgcagcccgggctgcgccaccctttgccccggccaccctcgtggcgctgctggaggcccgggctgcggagctgccgctgcccccgcccccgggagtctctctgcgctgcgtggaggcccctgatgtcaggggccggggaagagggggtggagagggctcgggcgtgacgcggctcctcctgccgccaccgccaccctctggggcgtccttcctgcagcgaggacgcccagtcactccggcgctgttccaggccgggtgggggagggcggccgaccggccggggcctgcggacctggccggcggcgcgggcgggaggtcggggggaaggaggatgcttcctcgttccccaggtgctgcccttcgggaccgcagcgctctggaggatgggatagtggagggatacggcccacttggagagcccgaagagggaagtagaagtgtgtgtgtattggcgggtggggatggtggtccgtgtcattcggagatttagcctttttttttggttgcaaaaccaggaatagaggatgggagctgtcctggggtgccctttgtgcttttcacaggagccttggctcgtgactgaggctgctggcctggggccctctggccatcttcctcctatctggaggcccaggtcccttgctttttcccaaggagggaggggctaggctggacaccttcctgtgctttgcttaccggcaccttggacaggggtggtaggggttgggcttcacctctctcagatgcctggggggccattgtagtcgtaagaccaatattatgtaaccgcaggctctttcctggagagtaaggtggcttttaattactgtaacaaagttgctcctttggactttgggaatgaggcagtggagcaggtgagcttgcaggcaaaatggtgccaatttcatactttcactttgctgtctaaccaggccccacccccacccctgggtttgtaaacagtgcccccttctgagtggtaacctggaataggccaccaggtgacactagtttttcttcacttatacagagccttataatgtaagaacctttctccctgtgctgctgttgtacctttgctcagacccatttgagtttaccccatttatctcatttcaaccattagtatttaaaatgaagatgttgatttgcccaaggtcacgtaactagtcattccttgaacagggttctccgaatctttcctcagcaccacatggtgctcacagactccagttgaggctctgacttttcctctccagaatgtgggggcagagggtgctggtctactacctctttgctctgccagtttctgccgaagtggaacca

SEQ ID NO: 1886964 - DNA, 4001 bp, Homo sapiens
tcctttctttcttcaaatatgtcacttttcagtcaagttacttgggtgaaatgcagctccaagtgcactaataaactttaaatatggactaatatacctgcagtgttatgagtatgtcaaaaggagaatttttttttttttttttttgagacagggtctcactctgttcccagactggagcaataacggctcattgcagccttaatctccctggctcaagggattctcccacctcagcctcctgagtagctgggactacaggcccttgccacagtgcccagctaattttaacatttttttctagagacagggtctctctatgttgtccagtctgctctcgatctcttgggctcaagcgaccttttcacctcagcctcccaaagtgctaggattataggaatgaaccgtagtatctggccaagatgagaatttaaacactacatttggtattctaaatttacaaatgtaccaaatgtactaaaattatcagtgtactaatacatattggtgctgcattgtggctgtggctgaattatgttatattctgttttttttcctgtttcctaaatgttcacacattttgaagtttaaaaatatccacgacatagttgaaatgttagaatacttacacatatctcctcggaaaattcactatagtctggagcctggctctcacccttactgaaccagaaatctgtcagaaagatttaaattagtaagcacagagagacttaagtatgccttctaccaccgccgaccacccctacccccacccccaacaaaaaaagaaagccaatgtgtttttttttgaggtgggggtctccttctgccgcccaggctggagtgcagtggcacgatttcagctcactgcaacctccgccacctgggttcaagggattctcctgcctcagcctcccgagtagctgggattacaggcgcccgccaccaagcccgggtgatttttgtatttttagtagagacagggtttcgccatgttggccaggctggtctcaaactcctgacctcaagtgatcctcccgcctcggccttccaaagcgctgggattacaggggtgagccaccacgccaggcctaaacctttttttttttagacggagtgtcgctctgttgccaggctggagtgcagtggctaatcccggctcactgcaacctccgcctcccgggttcaagcgattctcctgcctcagcttcccgagtagctgagattacaggcacgcaccaccacacccggctaatttttgtatttttagtagagacggggtttcaccatattggccaggatgtggccacgatctcttgaccttgtgatccacccgccttggcctcccaaagtgctgggattacaggtgtgagctaccactcccctcctcagcttcgttttcttaatgaccttttaattttagaacagttttagattaacagaatttattttatttatttattttttgagaccgagtctcactcactctgttgcccaggctggagtgcagtggcacgatcttggctcactacaaactccacctcccgggttcaagtgattctcgtatgcctcagcttcccgagtatctgtagcggggattacaagtgtgagccaacgcccccggctaatttttgtagttttaatagagacgggtttcaccatgttggccaggctggtctctacctcctgagctcaagtgacccgcccgcctcggcctcccaaaatactgggattacaggtgtgagccactgcgcccgacctaaacttcgttttcttaataaccttttaattttagaacagttttagattaacataattattttgagggcagtagggtcctctataccccacgcaagacaggtttttcaactctaacttctacttccaccccacgcagactctccgcacctctctcctctcatctcgggttctgacaaggcctgatcctcacagcccaaattcacgattgtgaggaaaggtcagctcagaccaaacgtcaccgcccagacagacacaactaggtcaggcgtcaagctcgcggacatccgagcccggaaaccctaacactcctccaggggtaggttctccaagcctgaacatttttaacctcaaaacgcccaggatctcggaggcgtgtggtggatgccacataaatacataacacataacaacgacttattatttagcgccaggcctgaaggccgttctcaggcgcagctcgcttgttctcgctgccaaaacaccccggcagccgtgagctctccactcggcgcggtgcgggggcggggctaggaggtggagccggggcagggcgcgcgcgcgcgcgtgagaacgtccggggagcgcgcgcgccgccgccgttgccgccgggctgagagaagagcttgcggggtttgcggttgatggccccgactgaagggctggaggcggtgtatgccgctgttcttgctgtcgctcccgacacctccgtccgcttctggtcatgagaggttaggcctgggggaagcgggcagaggaggaggcggcgaggggccgcggcgcagggggctctggggagaataggcactcgaggctcggacgtgggtggagaactctgccctcggagattccggaagagttgtgttgaattttcttcccttttttctcctctttcttgtctgtgcatgaaggaaagtgggagggttctatgttatttatagaaaagacactgaaagcctgctgtccaacgtcgctcttcagttttgacgaaataacacccgtggcgtcggggcctcggtgaaagcctttagtgaaaagcactgaaacccaaaccgccagacacggtgactgcaccactgttcagtcctgggagtgaaatagaatgacacagaacattccctgacgttaactctagcctcctcctagacaaacgggaaaagcacggcagtgtgggatagcctctgcgttttgtcagctgggattccgactctgttcttctgtttctaggaggtccacactggatcatttattagagagatctttctctgctagagtcctctttcctcacacccctccctccgtaatacacacaccaccgacggtggcattttattgggcggactgtgtaactgcttattcagactaaagagttacctagcaattacgtggtgactctccaaagtatctatgctttaaatgtatttaggtaacattcttttgcgcggggaggtaatattattggtggcaccattaattattggaaactttatgagctttgggaaagctgcttgagcagaaaatctaatttgtaggtcacctaagtgcagtgtttattattagttacctatgatgataataaggcattaagatttaatgttgttttttttcctaacatttccaaccattaaaaaatactggctcactcttccttatgaaacttctttgatgtagaatctacatcagagatgaaactgcaccatttgggaaaagtaaatgtaccagagtacccagtgaggactggtgctcattaacatctgctgggtacccatacttcatgactgttttgcggatgccttctgccattagagaactggaagcatttgcagctcaacttttttttttttggtgcaaatgttccctaaaagatcatttgtgtagggcagcagagccttggcattaagggagaagggaggagtccagtgataaataacctgaaaattcatctgttgtgattatttgctactcctttagtgaataaaggatacccagtgaggaatatactgctggtatttaactgcctgtttacttagaatatcttttatttgattttttaggagacagaggcctgaagcaaagacatctgggtcagagaaaaagtatttaagggccatgcaagccaatcgtagccaactgcacagtcctccaggaactggaagcagtgaggatgcctcaacccctcagtgtgtccacacaagattgacaggagagggttcttgccctcattctggagatgttcatatcca

SEQ ID NO: 1886965 - DNA, 4001 bp, Homo sapiens
catctgttttcagcagcttctattccatggaaaggaataccttggccttttaataggccaccagtgagtctttttcttgtagctgttgttaagtaaaggttaagaaaataatggtaggccgggtgcggtggctcacgcctgtaatcccagcgctttgggaggccaaggcaggcagatcacctgaggtcaggagattgagaccagcctggccaacatggcgaaaccctgtctatactaaaaataccaaaaattagctgcgcttggtggtgggcacctgtaatcccagcttcacaggaggctgaggcaggagaattgcttgaacctgggaggtggaggttgcagtgagccgagattgcaaactatactgcagcctgggcagcagagtgagactccatctcaaaaaataataataataattaagaattaaaagtaaaaaaaaaagaaaatacaggtaaaaggaaggtaagatggtgagtacagagaaagaaatcggttgttccctgatgtgaggccaaggcactttttctaggactcttccatggtgggtcataacgagtaccctctagccaggagagacatggaaaaataaagcccgtacttgagaccctacttttcatgactggtctgctcctgactctcacctcattgtcacctcgatgaggtcactggggccaagaagagtatgggttgaggtgttcagaggctccaagggtgtttcaaggaaaaacggcccaggccacaggatataacactcagtgaggacagagagctctgtggacgtgctgccaagtacccagtgtgcagctgaggtggccatccagaccccgctgtgtgggctgccattgggacaggggcgagcagagtgctcggcagggctggctggtgggaagatgcacttttccatttcccagcacatgagtcatcatctttggtcccctgtgctgtgctgtgcttgcctggacagtggcaataagggggtgttgtggctgagtagcagcatctgtgccgggggtggagaaggaggggggttggggagagggtaaagattgaaatccttcactaatcagcagcagttcgaatcacatttttatgagtaaggaagtgataaatcagcgctgtgtgttcaacccccaagtcccgtcagccagtgcccttctaaaggtttctcccctggccagtctgcattctgtcagagttgccacccaccatcagggccctggctgcctgaaaccaggaagcaagagcctgatgctgccttgccctcccaggtactggggtctgtggtgaattggcagtcactgcaagctacagaacatctgggccatcatttttctttccattccttcttggacatgtccttctgggtgggtggctgcatatgtcagtttccggactctgtggagaaggagcattccagccggaagcagaagtgatcttgtggcccaccaggccattgagatcctcacagtctctacctgggtcttccctgtagatgtggtgcctaaggagtgtgatttggagagccacaggggagcagattcctttctctaaaagtgtgtcctttgctggtgcctctaatgctaccgtgaatcatttgtttcttgtgtgttcagtgccacccttgtataactatcttctttctgcaatatcagtaatccaggatggaaatcatattgttgctaacgttttactgtgattacttttcaagtgtgtagaaaagctttggacactgcagaaggcaaaatgaaaggaaaagtttagatggtggtgagagaatggcatctttgcctttccctaggttatggttttcctaggagcccactctgctcttggaggcagaggatgtgaggccagatttgccccccttcctacagggcgaaataagttgagtaatgccacattatttaaccaactaaactttccagtttcagcagtggtcttaaaactcacgggttcacgggtgttggtggagagaccttgatctcctctcggttgggccctatgcagagtcctacgtcagtggatacagaattctagaatcctcatactgcacactcaggtagttggggatagataaatttgaggggtgggacaagggacgtttgagggccttggcatagggcctggtatgtattaggcattcagtaagcatttgctgagtgcatgggtgaagaaggcaacagttctgggaaagccagctctcaccgagcagtgtttcttacgtggaccaggtccaaagctggtggtgagataggtggttcccagagtgatgtcataactgataatctctctaaggcattcctgagcctgaagcgaggaagggctttctccacgtgcctccgtatttaacacttcggtagtcatctcattggttgacgtggtgccggagggtgacctattgatctaaaccacaagtactccaagaattttaatttttaaaaattttgtaatttaaggaaataaaactctagtttcttgaagggaagaattgaagcagcattgtggtaggggagcactgaaaccccattgcatcccccatctgtgcccaatttgttccaatctggcccttttttttttcttccttcattttctctccccctcttgttctctctttttcaaaaatgttttataattcctggaatcaaaaccacttcaggcacacactgttttattttactgtattattggattataccgcctataaatcactggatgttactcattggccaccactggaataacttcccttttctgtgccctggctccctctgttttcctctaccagtttcatagcacatacatccatttagctttgcagagaagccccggtggcagcaagagggcacccaagagacacttcttgcacgtgctattggtattgcctgcttttagggaatatttgggagctgggattaaggtagagcctgactggcattcctttcattatcatttatgcttgctttttttgggtggggggagggagggacagaatcttgctctgtcgcccaggctggagtgcagtggtgcgatctcggctcactgcaacctctgcctcccgggttcaagcagttctcctgcctcagcctcctgagtagctggggtcacaggcgcccaccaccacgcctggctaagttttgtatttttagtagagacgggggtttcaccatgttggccaggctggtctcgaactcctgacttcgtgatccgtccgcctcggcctcccaaattactgggattacaggcatgagccactgcacccagccttatgcttgctttgaatggtgttagtaatcctgaattacagaaggtagagggagtgtcacatgtgggtctccagagggagagagagctagctagctagctacagctgtctgtataggactgatagctttaacttgtaggtgtgggatgtttcatgccattgttgtgatgggaggtgactctagttgagtttggttcgcaaccgaagtgtccttgtcttccagcatacaacaatctcagagacgttcagaaaagcagtatgctcctctgtggtgattcacttctgtcgtgagtctcttacccaagcagaatgtatgaagtgcctaatcctccgcttgtcagaacagttgtacaggaaatccacctttcataaggggttaggcttgagttagctgtgtaaactggccccctcattcctcctcctacatctctggtggtagaaacccttgggctttttctctacaaggatctctgtgggtagatttccgtagggaatcattgccacctgactttcattttcaggatgcctcagtttagagaaaatgaacagagccagcctgagcaaggaattttgtgagaagtagattcaaagtagaagtagattcaaaggtcagaataggttaggctttggaaggcaggccagagaaggatgcatgcttcagctctgccctctttccctgtgggggagatagaactcttgacaggccgcttagtgcagactgctctcggcactctctgcc

SEQ ID NO: 1886966 - DNA, 4001 bp, Homo sapiens
cacagtttgggggctattggatcgaggacccggagaacgtgggcaccccaacatcgctggggagcagcatctgtgaggaggaggaagaggacaacctcagccccaacacatttggctacaagctcgagtgcaagggtgaagccagggcctaccggaggcacttcctggggaaggtgaggctgggggagaggagctgctgggggttgggggcagaggctggggacgctgggagagaggaggtaccaggcggtaggggatggggagaggttgagggaggctgtgggaggctgtgggagaggagctgccaggggtgggggtgaggctgggagaggctgtgggagaggagctgccggggatgggggtgaggctgggggaggctgtgggagaggagctgcggggggtgggggtgaggctgggggaggcttgggggacagaggagctggcgggggtggggggaggggctgggggccctgggggagaggagctggcgggggtgggggtagggcagagtgccccccttttccttggcctcttacctccttcctagtctgtccttttgttgctgcctgctgctgtcttagttggagaggtctgagggcctctgtcctgggataggggacggggcaggggagccatgtaacaatcagggaggcccagtgccatgagtccttgtggggaccaccccccgcaaatgtttcgggaggcgatggaatgggtagtgtttggggtgaaggacggtggctggagttttgactgttcgaggaaaaatgtgttctcacacctcaagaagtctctgtttccatctaaatcacgcaaatctctccgtcctcattcaggcagatcctctgagtgcttgtactgcatagtgtctgcgagcctctgattgcttaaaagtgacaaagttaaatttaaaagaatagattctgcccttcagatttaccaggttcttgatgtactgagggcagattccggaaatctgtagcctgaggccgctttgcagagtctcacgtgacgggaggctgcctcagagcccctgggtcttgttagcatgcagattccagggcctcagtctgatccagcaggtctggggagctgtgtttttcgcccgtgttccccgagccagggagtgacccactggctcaggacacctcccagctcccctgggtggaggtgccagggttcctccttgctgtcttgccccagatagtgtgaactggtgagggccgccccatgggaatgagaatgtggactcggtatcttgtggttaagaacttgcccttcagagtcaagacagctgtgcgtttgaaccctggatctgtcccttactcatcgtgtcatcctgggcagtgacttaaccccccgaccattggttttcccatctgtgaaatggggatgatgttctctcccggatacagctgtggtcaggactgaaggagatagtgggtattaagcccctggcacggtgcctggcgcctcctgaggatccggccgtcggtacctgttaatgtcgttgtcattgtcatcagtagcatccttctcttccttgttgctgtggggcttctcctggtgaaggaggtggtttagggggaacatacctggaaggtttcttcctccttcctgctcacactcagtttctttttttaggatcatctaaacttttactgtaccggcagcagcctggggaacttgatcctgtccgtcaagtgcgaggaagcagaggggatcgagtacctccgggtcatccttaggtagggctgttgcgctgcttgaggccacttctcttccaggcagggctctcatcggtggtgtgggggctgggatgggactcagaaataccagactgaccagtctggtctgggtgcactggctgacggggacaggcctgctggaatcctggggctgtgtctgaagttgcctagcagggagacccacgcgctccaccagttagctgacagtcagaggggcatccaggtctcaaggtcacccagactgtaccccttcctgcccctctttcttacaagtccatggctctgaggaagacgggaagaaaagtagggatggttcagtgtgactcatcctgctgagacacagctccgagtcctgggagagggttcgccagagtgctgcctgtggtatacatcttgccaggaaagatagtgccctgtgtgtttgttgtatgggctgggttccctgagatgcactgatgttcacaacaggagcactgatttatagcggaagccagggcacctctctctggattgtgaccttctcaagggcaggagctggaactggtttctgtttggtttagctaacatgttttgtaaaacctcctctgtaccaggaactgcgataggtgttagagataccatgatggctgagacttggtccctgttctctgaaaggcatatggtttcatgaatttaatgtgtgtcacgggtatgattttagcaatatgcacaggttgctatgggggcacgaaggaatctgtgtcttatttatctctgtccctggttgggtggtgcttagcagaatgctgtgaacctgtcaggctctcaatccttatttgtggagtctaattgaagattcataaaggtatttggaaaagagcaatcacatttttttttcctgcccaaattttgagataaatattggagggaataaggacatataaccccactttgggaaaggtgggggtccgtggtttcaggatgtcgtcagcacccatccaatcttagtttgtttcttatcaagaaaggaagcaattttctctacagaggttcacttggctggaaatcatatttgcaaggcatagaagagtcaattaaatagcaagagccaattttctgagaggttaatacctggatctccatctccaaataggatttccagctaggtgaacctctgtgaagaaaattgctaccttaataaaaatcagaccgagactgggtagcatttttgaataagatgacaatggaatacaaagatctaaccccctttttctaatactgtatcctccattaggactggaaatgctgcttcggggctgaaagctaagaaaaatgccgggcacgcaacacgcactttgatggttttttgtttttgttttgtaatctatgggggcagttaggactaaaagtaggtgaatattgagagttgaaccccagattctcttccttagaaagcagtgttgtggccaggcacggtggctcacgcctgtaatcccaggactttgggaggtcaaggcgggtggatcacgaggtcaggagatcgagaccatcctggctaacacggtgaaaccccgtctctactaaaaatacaaaaaaaaattagctgggcgtggtggcgggtgcctgtagtcccagctactcaggaggctgaggcaggagaatcacctgaacccaggaagcagaggttgcagtgagcaaggatcgcaccactgcactccagcctgggcgacagagtgagactctgtctcaacaacaacaacgatgacaacaacaacgacgacaacaacaaaaagcaatgtcgtatgggaatatatgaagttggagatctagaagaatcctgtcctctttaggagtgagagtgagccctggaatagacagggatctttccacatagaattatttttgttgttgtgggtcaacagcattgaaatcaatgccccaggaagcccagcaagctcaaatgtggctctcccagatggaaagctagtaggtagggtggtgacgagaagccgtaccccagctcggaagttgggcagtcacatcatgtacttggagtgattgccaggccaaattggaaaccagacataagaaattggctccacggtttagcagctttgccagacacaaagaagaaattatccagagatgaaattcccctgctggcggtgactactgtccaaacttcttcctcattccccataggcttctggattttttaacggatgtcccaaatttataacaagcagctctccagtctaagatctaagtattcta

SEQ ID NO: 1886967 - DNA, 4001 bp, Homo sapiens
cactagcaactctattagcctttttaagtgaggttcttgaaaaaaaataatgcgtagctcaattttccaatggtgaaaccgtaggtatcataatactttaaggaagaaaacacttttggttgcaggtctcttttactgcttttcaaatggttgtgtgtaagcaatcatttactcttaatatctaccttatccatggtaatattccaagcaagatattgtatactcttccttggaaacacccttgagtatttaacaagatagagtcctctagataacatagccctacttgcctaaatctaaactcttgaatataatgaaaagtctcccatctggaccatcttggaatagtcatggtttatagctgttaaactccaaatcagttacgtctcttggcattaaatacgatttgccttccagtttgtctcattagcacttttcagccctctctgacttagagtcccaggccgttgatgagggcacaggtgggccgtagggttaagcagaaggaaggaagccaccccctgcctgccatgctcagtgatggaccactgggtcctacccaatctattttcatctcccaaggccttttatgaccttgctttagagaaagaaaaccgcccttcaaaggcctcgctctgtcaatttcccccaccatatgttcttattaaaatgtttatgacactctttatcttaggcttattatcttaggattggtattgattaataaaacatgctacaaactaaaacttactatttagattttaaaaagtgggaataacaataacacatatatgattttaatcattttctaagcaaatgtttctagatgcaaagtagtctcaatagcaatggagaacactatcagggcatattattttcaaactagaaacacattgaatatatatttgtttgggtcatatgcctcatgatttttttttatgagactagataaagtatattgcaaggccgatagcagcagagcatttattgacatattttaggtgttttcctattgactgtagtttgtctttgtttgacaaatatagccctgtcaattcctttgatgatggtgttttcgcaaagtactgtatgttcagatattagcattaacagcatatggtaaataagctgtttatattaaagattttcattgtcttattataaaagtagttatgctcattgtaaaattttggaaagcatagaaaagagtaaggaagaaaataaatataattcatgatcccaccacccatttataaccgtaattttttaataaacatgtggatacattaagatacagctatactgcatacatacacacatataaacaagtaaaatatataattattttggtaactctattgcataaccaattttatatacttctactaccattttactatgaacattgcctatcaggacagaattctttataaacagttttaaaggctctgtggtaaaacattatgagggtgcagcataatgcttactcactcttagcagtatacaagaaggctgttttcaatttttcactatgattaacgatgccataataagcagcattgtctcaatctcatagattttgtgagaggtaaatgagatggttcatgtgaagttcctaatataatagtgatagatgttcaaaatgccttcctctccagctttcttcctctccctccacctatgtttctccttttctacctttaatgcatttttttttccttaaaaataagaccctagaattatagctacttggtgaacgtatatacacttttttttaaatttgtagtaatttttacttccccatcaaatgcagttatgtgcatctagttcttgattggcttgagatgccttgttaacctctgtcccagtctcaatcccatgttaaaatatagaaaggtgggaatgaaggtgtgctctgaagtcagttatcacgggtaggagggtctgtgagtacatttccaagtccttgctgtcttccagtcttatctagctgaaaccatcagcccatttggttcctgggcgtacccagatagaatggtgatgctttaagagttccatctgcactaggcatctagaatttgatttgttgtggaaggtaagatccaaacaccttcttgtccacaaaacccattgaattgtgccatatttattccattcataagattggatcctttctcccatttctgatttatatatactttacctccttcttgcaattgtaatcctgtcctacacactagtctgtttggctgggcttcaagcttctgtctggttcctgccgactccttacccctggggaaatgcagtctgtttccaactggacaggccatgtggaagcatattgctaccactctgccaggtgtacttagaagtttttgctctcctctttcaccttcaagaactaactaatttctttgagcacttatagaattccagatcaaggctaaatttcccattcctcttaggtgtgtagaccatctctcttctcaaagcactgaccctggggctgatcagacaatcagttttgagctcatccgtcccagaatccttccttcttcatggcattggcaaatgccaccaacttctcagcctgctcagggtcaagccagctcatgaaaggacaccctctggtgtgctttctggctgtttcaggaccacaagaagaagcagcagctcgcaagaaacatgttgctaaatagacctggcttctatgggaatcccggagttaagcattcccacccctttgggccacctttcacatttgattgattttttttcgattggttgtttgcctgacctgatcagagagtttggacaggagtttctgttgacactttatttcactttgggtaaagtttaaacatgacttatcacaaccctgacacatctggaaggccatattttgcccccctcctgttgtctacctctttcaatgatgagaatatagggcataaaggccttttttgtacacgaggagaaagttcattgccttgggtccttttagaggtaagtcttaggccgtctaggttataatcactgctagatgatccttctcttttttcccattgttaaaaaccttcatacttactttatttcccacaggtgaaaaccatccatttcttggagaagtgccacggtggggttgcaagtcccaggatcaagttttcgatgtgtctctttttcccgtaaagtggctgaaatctgaagctgaatctgcaagtgtcatggagtcattgaatctcacagtctcaactgataaaagttattaaaggtcgtctggttcagccttctacttgatgtggaaatcctttctacagtaactctgtgtgggaatcacagttcacttaggggcttagtctcatagtcaaaatgtcttcttcctaagtgggaaattacttccagcttctattcattcagtagttgtttaatactatctctctctctctctatatatatatgtattatatatatatatatatataaaatatataatgtgtatatatatctatatatggatatgtatacgtatatatacatatatagagagagagaaagagagagagagagtatatctccatctaaaagcagaagcataaaacattatacctttaacaccaagatccagttaggtgtgagccccacaggcatgctgctgggcccatgggaccttaagtttagtaaattccagaatttgcctttaataagttcagagtcttaatatctaaatatatattttaaaagatgtctaaaacaagtttcctactaaaaagtgacttatagtctagaaggcaaggaatgacagtcactcatactttctttcatgtggtaatcataatggtaataagaatgataccttacatgcattgaatgctttctctgtgcaggtacagttttaagtgcttgacgtgaattaactcatttagtcatcataataacactgcaaggtaggtaagcacgttcattaacttacccatttcacagaggagaaaaccgaggcacag

SEQ ID NO: 1886968 - DNA, 4001 bp, Homo sapiens
aataggtcagattcttgcagaatctcagaaagatttggaaacccaggagcaagcatcagctcatgttgaaccaaagagtgggcccttaggaagcgtctgccgcacccagcagacacagtggccctgccattaccggggacggccctcactccgccagacctcagctggtgccagcccaggcagctaagcgggtcaccggctgtgggggagaacaatgcaccatcctgactccacccagagtctgctctgggtcggccgctgccaagataaagacaacctgggccaatgagggtgtccacgtgtgacttggctctgaacgtgcagtgaccgagcaacctttggtgacctcccttcagccaaatccaaggatccagaagttactggtgcacagctgtgttccatcagctcggaggggagaatgtcttggcatgaatcttaggattaccagctggctaagggaggtcagccggcctgaggccctgatgctcacgcttgcatcaggggcttcgaagacagtaggagcctgtgctgtggccctttgcattcgcacggccgacttagaggcactgcccatgctccatctcccttcctaccatggacgaatttaagagaccatagggaaaggtcagagaccctctccagcctcccctcctcgccgccgcctcttctgcacgtctccatgggccgtcaaggctggatcttttcttactgtcgagagagacaaacaacagagaatgaacttgaatttagggtacatctaagaagacaatttcctaacaaaaggcattgcttctggctggtcgcggtggctcacgcctgtaatcccagcactttgggaggccaaggcgggcagatcacctgaggtcaggagttcgagaccagcctggctgacgtgttaaaaccccatctctactaaaaatacaacaaaattagctgggtgtgatggtgggcacctgtaatcccagctactcgggaagctgaggcaggagaatcgtttgaacccgggaggcggaggttgcagtgagccgagattacgccattgcactctagcctgggcaacaagagtgaaatccatctcaaaagaaaagaaaaacaacccagcattacttctatctataagaagcagcagcaagactggagcagttccatcagcctacaggcagggagccctgtaggctgcccccgtgccagggcctgtgcccccaccctcctcccacctgatgggggcacccccagccctgggaccctcactctgagtgattccaggaggttttgcatgtccagacacaacttcaacaaacaattcctcacattcttctcttctccaccttcctccctccctcctcttcctaattctcctcattggccactcctgggcccgaggccggctgggctgggagaggtcgtgttttgagccacagactcccgtgctcacgcccagcagtgcttgctgggaagttctaatctggctgcttcagagcctctgctctcacttgcattcttgggttttttggtccttttggaggaggaacagattagcagccacgaggggacacctggaattgctgccggacgccttactgcagacgactccccacttccagcctccaggatggggcatgggcaggacatttgccttcttccttcggtgttccccttccccaccacactctgaggccaccgcctagcttcagggaggcaggacttagcagggaacgctggtgtcctgtgcctacaggtatagctgttcttgccctgagcatctgtgttggtgggacatcctcctgaggtcctgtggctactctcttaccagaattggcttcttgggacacagcgacagagcctccgtgaagcatgacagggtgggcaaccccacctctccaccctttcaagcccaggaggagggtggggggcctgctctgtggagccgtagttgctggcttgagaatcccgggccttgcttcagctcccagcctggccgttcccttcctgtgaggctctgggagtttcctttacctctcccgtctttgtttgcacatttaatcagggctttaagctaaatgatcaccgtgaccctctctagtgctacagtttatgggttttgtgattcagaaggctgcctggctgcaaagtagggtcaggtgttggggggcagcagctgggggagccacccctccctgtgactccctctaacctggcaaaccccagagcttcaccaggcctcaaaccccactcctcccatgccctgggttggcaagaaaacttgggggcagggagctggttgaggacagagtgaaaacgcataagccgaccctgtcaagggaaggtgtatcccccgatcctgactcctccacccaggcgtgatgagggctacgggctctgccttcccgagaaggtatttgaaagccttcctcctgggcttccaaagggcttctgcatttcactttcctgctgccaaagcagtctcttcaggtcggtccattttggtttttattctccgtttccaggtaggtgggtggccagtgtcagagcttccggagtgcgtttgggcttggctgggcctgctccccatcgctgctcttcctccagggcagggtccatggaggcagccctgggtagggaaggctctgcggggatgcactggccgcttcccccttgtctgaccctcccattttgtgttctctgcagcctgtgattgccaccctgtgggtgctgctggcaaaacctgcaaccaaaccaccggccagtgtccctgcaaggacggcgtgacgggtatcacctgcaaccgctgcgccaaaggctaccagcagagccgctctcccatcgccccctgcataagtatgtgtggggcaccctgcttttcaagtctctggctttgtgggggacagtgagcttttgaggatgctagtcactgatgttcagtgggttccttttttggttggttgagtctcactgtgtcgcccaggctggagtgcagtggcacgatctcagctcactgcaacctctgcctcccaggtttaagtgattctcctgcctcagtcttccaagtagctggaattacaggcgcaagccttcatgccccgctgatttttgtctttttaatagagatgggatttcgctgtgttggccaggctggtcttgaactcctgacctcaggtgatccacccaccttggcctcccaaagcgctgggattagaggcatgagccaccgcgcctggcccattcagtgggttctgtcttcaatgtgcattcctgcattcaaggcctcatgctcagtgagtccacgtgggagaccccccaagctcatagagttcttgcagaagccactgggggctcagcagagccagcctgtctgaggctgtctatcctgacaaacactgagtctcctgtttctggggaaaagcaagcccctctcctcagcactggccccattctcactgtccacctggaccctggatctgggtgggcccattccaggagtgctgttgtcactattgccggaatgccggcattccccctgcccctggtgggttcagaacagaaaggacggacagcccagggccttcgagaggagctgggcagggcttccatgcacggcacctgtgtccctaatgaaggatgatagcaaccctgaggcgttccgtacagctgttcgcaggggctcgctaatagcaaatgaccagggtccaagccttggtagagggggctcagcacccatccagggcagagcaggttgaaatagcttcacaacaacctccaattgtcagcctcacagtttgtcaaaatccttctgtccatccagattctgcaaggtgaacatttttagacagctgggaggaaatctggggttcggaaaacatggggggaaagctgaggtctcccgtcagggaattaggagttctcaggttgctcagaaatggttggaaccaacatttcaaattcccaggtggaaaaatcaagcctagacacgagagctggtgtttctgaatcagaggctgaag

SEQ ID NO: 1886969 - DNA, 4001 bp, Homo sapiens
ctagtctccaagttctgttgcagtcctctggaaaacacggtttttattttagcagatgattaatccaagtggattcaagctttaagctctctcttgtcagtgtatacagagaaaatggaatatccatgaggaggagtctgaatttccaaagatagaatgtgtttggaggagagggggcaatgggaaggagaacattgtaaatactgccctcagaagttaataattcaatattatttaatttttactattacatgtatatgatatgtataatctatttgtgttatagatacgtaatattgggaacatacttatatttatttataatgtataattttgagaattttacagtgttttaatttttctaagaaaagcacaactccaatagtccttctttgaattcccaggagaattccagattctcataatactaccacttatcaaaatgtcattacatgtgccagacattctgctaagcaatgtgcatacattgttttatcaaactttatggcaacaccaccaggtaggcattgtttttatttacaaacgaggaaactgagggtcagagaggttaagcaacttgcttagggatacacagctattaagggggtagagatgagatgtgaacctaggtgggactctgtctccccttttgatatcactggttgccaaccaagtggaattagatgatatttatcttgcaaatgacagagtgtagagagagagagcatggcactgcgaaaataacaatcacttcaaagaggagacaagtattctaattctagtttgggacagacttactgcaaaaccttgtaaccttctcagcttctctccttcttcttccactgtgtctacaacagaaattaaaatgtacttcaaataatttacagaactcttttagaaataaaatgagacgatctatgaatgtgtaatgaaaatataatgattgtaatgatatttagcccaactcacaaactaacactcccttttctaagttttacagttaagacttcaacaaagaaggacccaggaacaactggctaaccaaggcataataccacgtgagtacctgcatctcttaattactgatatacatagggccacaccatttgggagctggaaagtgcctcagaggtcatttagtttaagccaatgcattggtctccgaagatcttcaaagcattggtatcagcagaaatcccagaccttggatgctttgccccgactgctacctactcacctgcaaggggctccttttaatgatactggttatgcctaaaattccaatgtagtggatttgttctcagggtaaacacaattcattatgggcacccctgactcatctacttttaaaattggatataattaatattctttccagaagcatcaattacatcatctttttctcacttcctgaatttcagttctgtttgggatattggagtccacaagtcattgaatattggtcaagtatttcctttctagaaggtggagtggcaataccattttagcataaatgatataatgttgaattactggccacgaactgggtaaaagaagaaggattattgtatcttttagaagatatattttaaattttctaccaattcagcaatgaaagctaactcttggttatctgtagaaatagagaaaagggtaccctggatgaataagtcatgggtaaagctgctctaggtcatagattctaacttcctctccaacaaaatttaaaaatcaagatctataatgacttgtgcagaaattcaggtgtctgtaaaatgctgttgtgactgttacttcagagttcagtatacaacaagcagaagtttgcccttgaaaaactgtagtgtagttagttgtattgaagccctatgtatagccctatatagtgtagttagttacattagttagaaaaaatgttgtgtagttagttatattgaagcgctatgacccatggctaaacattgaaagtttagtctttgtttcagagccagaacagaactaagaatttttcaggcctcttgttttgtaattcaaaagtaatcctttgttcatggctaagctctagaatagtaaacagtatgtgaccttaaagtgggacaactctgttagaggtttgtgaagtacaaaagaaacagctcaccctgtgatttcaaggctgtttaaacaacgttgacaactatgctgaggaagcaaaggagcaagtctatgtgtggcctgtttcatcttagcctttctttggaggtgctaaagacaggaagaaaccaaaggtctgcggatgtcagatcaggtcaagacaatttcactcaaagctgataatctatcccttcaccgatgtttctttctctttaattctggaaaggcaagtggagcaaatggacctgcaacctttccgtaagcccaagttgtacacatctgatttaaagttggactcatgtgcttaaatactctgagcctgggtcttgcagctggcatttggctgagaataaatatttttggagggatacggggttaaatctgaaaattagtaaaaacacccaatgaagatggtaattaaccctagcatacattgtaaaataacacctatcatgtaagttatataaatcaaatgttcatttgtatagtagagtccaatgaaatataatattttgttccccaggaattccagaatcaaataatatgcatattaacaaaataccacttattagaaattttgcatcattagtccatggcatcattaagataatttctagaaaaaaatcctacaaatcatgaaataataaagcattttaaaatcacacactatgatgaaggttttccccaatctgcagctacctcctttcaaccaggctttccaagagtgtagagtctgctgtggaaaagtgtccaagtcacggctggtgcacactgcaggccctgcctgtacagaccttttctacttagctcttctcaggaagctagagataggatgcatctcttcacctgctgatggttagcctcttcagtccaatcagagattaaacatgcaatctacatgcatttcagcagagcagtgtgtttcctctggcacctaaggaaacatgtctaaatgcaaacaattgggagaaggaaagaggaaccaagggcctcaggatattttcaattcaatataattcaacaaattttattataaaccaggctatgtacacgggaccatgccaggcactttagggacaacaataataagcaagatggtccctcagagagagtcaagatattagggggaaagctgataaaaagcacacagaagcaggctgggcacggtgactcaagcctgtaatcccagcactttgggaggcagaggtgggcagatcatgaggtcaggagatcgagaccattgtggctaacacggagaaaacccgtctctactaaaaatacaaaaaaaagaaaaaattagccaggtgtggtggcaggcacctgtagtcccagctactcgggaggctgaggcaggagaatggcgtgaacccaggaggcagagcttgcagtgagcagagatcgcgccactgcactccagcctgggcaacagagcgagactccgtctcaaaataaataaataaataagtaaataaaaattaaaaaagcacacagaagcataatccagtgtgcaactcattaccttacacaagaagactttattttttcattctattatttaaattttttgaaacagaaagtaaaagaaaaggagaaaggaaaagaggaagaaaagttaatcatcctcagagcctacctaattctgtgattttctaattttttaattgttacgtcttatgcactatatatatgtgtgtgtgtgtgtatacatatatacatatatatgcactggctgaggcagtgtcaaggatctatgccccaattactgggcctctccttgtcccttccagaagccccctgataattctctctgcagtgctggttctcttcagaatagagtttgaaaacccctgacctaccccagtccctgt

SEQ ID NO: 1886970 - DNA, 4001 bp, Homo sapiens
aagtgcagtgtgccatctcggctcactgcaacctctgcctctcaggttcaagcgattctcctgcctccacctcccaagtagctgggatcacaggcacgtgctgctgcgcccagctgatttttatatttttggtacaaatggggtttcatcatgttgcccaggctggtcttgaactcctgacctcaggtgatctgcctgccttggcctcccaaagtgctaggaatacaggtgtgagccactgcacccagtctgagtatggtattaatagaaggataaatacaggaaattctaagtataccctctacactgaaacatagaaacacatcttaaggttattttactgcagtcaatcagttctgtagcagcaagaaaagtgtatagacagctatgcactgccctcactgttctgtagccagacaacaaataataatgtaccattaaagggctttttcaaacaggttattatgtgtgtcattttctttcttgaaaaaaagattaatagcagcaacaatccattgcgagttggctattacccacagacaaatggccacaccaatacaaagagactacagcacaaaggagaaggctgtttaattggaaaggatttcataggtgaccattacagaggcaatgcttccctctgtgccaaattaagtgattccttactggacacttaagccagcttttggactttttacctcccttaaggataccacttcagtactagctccaagaaaacccttttagccagatacttagtaaaaagagaaaatagcaaaaccgaaggctaagccaggcacagtggctcacacttgtaatcccatcactttgggaggccgaggcaggtggatcacttgacaccaggagttcgagaccagcctggccaacatggtgaaacccgtctctactaaaaatacaaaaattagctgggagtggtggcgggtgcccgtaatcccagccactttggaggctgaggcaggaaaatcacttgaacccaggaggcagaggttgtagtgagccaagatcacaccacagttcttcagcctgggcaacggagggagactcggtctcaaaaaaaaaaaaaaaaaaggaaaaagaaaaagaaaaaaagagaagaaaaggctataggagtggctggaatagcaagaagaaatgcaggagaaatcatggggaaagggggtatgagatgatgcatctgatcagataataaaacatgctggagtttttttcccctaatagaatatttaggtgacttgtaagctttaagctttgggcaaggttgggggtgggaacaaggtgggagaagagaaatgctttgcaataatgtttgggacacagaggtgtggttctgcgatataattaggaaccatgagcccagcgcagtggctcacgcctgtaatcgcagcactttgggaggccgaggtgggtggatcacttgaggtcaggaaacccagtctctactaaaaatacaaaaaattagccgggcgtggtgacacatacctgtaatcccagctactcaggaggccaaggcaggagaactgcttgaatccaggggggcagaggttgcattgagctgacatggctccagcctgcgtgacagagcaagactgtgtctcaaaaataataataaggcaggacgtggtggctcacacctgtaatcccagcactttgggaggctgaggtgtgtggatcacttgaggtcaggagttcgagaccagcctggccaacatggtgaaagcccatctctactaaaactacaaaaattagccaggcattgtggtgggcacctataatcccagctacttgggaggctgaggcacgagagttgcttgaactgggaggcaggggttacagtgagccaagatcgtgacaatgcactccagcctgggtgacagagtgagattttgtctcaagagttccctaagttttaaatgttctccaagattccttctgtgtctacatcttatgattctgaatctattgcatttccatattttctttttttttttttttttttgagatggagtttcactcttgttgcctaggctggagtacactggtgcgatcttggctcactgcaacctccgcctcctgggttcaagcaattctcccgcctcagcctcccgagtagctgggattacaggcatgtgccaccatgcctggctaattttgtatttttcgtagagacggggctttgccacgttggtcaggctggtctcgaactcctgacctcaggtgatcctcctgcctcagcctcccaaagtgttgggattacaggcatgagccaccatgccctgcctcatttccttattttctaaatcataatagagcaacagctcactggttgctaaccacttcccgagagtcaccttgaggctcagacctttactagatgtgatataataagaaatatatttggtctttgtcctcagtggcacagaactcctacaagccttggaatttcctgaaagacaggagtgtctttggttgttatgagcctctctgataacacatgtactgaggtgacaaagggtggggtccccatatagtctcacaaatgactggtcaccagaaagaccaagtgattagaaggttgggcgtttcatcccacccactgatctcctgaaagggcagggaggaggctgccattaagctgcataaaatctctcaaatctggagacgtgatgagcttcgaggttggtgaatacatggggtgctgggagggtggcatccctggacggggcatagaggctttgcatccccaccccaagctcaccttacacatctcttccatttggctcttcttgagttgtatcctctacaataaactggcaattttaagtaaattgttttcctgggccaggcatggtggctccgacgtgtaatcccagcactttgggaggctgaggtgggaggattgcttgagcgtgggagttcaagaccagcttgagcaacatagtgagaccccatctctacataaatttatttaaaacattaaccgggcgtggtggtgcgcacctgtggttccagctactcgggaggctgaggtgggaggatcacgtgagcccaggagtttgaggctgcagtgaactatgatagcaccactgcactccagcctgggcaacaaagtgagaccctgtttcaaaaaaaaaaatgttttcctgagttctgcaagccattctagcaaattatcaaatatgagctggggattataggaactcccctccctttacagctggtcagtaagaagtatggacggcctggatttaggactggcatctgaagtaagtgggggtagtgtcagaggcatttgaactggggcaactccaacttaaataggggctgggtaaaatggggctgagacctgctgccccgcattcccaggatgtcaggcattcttagtcacaggatgagacaggaggtcctcaggactggtatcacaagatacaggtcataaagaccctgataataaatacaacaggatgctgtaaaagaaaaagagccagcccaaacccaccaaaaccaacacagcgactaaagggaactttagtcatcctcaacctcattatatgctaagtataacatattagcatactaatagacactcccactagagccgtgacagtttacaaatgccgtggcaatgcccagaagttaccctatatccctatattgcttaaaaagggaggaaccctcagttctggggcttgctcgctccttttccagaaaactcttaaaaaatccatcccttgcttagcaactgatcaaaaaacaaccttaaaataaaccaacagtcctcagggctactctgtctatggagtagccattcttttgtttctttactttcttttcttttttcttttttcttttttaattgaggaagagtctcgctctgtcgcccatgctggagtacagtggtgcgatctcagctcactgcaacttccacctcctgggttccagcaattctcctgcctcagcctcccaagtagttgggactacag

SEQ ID NO: 1886971 - DNA, 4001 bp, Homo sapiens
ccttgcttgggtgatattatgaagtactgaccacctggaggagtctggggagctgtaaaagttcccagtaggcatgacctacttccgtgcaaagaacttggtggggtgagaccctcagttggggaactgaagtgccagaatgtccaggccaatgataggaaatggtcactgagaaatgggcaggagaaacactggtgctcaagggagaaggatgagtcctaccttaacactgagcatggcaggcatcctaagggctcatcttcctctcagtccatcaacgggcacaggaaggctggtgcactgcatgggcaaagcagagataagaatgacccattatccagtgtgtaataagactatacacgtctacaggtttgaccaccagacttggatgtgataatctgattgacacaggaaaaaaaagcatttggctaaatccatcatatgattaaaaccctaaccaaactagaaattgaagagtacttccacaatctggtcaagtgcatctaagaaaacctacgataaacatcctcaactaagttagtgggtaaagaatgtttactccataagattggaaacaatacataaataatcactttgaccactttcatcaacattctactgaaggattttgctcaagaaataatgctaggaaaaaaatcagccaatggctcttcaaaacacttaacgtggaaaggacaccctattcactaagtggttctgggaatagtggctgaccatatgctaagaatgaaactggacccctctcactcacctgtacaaaaattaactcaagatggattaaaggcctaaatgtaagacctaaaactataaagatcctgggagaaaacctgggaaaactcttccagacatgggaatgctcatacattgttggtgggtatgtcaattagttcaacttctatggaaaaagtagggaggtatctcaaagaactaaaagtacaactacctttcgacccagcaatcccactactgggtatctacccaaagggaaagaaatcattatataaaaaggcactgcactcccatgtttatcgcagcataacttacaacagcaaggtcatggaaccaaggtaagtatccaccaacggttcattaaataaagaaaatgtggtgcatatacaccacaaagtactaggcagtcataaaaaagaacaaaatcatgtcctttgcagcaacacagatgcagctgaaggtcattatcctacgtgaatgcagaaacagccaaatactgcatgttctcatgaagatggagagaatacactatggggactcaaaaagttggggggaagagttgaaaacgtacctactgggtacaacctccaatatttgggtgatgggtatgctagaagcacacccccccccattgtgcatgtgatatacatataacaaacaagcacgtgtaccttctgaatctaaaataaaatagaaaaagaaaaaagccaaagaaaaacatcccgggaatccagggagcagcggctactgcctccactgctcactgcagcccgcagattccacgccggcagctcctgcctgcgggcagtggagctgcggagaatggcgggatgggtctaggtgccagggccagagcccaggaggggcgctgggtgggcgtctggccggcttctgccttgcaccggagcaggggtgcctggtgaaacagtcaacctgatgctctctgggccctgcccacgttccccttccatccaccctcctttgcatctttctgtgcctgggggccccataggaagcggtcacatccagactcaccaggcctgagatgctggaggatggagaagcacttgccaccggaaaaatcctccaggaacacatgaacaaaacctcgcctgcacctgggacatccttccttacggctggcctacgaggcaagtgttctgcacacgctccttggctaactccaatgcagaggagcacgtgagcccaaccgccatggcaggtgcagatctttgcctccctttcacaatgactgtattcaaatgacatatcctggaagcctctttctgataggatgagagcagactctgtactacaacacagattggataagtctccaactccgattagtgaagattatccagtcagagatggagactattatccaataagagttgtcaaaaaaagttccttctcacccaatcagaaccaagcttacaagtacagcagttgcgtacagccactgtaaaagggaggcgaaggcccattctgccattttcttttcgtggaggttgggctcgcgtgcttctctgcgctgtggtcgtcatggaccggaagcgtgtgcggcgcgcctgccttgaggccaacatcagggaagggtgtcccaggtgcagaggaagcgtccttcacgtgttcctggaggactttcggctcgcaagcacttctccattctcccaatgtctcgggcctggtgagtctggatgtgagcgcatcccacggggcccaaggcacagagagagagagaggaacggggtggagggagggaagcgtgtgcaggggccaggagcgccaggctgctctggcttcccggcccccgcagcccgccaggagctgtggccccgcttgggacaaggcagaggcctgccctcctgctgctggcgctgtcacctccctgtggtcctgccttctgggtccctgagggccttctgtcatctggaactggaaataagttagtgaagcgaagttttgtgaatatttattggcctttgcgtctttgtcttcattttcagtgctggcttttctgttgggtcatttgtgttcttacgttgatttgaagaatttaaaaaggtattctataaattaatcctttacggggtcatttctagtgcagatagttgtttcttagtctggtcattgtaccttaattttatttaacatttctttcttgctgtacagtatatttacatatactgtaaatcatatgcttttctatttttctgcaaataggatattttacatgagctatttttggatgttaaccaatcctgacttttttagtatatcccacttggtatccatgtgttacattttcatatgtggtttaattcatatgtttttttttttagaatatttgtatttctgttaatgaaagagagggcgtataattttttttctaatgtcctgttcagattgtggtgccaacgtaatgctggcttcacaaaacaaactgaaaaatatttcctgtatttcttctctttagaagagtctgagaaatttaggtgttttcttccttaaatatttggaatatgtctttagactaggtatggaattttccatgtggaacagtatttttgttggctggtttgacttctaataattcaaatcctttggtatatgtaggagttttcttgttttatgttatttctgtgcccattttactaagtttatttttatttttatttttatttttggggggacagaatctcgctctcccaggctagagtgcagtggcacgatctcggctcactgcaacttccgcctcccggatttctccagcctcagcctaatttttgtgtttctagtacacatggggtttcactatgttggccaggctgatctcgaactcctgacctcgtgatccacctgcctcagcctcccaaagtgctgggattacaggtgtgagccaccgtgcccgcctgtattttttagtagagatggggtttcggcatgttggccaggctggtctcaaactcctggcctcaggtgatccacccacctcaccctcccaaagtgctgggattacagtcgtgagccaccatgttcggcctaggaagtttatttttcaatgtaatgttatttgaatctctgttgtcaaacttctagtcctaagtatttcacagaaccctcctagtgtcttaataatacactactctatagagcaggcttctgttttggttcctgatagtgatcttttgtgtcttttctctttgccttaattagtttcactagtggtttattaagtatattaatat

SEQ ID NO: 1886972 - DNA, 4001 bp, Homo sapiens
gttacttctatttctatcacgctttgatgtgcagaatctttttttttttttaatttcaaatctcttatggcaaaaggttctttttctttcttccttttcttttctttctttctttctttttttttttttttttttttttgagacagagctctgtcgccaggttggagtgcaatggcgcgatctcggctcaccacaacctctgactccctggttcaagcgattctcctgcctcagcctctcaagtagctgggattacaagcatgtgccaccacactcagctaatttttgtatttttagtagagacgaggtttcaccatgttggccaggatggtctcgatctcctgacctcgtgatccacccgcctcagcctcccaaagtgctgggattacaggcatgagccaccatgcccggccctttttatttcattttattattattttttttaacagggtctcactctgttgcccagactaaagtgcagtggcacgatcatggctcaccgcagccttgacctccctgactcaagcgatccttccaccttggcctcccaagcagctgggactacaggcacaggccaccactcctggctaacttttttctattttttgcagagatgggggtgctcactttgctgcccaggctggtcttgaatgtccatgctcaagtgatcctctcgcctccgcctgccaaagggaaggaaaaggttctggctccagttttacaggtggcaaaacggaagcccagagaaactgtgtgtcttgtccaaatctcactgagtccccagcacatgctggggagaggtgatggcacggactgaggatacagtggcaaaggcagtgcgcacctatcaattccagggccggcaaaagggccagttctgggttctggcatcccaagctccctgtccctggcggcagtctcttccttccctttcagcacctcattatcctggtatctaggaagagcgcagggccccaggcccacagcgtctgcatcccgagaggtgaaaatctaaatgccactgaggcagctctcgggtgtccccagcaccacacagcccatttggggacaagatgacaaaacttgccatccttcataaggctggccccgggtctccaagcccaaactatctacgtcagtgccaacgtgaccagcagcaaaccaatctttcacctcaatcacttcctctcctcccctctaccccctccccgccagtgatcaagtcctcccccaccccaagagaggcagggggtcacattccagggggtgtgggccatctggcagtagcctgaaccccggaaaactgctttccggaaattctctcctgctagaattttattcccaggtctgaccccagcctggggtgtgaatgcccccttctcggccacctttccagctccggagacagccattcccgcagatccctggcgtgcctattccaaggcctgggccgcgcagcaccaaactgccctcccctaggagaccccagggcgccctctggcggacgcgggccgtaggttggggccatcgttccacctcgagctctccagcccggccgagagcacctggcccaacccacaccggaccaaccaggtttgcagaccccagtgcatgaaagcgttttcataggggaggggaggggggctccacactcgcgtcagggttggcaaagaacctggcagtgggccgaggctgggtagctgccacgaaggggcgtcccctgcagccctgggtctcccctctggaatctgcccgcaggtgactgtcgcacgtctccaacctccggctcccgggtctgaccccagccccgctgcctggctgtggggtagccccacttccctttcggctggcccgggccgcctgacccgcagttgggccctcggggaggcccgggtggcggcgagggggtgtccccgcggggtccgggaaaaggggaaggggaaccgggaggctctccaggtcggcctcctagaactgcccgctctcccgaagcggcgcccccgcctctgccagaaatcagccttcttagaagggaggggggtggggggaaagtgtgaatgagaagttgggggcggagcgcgcggcggggaggggccgctgccaggaacgcgccgccggggctggcgccgcgcccaccggccgcctcggccgcctctcgtcgcgctttgtctccgcgcgcgtccctcccggtccctgcccctgctcgcggcccgccctcggcgcccgcggcccctccctcaccctccgcgctcagcctttctctgctgcgagtagtgactaaacattacaagaaggccggccgcgcagttccaggaatcggggggcggggcgcggcggccgcctatatacccgcgagcgcggcctccgcggcggctccgacttggactccctgctccgctgctgccgcttcggccccgcacgcagccagccgccagccgcccgcccggcccagctcccgccgcggccccttgccgcggtccctctcctggtcccctcccggttggtccgggggtgcgcagggggcagggcgggcgcccaggggaagctcgagggacgcgcgcgcgaaggctcctttgtggacttcacggccgccaacatctgggcgcagcgcgggccaccgctggccgtctcgccgccgcgtcgccttggggacccgagggggctcagccccaaggacggagacttcgattcgggaccaggtaggaaggaggagcgcggcgtggggaggggtctcgctcagtcccgggagcttttcccggtttcccctccccttcccgggtcattcccggcagggaggtgacgaggtaggggcagagcggatggaagccggagatcccaggttcccggaatactccggctggggccttcgggcttctcctgtcccctccctacccccgtgcctcgggtttctccctccgtccacaccgcccggggctactggactgagcggcgcccaggcagtcccgggggcccttctcctgctccccacccggccacactcctggagacctaacttccgcgcgcgagtttcccacgctgcgcccttgcagtgcgcgcctgggaaggggctgcccggggccaccctgccggcaggggcgggagccgtgcgggctccgtgaggcgcctggatcggagcgcgggcccaggagagggcccccggggcagtgggtgccccagtcgctcggcgaaggcaggggagccggggcgggccgggcgcgctggagggttccgggcactcaacgcgctcgcgccttcctctccgcagccccccgggatgcggtagcggccgctgtgcggaggccgcgaagcagctgcagccgccgccgcgcagatccacgctggctccgtgcgccatggtcacccacagcaagtttcccgccgccgggatgagccgccccctggacaccagcctgcgcctcaagaccttcagctccaagagcgagtaccagctggtggtgaacgcagtgcgcaagctgcaggagagcggcttctactggagcgcagtgaccggcggcgaggcgaacctgctgctcagtgccgagcccgccggcacctttctgatccgcgacagctcggaccagcgccacttcttcacgctcagcgtcaagacccagtctgggaccaagaacctgcgcatccagtgtgaggggggcagcttctctctgcagagcgatccccggagcacgcagcccgtgccccgcttcgactgcgtgctcaagctggtgcaccactacatgccgccccctggagccccctccttcccctcgccacctactgaaccctcctccgaggtgcccgagcagccgtctgcccagccactccctgggagtccccccagaagagcctattacatctactccgggggcgagaagatccccctggtgttgagccggcccctctcctccaacgtggccactcttcagcatctctgtcggaagaccgtcaacggccacctggactcctatgagaaagtcacccagctgccggggcccattcgggag

SEQ ID NO: 1886973 - DNA, 4001 bp, Homo sapiens
cagcagttggatctcctgctgagatgagcaggcagggagccccgcacctcccacctcactcatcacctgggggctccatgccgattgccttggccatctccccctgcaggattcacccagcacttctgtcttccagcacttcgccctgtgcctggcaaaagcaggctctcggcagaggtttatggaatggatgaatgaacttgacttgtgtcagagcattgtaatttacaaagcactttctcatccattacctcaagggctattccttgagtcttctttgtcttccactgggctctacccagaagtgtatggtcatgcagccacgtaacactgaatggatgagaaaaagaatgaactgattacagagagaaggagaatccatttcattaccctgcaagcattgtgagggcaaagaccaggtcctactcatcattatatatcaatgcccagcccagtgcctggtgcatggagctcaatatttgtgaaatgtgttgaataaaccagtttcctcctctgctctcctgataggctggagggagagttgaactaactgggttacttctatttctatcacgctttgatgtgcagaatctttttttttttttaatttcaaatctcttatggcaaaaggttctttttctttcttccttttcttttctttctttctttctttttttttttttttttttttttgagacagagctctgtcgccaggttggagtgcaatggcgcgatctcggctcaccacaacctctgactccctggttcaagcgattctcctgcctcagcctctcaagtagctgggattacaagcatgtgccaccacactcagctaatttttgtatttttagtagagacgaggtttcaccatgttggccaggatggtctcgatctcctgacctcgtgatccacccgcctcagcctcccaaagtgctgggattacaggcatgagccaccatgcccggccctttttatttcattttattattattttttttaacagggtctcactctgttgcccagactaaagtgcagtggcacgatcatggctcaccgcagccttgacctccctgactcaagcgatccttccaccttggcctcccaagcagctgggactacaggcacaggccaccactcctggctaacttttttctattttttgcagagatgggggtgctcactttgctgcccaggctggtcttgaatgtccatgctcaagtgatcctctcgcctccgcctgccaaagggaaggaaaaggttctggctccagttttacaggtggcaaaacggaagcccagagaaactgtgtgtcttgtccaaatctcactgagtccccagcacatgctggggagaggtgatggcacggactgaggatacagtggcaaaggcagtgcgcacctatcaattccagggccggcaaaagggccagttctgggttctggcatcccaagctccctgtccctggcggcagtctcttccttccctttcagcacctcattatcctggtatctaggaagagcgcagggccccaggcccacagcgtctgcatcccgagaggtgaaaatctaaatgccactgaggcagctctcgggtgtccccagcaccacacagcccatttggggacaagatgacaaaacttgccatccttcataaggctggccccgggtctccaagcccaaactatctacgtcagtgccaacgtgaccagcagcaaaccaatctttcacctcaatcacttcctctcctcccctctaccccctccccgccagtgatcaagtcctcccccaccccaagagaggcagggggtcacattccagggggtgtgggccatctggcagtagcctgaaccccggaaaactgctttccggaaattctctcctgctagaattttattcccaggtctgaccccagcctggggtgtgaatgcccccttctcggccacctttccagctccggagacagccattcccgcagatccctggcgtgcctattccaaggcctgggccgcgcagcaccaaactgccctcccctaggagaccccagggcgccctctggcggacgcgggccgtaggttggggccatcgttccacctcgagctctccagcccggccgagagcacctggcccaacccacaccggaccaaccaggtttgcagaccccagtgcatgaaagcgttttcataggggaggggaggggggctccacactcgcgtcagggttggcaaagaacctggcagtgggccgaggctgggtagctgccacgaaggggcgtcccctgcagccctgggtctcccctctggaatctgcccgcaggtgactgtcgcacgtctccaacctccggctcccgggtctgaccccagccccgctgcctggctgtggggtagccccacttccctttcggctggcccgggccgcctgacccgcagttgggccctcggggaggcccgggtggcggcgagggggtgtccccgcggggtccgggaaaaggggaaggggaaccgggaggctctccaggtcggcctcctagaactgcccgctctcccgaagcggcgcccccgcctctgccagaaatcagccttcttagaagggaggggggtggggggaaagtgtgaatgagaagttgggggcggagcgcgcggcggggaggggccgctgccaggaacgcgccgccggggctggcgccgcgcccaccggccgcctcggccgcctctcgtcgcgctttgtctccgcgcgcgtccctcccggtccctgcccctgctcgcggcccgccctcggcgcccgcggcccctccctcaccctccgcgctcagcctttctctgctgcgagtagtgactaaacattacaagaaggccggccgcgcagttccaggaatcggggggcggggcgcggcggccgcctatatacccgcgagcgcggcctccgcggcggctccgacttggactccctgctccgctgctgccgcttcggccccgcacgcagccagccgccagccgcccgcccggcccagctcccgccgcggccccttgccgcggtccctctcctggtcccctcccggttggtccgggggtgcgcagggggcagggcgggcgcccaggggaagctcgagggacgcgcgcgcgaaggctcctttgtggacttcacggccgccaacatctgggcgcagcgcgggccaccgctggccgtctcgccgccgcgtcgccttggggacccgagggggctcagccccaaggacggagacttcgattcgggaccaggtaggaaggaggagcgcggcgtggggaggggtctcgctcagtcccgggagcttttcccggtttcccctccccttcccgggtcattcccggcagggaggtgacgaggtaggggcagagcggatggaagccggagatcccaggttcccggaatactccggctggggccttcgggcttctcctgtcccctccctacccccgtgcctcgggtttctccctccgtccacaccgcccggggctactggactgagcggcgcccaggcagtcccgggggcccttctcctgctccccacccggccacactcctggagacctaacttccgcgcgcgagtttcccacgctgcgcccttgcagtgcgcgcctgggaaggggctgcccggggccaccctgccggcaggggcgggagccgtgcgggctccgtgaggcgcctggatcggagcgcgggcccaggagagggcccccggggcagtgggtgccccagtcgctcggcgaaggcaggggagccggggcgggccgggcgcgctggagggttccgggcactcaacgcgctcgcgccttcctctccgcagccccccgggatgcggtagcggccgctgtgcggaggccgcgaagcagctgcagccgccgccgcgcagatccacgctggctccgtgcgccatggtcacccacagcaagtttcccgccgccgggatgagccgccccctggacaccagcctgcgcctcaagaccttcagctccaagagcgagtacc

SEQ ID NO: 1886974 - DNA, 4001 bp, Homo sapiens
tcctggaagcggggtgtgtccttgttcccagtgacattcagcgtgtgcagggcccgtacgcatgcactctggcctccaaagcacctgtcgttgtggagattccacagcaggcagggtggagatggtgagccgcagacatcacacctgccccaggtcaggccgaggctgctcatcaggagccccgagacctcgaatgcaacgtcttcagatcccaattccctccctgcatggagcagaacagtgtctctcaaaaactcacgcccacgagaagtctcagaatgtggcttttagtagaaatagggtctctgcagatgtctttcattaagctgaggccatattgagtgagggtggatcccaatccagtaactggggtctgtataaggagagagaacagaggcacatgaacggaaggtcaagcgacaacgggtgcagggatggcagccaggcagccacaagccaaaggacgcccaggatggccagcagccctggaagccgggaaagacaagggaggctcttcccctacagcctgcagagggagcaggtcattatctgttaatatcttgatgttgcagtttggcctccagaactgtgagaaatgtgatgttgtttgatgccacccagtttgtgttcctctattacagcagccccggagactagtaagtgggtccctggcagaggaaggggacagagcgtcgaattctcctccccgcagggagccacctgggctccgagaaacccttgcaccggccagaggccatgacactaatgctggaatgttctctgtgagcgatgaagctttcaaccagactccgctagagaaaaatacccgacagaactgtttacccgattaaatgaaattaaattcagttttcttgttgccaagcagaaatgaggccctgtcataggaatgtctgagcagttataaaaataggagttcatgtttgcacatagctggttgaaaacagaaaattcacacctgctctaagagataaacaatgcacagctgagcgttgaactcacacaaacgagccaccatgcactgcagaacagaaacagaagaagacttaagaaaaaagccaagataaatgatcacagccaggcacggtggctcatgcctgtaatcccagcactttgggaggttgaagcaggcagatcatttgaggtcaggagttcaagaccagcctgaccaacatggtgaaatcccatctctacaaacaaacaaagaaacaaacaaagaaacaaacaaaaaattagctgggtgtggtggcaggtgcctgtaatctcagctactcaggaggctgaggcaggagaatcacttgaacctgggaggcagaggttgcagtgagtggagatcacaccactggactccagcctgggtgacagagtgagactccatctcaaaaaaaaaaaaaaaaaagatccttcctccccaattccaacaccccccaggaaaactcagtctacaattgaatataaagcaaagaactggctgtttgaaaagttcatcaaaacgtgcaaatgtctggcaagataaataaagaaaaaccacaaacataaaccacgccagcctgggcaaaagagtgagaagagaagaggggagaagaggggagaagaggggaggggagaagaggagagaagaggggaggggaggggagaagaggagagaagaggggaggggaggggagaagaggggaagggagaagagaggggaggggaggggagaacgggaggggaggggaggggagaagaggggagaagaggggaggggaggaaagaaagagagagaaaaggagtgagggagggagggaaggaaggaaggaaaccaaaggccagaggagagcctggagggggtcctgctcacagcctcagaagggatcaaccctgcagacacctggatatcagactttggcctccagaactgtaagatggtacctttctgttgttaaagccaggggtcctcaacccctggggccacagacagtgccctgtctgggccacacaacaggaagtgagcaaacgaagcttcatctgtatttgcagccactcctcatcactcatgttaccgcagaactccgcctcctgtcagatcagtggtggcatttgattctcagaggagcacgaacggtattgtaaactgcgcatgcgagggatctaggttgtgggctttttttttttttttttttttttttttttgagacacagtctcgctctgtcgcccaggctggagtgcagtggcgcaatctcggctcactgcaagccccgcctcccgggttcacgccattctcctgcctcagcctcctgagtagctgggactacaggtgcccaccaccatgcctggctaatttttttgtatttttagtagagacagggtttcaccgtgttagccaggatggtctcgatctcctgacctcgtgatctgccctcctgggcctccgaaagtgctgggattacaggcgtgagcctccgagcccagcccctgagccaccgcgcccagcggttgtggacttcttatgagaatctaatgcctgatgacctgtcaccatctccatcacccccagatgggtctgtctagttgcaggaaaacaagctcagggctcccactgattcttcatgatagcgcagttgtataaggatttcattatatattacaatgtaatgataataaagtacacaatcaatgtaatgtgcttgaatcatcctgaaaccatcccccacccctgcccccatccatggaaaaaattttcttccacaaaactcatccctggtgccaaaaaggttggggactgctggtttgagccaaaaacaaaaatcaaaaaaacaaaaacaggctgggcacggtgggcggctcacacctgtaatgccagcacttggggaggccaaggcgggcaggtcacttgagcccaggagtttgagaccaccctgggcaacatggcaaagccccgtctctactaaaaatacaaaaattagcagggcgtggtggcaggcacctgtaatctcagctacttgggaggctgaggcacgagaatcacttgaacccaggaaacggaggttgcagtgagctgagatcacgccactgcactccagcctgagcgacagagagagactgtctcaaaaacaaaaacaaacttctccccctctcccttccccccagaggtcgccaggccaacaccattttaccgattctgacaaaccttccatgaatatataatttccatgttatttaaattactacagaacccctgaagagattattttatctttttttttatagagatggggtctcactatattgcccaggccagtctcaaactcctggcctctggcaattctcccgcctcggcctcccaaagtgctgggattacaggcaagaggttatttttataaagtgaaggttttcctaggttattttataaaagtgaaggctttgctagcaaagactgaccaaagtagtcaaggaaaatgagagatcaatgtctcacgggaaatgagagattcaagaacccaaatcaaccatcagcaagtgggcagtaactgtccctattaaaaatgatccttaggaggctgggtgcggtggctcacacctgtaatcccagcattttgggaggccaaggtgggaagattgcttgagcccaggaatttgagaccagcctgggcaacatggtgaaaccctctctctaaaaaaataaaagtgatcccggccaggtatggtggctcacacctgtaatcccagcactttgggaggctgaggcaggtggatcatgaggtcaggagatcgagaccatcctggctaacacagtgaaaccccatctctactaaaaatacaaaaaaattagctgggcatggtggcggtgcctgtaatcccagctacttgggaggctgaggcaggagaatggtgtgaacccaggaggcagagcttgcagtgagccaagatcacgccactgcactccagcctgggcaacagagtgagactccatctcaaaaaaaaaaaaaaaatcccatga

SEQ ID NO: 1886975 - DNA, 4001 bp, Homo sapiens
ggcaaggggatgtcccccgggttccaggttagaagccacagagaagcatcacagccaaggtttccgggtgcggaacggtggcgctgggactcagccaccctggccaaatgcccccactcctatgcgcccccctctcagcacctaagcccgtttcctcaccagagcccttgggaaaccgcagaagcccaggtgtgtaaaggcaaaggggaaatgctcgcctgccccagagccagccgggaagtccttgctggagctgctctccggcgctggggtacctgggcggccacatgctgccacccaggaaggcaggagacccagacgcctccccaggatgctggcaagccccttcccttctgagaaaacagaggtggcaaggcctccccggccttctctgggggctgggcgtgtgtaaaagctcacctgtgtttgcaggtgcctcaggtgggctgctgaactggagcctgccccagtcccaggagagaagctaagccatgtttcacacctgcagctgcccaaacccactttctaccaggatcctggcacaggctgcttggccaagttcatcggccccactgctgggtttggtgctagttaagatggggacgcctgtaactttttggttggaatgcatggccctgagtggtgactaaaccccaaatcaggctggcgtcaagggtggctaatgtctccctaaaatgcaggcactgcatggggggacccctagtcacaatgactgccagcagctcctagcttgggctctgtaggcgaccagctcccagggtccaggaagaggcatgtccagctgctgcccttagcccccagccgaccccagagggaccagcccagagttggatgtcactttgaacatcctggatcccacctgaaatgaccctgccacccaccacccacaggcactgtgttttgctgagctgagcacagcctctggtttgtgcctcaacagatgcctcacacctgcaggccctctctcctcacccagcccccggagaaggccttgctgcctctattgtcccagaagggaaggggcttgccaggatcctggggagcagcctgggtctcctgccttcctgggtggcagcacatggctgcccaggtgccccagtgccggagagcagctccagcaaggacttcccggctggctctggggtgggtgagcgctttccatttgctgcctgcacccctcccctgcccgctgcaggaggggcttcgctgagccgcggggcacccccgccccactcggggctccccggggcgcaggggcctggggcgtgcgggttgccaagcgaccggctgttgccagtggagacgtttgcgcaaaggcccccctggggcatccccaacccagacggcctcgtggggcaggggtggcgaggagggtgggcttgggcccccgtgctgctctgggaagctccttcccccacctcacccacccccgtgagtcccctcacacctgtccatgcccctcggaccctcgatggtcctcacgtgccctttctactctaggggcccaggaggacgacaggacaacccccaggctcctccctgcctcggtgaccctccccaccccaccccaccaacgtctgagcaagacttgctggagccaatgcaggagagaaagctgctgttgctaccgccagcccagctcagctccaaccttcctggctgttggcctgcgagggccccgggaggatagaaagggacatatttcaagggagaagggacgtttccttacagggaaacaagctgagtggtccgtaacatacctgaggcgttattgcgagggacaggcagagctggactggggacccaggctgcttgacatccggtgagggccgctcctccctctgcccactcggtgactagcttgctgggtagcaccgggcaaggctgtctccctctctgactgctcactcccagctgtagagagaggtggttcctggatcacggagcagtgcctgcctagggtgcaggcctgggctcggcacagggccgagaagctgctgctctgccccgcctccgggagaggtcctggcactgccagcccatgaataaggcctggcagggcgccgggcgagggtgtgcagaggtcagcggggagggccgagtggcagcgttcttgggactggctgccagctgcagctggacctgtttgcctgggctgggctgtctcacttcccctggagcggagagaacactggggaggaagatcaggcgtgggcagtgcttcaggggcccttgaactccaggatggccagctcctgccacaggggacccagccagccgtggccagaagccagggagccacatgctggagccgaggacaggctgtcgtgagatcagttccagcccctagccccctttccctgcaggcctggcctggggggctagcacaggctgccaggggaggtctcttgccctgtgtgacagggggtcccagcctgtggcctgcagccatcgacaccacaacaagatccttgctggggtgttctgcaaaacctcaggaaccctgtgcccacaaacactgcgtgaaagtcaccaagtaacccttctgtgattattcattcatctgaggtttgctcagcaactttcagtcatctcaatcctgttgcgatgaaatgcaaagtcctctgacagcgttgtgggattgggagtaagtgttgcctttagcaggtaccaaaagtgctactgttatctcaagcaggtgtgtgactttctatgactttaaaagggaccctcccaacttctgggaagccagccccctctgatctagccaatgtacccaccactacccatatttgcctctctccctggcacccaagactggtggaagaggaaagccctcttgtagagacagccccacttgtcctgatggaggccatggctcatcccctcaccacatggcctcactgggctggaccctggtgcatggcttgggaagggaggggcagctcaggacctgagacagcacaggccgaccaccccgtaaggatgggaaggaagtcaggagtccatgcagtggcacaggccagggagggtggacgttgggagggggaatggaggcttggcctgtgctgaaggagaggggtggaggcgggcattggggtggaccatgctctagtggggaggtctggccagagcaagcaggtagatgcagtcacggggagtccagtgaggcggacagcccttcgccctcatccggtgctcagtggtggggtgcagtgcgagcttccaccttcatctgtcccccacacaccaccacagccacagaccacattgccctgccctggatgcaggaggacacctgcacctcacaagccagcttggacaaaaccaaactagaaaaacgaaatgccagggtcactactgtgccttccaccgaggaggtgacgcgatgtgtggatggcggcttgcctctgtgtctgtgcagggtgggtgtgtttgtgtgtacaccatccacaggcaggtgctcggtgtgcagtacatgcacacacacacacatgcacacacgcacacacatgcacacacacgcacacacagacatgtacacacacatgcacacacatatgcgcacacacacacgtacacacacagaggacaacatttgggtcaatgtcttgctggggtctattggtaacacactaagcactttgcaagggaaggaactttccagggaccctgagcagtgtccagtggagaggctgtcatctctgccccacagccggaagtggcacctccccacccttgtgcacaagaggcaaatggacacaggctccctgaggccccacacttcccacagacaccccccttccctcacagtcctgggtagctggcattttgggccaatccacagtggctttagtggttgaccatggctgagaatattttgggaactgccttttagaatccgttgacaagacacacagacgctgctgtcccggtactttgcagccttatccaggttcacgttggttttctctggattg

SEQ ID NO: 1886976 - DNA, 4001 bp, Homo sapiens
caatgtgggcccctccctggctgcccctcttgctctccaagtccgagcccacccagagcccaagccctcggaggcccctgccacctggaaagatgacactggggcagggttctcttctgatgtctgtgttttgtcttgtgggccttggggtgcccctgcccctgataagaaggggtttcagagcagaaataaagcctcagacaggtgagcctctgtggcacatggcccctcgagccagccatgcatctgggttcagcccctgccaggacacttgaccaggccccttaccttctccgagctgggatcatgctgggaagactgaatgggacgcagccggtgaaaacgcctggaagagagtaaacgccattttctctaagcatatttatttctttaacaacagtgacgaccatttgtgagccatctctctgtctcaggcacggtgctacatgccaacgaaacctgctcccattgaaccctggccagccagtgaagaaagggttgggcctgggaggtgccactttacagacaggggcaccaaggggcagggtggcaggaggcccaccggacgttccccatgaagtagcagtaccagcatccacacccagcaggcaccacgctggcccgcagcctccctgccagcacgcctggcttcccggcctcggaacttgatctgctccctcttccggacactggggctcctgccaagtcctgggctgggcagcaactgctgaacattctaagaaatccctcccagggttttctcaggagcccgggtggggcaggaagtccccaggggctgaggggaccgtggcggcaggtggcacccagagcagcactctcctggggcccaggctgttgggccagaggcaggactgtgaggcctagtgtagggcctcctgccagtggccggcacctacttgtggggctgggggttcccccagcaggttgggctccccacctgacacactcacagaccttgtgccttggagagccagtgttcccggggccacatagctatgccgcccaggggctgggcctgtcccagctctggtcccccggccccaggtcctggacgctggctccgcgcagcagcaggcggcctccggaggacacgatgtgactggctgccgctacgtcgcactcagatgagtctgcgccggatcgacctgctgccgagtcctgccggacaggcacaggcagggagtgaaaattatctacccctttttatttcttaataactgaatgaaaataaacattggtggtttgacaaataactacatattttcaaacccagccagtccaggggatgcagtttccaggtgcgttatgcaacaggacgccgccgagatgctctgagatgtcccttggctgtctcacgggttgtctctgggttccctcccacccccactctcctttgccaccctctccccagcccccactaccctttcacgcttctaaattcaagggccacactgtcccctgaacagaccaatcacaatgagatccattatagttccaaagataccacgaaaaaaaaaaaaaaacgtggggggtgtccaggaatgcagccgcaccccagagagcagtacaatcagctattgttgtgctagaagtttctctgtgataagaagggaatctagcaatgccgccttctgaactgattgcaaaacagaatagaaagttcaaggccccgagatagctaagctagcagcccctccagagcagccccaggccacacagctgggctttggggctggccagcccctgtccttgcatgcatctgcacagggctccttgcaagggggcccggctccatatcccccacctcgccccctccccatctgggcctggggcggctgagctggcttcctgcactgaggggaccctccggcctccttcctgaagcagctgcccttccccgagggactcccgggtgagggcctcccacattgtctgctttagtgatgctggttctcccacagacgctgcctgtccaccccgcacagatggcatgactgtcctccccttgcccgggcagggatacggcggcacagagatgggggccgatggctaggacctgaactccaagctgtgggccccaggtttttcatctgcttaggccactccccactgcccagacgtcccctggggtgtccggtttgctggaagggccaccactggccttgagctcccagtgtcatttccgggcgctgacgcgtgagggtctccaacaggcgggcccacgggaagtgctttctgtgcttggcccttcatgctttgcctctggttcctgaaatgggcactggaggtgggcacagttactgtccacatttcacaggtgagcaaagtgaggcttagagaagctaagtgacttgtccaaggtcacacagcaaaagaggggcctcgaacagaactaaagggcccatggtgcacaggcagaggttgccatagagcgaccagggccttctcaaatccggctgtgagcagaaacttctcccgcccccccgggcccaccatggtgacctgtggagtgcctccatgcgccgagatcgcttatcagcccatcagcactggtcacggccacttttatggtctgtgttctctcgtgtgtctgtattcgtgcgacgttccttcattcaggcaatatttgctgagcatccaggaggcccccgtttattcatttatcatccagcaaacaccgcgaggcggctgccagctggggccgggctcggtgcgggctcccgggtgggggcgggcatcacggggcactgcgtggcggatgtggggagggtcgtgatggggagggacgtgctaggtgtgcacagagatgctggggtgcaggagcgggtgtctctctgagcacatggcccggaaactgagggctgtgggtgcactaatgtgggggagagaccaacttcctttcactggagccctcaaagtttctggcagggataaccaggatcctagcgtctgacactaagttcagggaggtcacaggacgtgctggaaccaggagttcagggttcaagcccaggcctttctcctcatattgaacgggcctctcctggtaccatggggtgcccttgatccaaagcccccagtgaggaacatctcacggtatgtggggatgggcctttgccatagcagcccatgcaaggccttggggccagagccagccccgcagggaccctccttgcactattcttcacatacaccattgaggacaagaggaagggacacccctggcctggccatgtggtgacagctccctgtgcattgacccccaggggtgctgcgatctaggagtggccatgagacgagggggagggagacactttcccgatggtgtggcgggcaggtctggcaggcagggttaggcggggtcgtggaagaggctgtcctggcccagaggctgccaggcctggcctggggctggctcctcttccaggaaaggtgtgaggcctcttgtggctcagcactttggaaagtcagccaagttctaagcttacaggtgcatgaaggttccatgtctgtggtttcaagaacataaaagtggggtgggaggccctgggaggtggtcctgtgtgggggcagccaagtagggggcgtgggatggggaatgaggtaggggatggagtaagatgtgggagaagtgaagtgggggtgaaatggggaagtgggagtgggaggggaggaaggggcaggtgctgggaagttggcccttgtggccctaatctgtctgtgacagcttccgctcctacccatccacagggacaagaacaagtatccccttccccagcctgctccctcttaaaaaaaaatcctcttcctatttagtatgcaacaggtgctcaatgtgtgctcctaccgttctccaggaaaggagggagctaagcaggacacagcccagagctcagcactcccctagcctcccaccctcacctcccaaggcaagggccaaacccaacggtctggctggggacccccaccagcctccccca

SEQ ID NO: 1886977 - DNA, 4001 bp, Homo sapiens
acgtttgttcattcaccgttcattcagcagacatctgctgcggactggctgtgtgctagggcctgtccgaggctctggagccaagtccttgctcgttaacttacatcctgatcaggggaagaaacgcacataagaggagtgtgaatgtaccaggagagccatgtgatcgcacacaagagtgcctggatgcttctttgattgggcagcctgatgaggcccatgaagaggcaacactggaactgagaccacctggccagacgggagcagccatgccgggaccaggggcagcgttccagacggggagccccacagcctctgagccaggcacgagcttgggctgtgtggcaagggccttctttgaaagaggcatatgtagcttcagtatttataattaacaccgctaacctggcagcacttaatgggtctacaggggcctgtgtgagtctgactcagaccactgcatcagatggggaaactgaggcacttaggagcttgatggctacctacagaggacattttgctccatgaatcagtggcgtgacccgcagtggccgcagaaggggcagtggcacaagcctgactagtggctccgtttgcagagggggtgggggcgactgacggccagcaggagggccgtggtgttctcacctgagaaggcgggcgagcactccttttgctagaagaggctaagagatctctacgattatttccatggatgatgacccaaacagatttagtgtggctgcgtgtgtagctgctgtgtcttctagctgtttctggagaccagaatgtgcctccccgaaatatgaagaattgttgggctgaagacaattaagaagcaagtgcaagagagctcctttcctgccttctgtttccctaaagcaaaacatagatctacagagacaaaggcatcctgtcccgccccgtcccagggaggacagcagcaagccccgaagacagctccaggcccacgcgaaggtgtttccttcattttctagatgaagtgactgagtctcagagaggttaactcacctgcccaaagtcgcacagctaggagtggccgagcctggaggacagagccgggtctgtgtgatgccacccccaactctgcatcggctggcgtgtggaaggacgtccatcccttcacgtccctctgcgtgtttgtgagtgcgattctgaggaaagtggcatgagttttctgcatcaagatgcctggtctcaaagggcgggttccatgtggacctgacaaaatgaggggatgtgtacagcatgggaggagagaccggttattttgacccaagccccgggtgcccagtggtaggaggagtgctgaccttctgtgtgatgcatgcccaccaggaaaacctcagaggattatcccagaaatcaggcataaccacacaaggctgcctgtatttggaaactgtctttcctagggtgttttaacaaattcacaggaagacacaatttacaaccaggctaggaagtgactctgggatttcagcatcttttcagagacagaaagatccagatgagctcaggacagtcgggggaaggtggtggcaatctctgtcagaaccgtggagtgttcgttgaagatacttccacagcaggagagctccacgccccatcctggaagctcaccctcctcccctcccaccctctttaggccagatttttgcagagaagctccctgatgagatgcagcgtgcaggtgagagtggcgtctggagacagcctggaggcggccagtgcctccggagggaagtgctccccaaccccggctctgctggagcccgtcctgcttccccttattttaggagctgcttttctcgatgtggcaggcctttcagcagcttctcaggagactctgcttggaggtggcttctcccatgtgactcctgcagctgcctctcaggaaaggtctgtctgaaggtcggccctgacaccgggaagcccacagaaaatctgttttgcagaagtgcttcaaaaataaacatgggctcagatgtctttctgatgggctttggaatctgcctgtttaataaaaaagaatctgcttttcattatgtcatcaacatgttgaataagaaaatggggaattacccctcgcctcgctgtggccccatctctccctgtggtttttgtttgcagcctccagagtggccattcctgtccattgttgttgttgactgactccaggaaggggcaataatttgtcgttctatagtaagtcaggtaaaaggtgaattatctcctgtaatattaactctgcttactgttaagtcagggaaacttcctcccgagttcaaccctacatttacttcacaagtaaagatgagcagaagtctgtactaggggaaccattaaatacggaaggacaggatccaaagagatggcagcactgtgcatatgaaccatgtgatttagaaaccgagcagagatttttaaaaatcattaaaaaacaagccgcctctggtggtttttaaaaagccagtcagcttatgcaggggtggaattatggaactttctagtttctattgtctctcgggtgccatgttcactccaaaccatttcggtaaccctgagccagtatatcctcctggagaaattaacaactgcttcctttaagtcaatgtttttcaaagttcaagtcatggttgattagtggctatgaaaccagttaggtgggtcacagccagcattttaaaaaagaagaaaatgtcattgttttcatagtaagataagtgttccgtggtcctgttgcttgaacatgtatctcttttttggtttgcttttttgtttctgttgtttggaggcatggacagggtacgaacctgtgaatatgtatctttatatgtggttgtgtatgtgtgtttgtctggtcaccaaaaatattcctagggctcatgatcaaacaagttggaaagcttcttatttaaatgatctctactcttatgttaattggggacctagacacactgaccaccttaattgcctatactttagttaccatcagtgttgtgaatacttagtcgttttccaagaacaaccttgccccaaatccctgctctaccatcatcagccttgtgccatattatggtttcctataatctgtcccatttttaattaggaatattgcttatacgtatatcttttttctttgattttttcttttttttaaattctcttttgcttatacatatatcttaacagcctcttcttttcttgttgaagaaataattttgacaagtttttacattttactttaaattaaaaactcatttcccttttgaccacatgcattaaccctcagaactgaagaaggccagattaaccgtaccaactcacccttcttgggagaatgaagcaaaccttttatcatcaagatatgtcaccctttatctctggtaatgccttttgccttagagtccacatttttaaagtatcgtagctgaacaactgtctcttggttagtgtttgcagaatgcatcttttttatccatatgtatataaggtagatctctttttggcaatatagttagcttttatttagttttgttttaaaatagagacagaacatttttggttttaattaaagtatttagtttgtttacatttagtgtagtaattgatatatttgggtttaagtctgcctcctacttgcttcatcctttttttttcctgttgctttttattctagccaccccaccacccttttttttggagcggggggaacggagtctcactcttgtggcctaggctggagtgcaatagcacgatctcaagctcactgcaacctccacctcccaggttcaagtgattctcctgcgtcagacttccaagtagctgggattacaggcacacaccaccacacctggctaattttttgtatttttagtacagacagggtttcaccatgttggccaggctggtcttgaactcctgacctcaggtgatccgcccaccttggcttcccaaagggctggggttacaggcat

SEQ ID NO: 1886978 - DNA, 4001 bp, Homo sapiens
gaggcgggcggatgacctgaggtcgggagttcaagaccagcctgaccaatacggagaaacctcgtttctactaaaaatacaaaaaaatgagccaggcatggtggtgcatgcgtgtaatcccagctactcgggagctgaggcaggagaatcgcttgaacccacgagtcagaggttgcggtgagcccaaatcacgccattacactccagcctgggcaacaagagcgaagctccgtctcaaaaataaataaaataaaataaggtaaatttaagatttggaaggttttagaataatacaaaatcctttaaaggttctagaagttgctttttgtaattagacaatataaattctgtattttttcacatattgcttccaaccctttgggtcttttcctttctccaagaaagagaaagctacaggggagtgactgaccgggtaagtggtgagctttctccaatgcttctggctgttttctttttcttgcataaaaccaaaatcaacaacgaccaaaccaacaccaatcaaggcctccctgcccctagcctttcccagcgacccactctcatctcaggatccccctcaagcacatccctgccggcagcatctgttactactgacgctcctctacttccctcttgcgctttctcaatagcacaaatggatccagttcttaagttctccctcccacaaaatcctgtctcctccccttcccagacatattcctggcacttcttcttccgcaagggcccatcttctcatatataccagccggtgtttatttctttgtttgtttttgagacggagtgtcgttctgccacccaggctggagtgcaatggcgcgatctcggctcactgcaacctccgcctcctgggttcaagcgattctcctgcctcagctcctgagtagctggcgcgcgccaccacgcccggctaatttttgtatttttagtagagacggggtttcaccacgatggtcaggctggtctcgaactcctgacctcgtgatccatccgccttggcctcccaaagtgctaggaatacaggcgtaagccaccatccccggcgaccagctgatgttcttatacacatggtgtccccttcaaggcacattccagttcctatcaggaggattcctcctcggacacactgtgcccccaacctgatccttagtgcttccctcgagacctacaaactgcccccttccccggggggttcacaacgccttatgcctctcaggttccgcccccgcccctcgcataagaatacccatctgcctagcttcggaaattcactttcccccgcccgtcccccggagcatcccttgggcccctgtccctttcccggggctcttctaccttaacccagagcagagggtgcaggcctcctgagcccaggggcccagttatctgagaaaccccacggcctgtcccccgtccagaacgtctcagcgagctcacgacgcgcagtcacgtttttttccccccctctacactgcagatgtggctcccaatgttgacgttggccaggacctttgcaaacaagccaggccaaaaagtttcaatatttacactggctgctttaataagggcattgatcttatcctccgtaaaggtcacctcatagtcctgcagaatgagggcagagtagatgcaggcaagctgggagacggaggccatagcgcgggcgagtgtggggctggggctgccggacgcggtgctactcaccggatgaagtgagggtctcaccccaacgcggccttagcttcctcggaaggaccgaacaccttggcggcagccgaggaaaggggttccacagttttaatttatctgtaattcccacgctttactgttgccacggaaaccgctgagcaatagcctctcagaataggaaatcaagacacagtcagaggaagggcgggacagaaagagcctagcatctctcggggctctgggttggccacccagtcctcccctggtgacataaaaagaaagagacggaaaaggaagaattctacctgagttcgccgtaaagcgcccgccctctcgcctctacgcttccagttgcggcttattacgtcacagtaattgctgtaccaaggtcagaatcgccacctgaggcctgaatatcagcgtaagatagtgtccaaagcagtcttaagaagaggtcccattaccccactctttccgccctaatggaggtctccagtttaggtaaataaaaggattgttgggaggtggagggaaagaactactatttccaacatgcattgcggaacgaaaggccttggccacactgttccttggaaactgtagtcttatggagaggaacatccaataccaaagcgggcacaattctcacggaaatccagtggatagattggagacctccgcgggcttatacatgtcaacagtaatggattggagtgttgttatgttctcctatcttgagagcagagactaggccaaaaaaagatacctacaactcctaggaagactacgattcccatccagccccacgagtctcgggcaagtagtcctctaaggtcagtggcctgcggggacgcagtgggcgccgaatttgcctggggaaggggaaatccgctctggcccacatctgcgcactcctagttccgcccctcagcctcaatgtttgttattgttgttcgggttcaggttgcttctgccccgccccatcgacgcaatctccaccaatcaatggcgtggtcgttttgagggacaagtggtgagagccaatcatcttggcgaacactcggagaaacaggggactagttactgtctttatccgccatgttagattcaccccacagggatagcggcagagccggtagcggacggtccttgcattggcctccggcaggcgccccccgggggcgggaagctggtaaggaagcagctgcggttacctaggggtggggtcacgtcacgctaagagggtttggggaagttcaagggaggaatcctgcaaagaagaggggcgactttttccgtgtttcgggacagctaatctttttagtgacaggatgagagagcccttcatgttcagagggaccgagttggcgagaagcgccggagagttggagagtctgtgggtcagaacatccggcttctactgatggaaggccacgactccccagtggaatgagggcctaggcaaagaaaatgagagagccctcggggtagtgacactgtcttgggaacatggagtgctaggaaacgaaaactggaagactaggatgaactctgcaagtaaaaaaatgacactacttacacatccttctcatcccatcctcgttttttcgagaccttaaagagatctccttggttagggaccttcggttttggaaaggcactgtttttcctttttgtcaaacactcagctttcaggccacacttttttgagacagagtcttgctttctcaaagaccaacccaggctgggcttgaactgctgagctcaagcgatcctcgtgccttggcctcccaaagtgctgggattacaggtataagccaccgctcccggcctcaggtcacacattttaaagcctggataacttggcttgtaaaggcctctggtggagacagtaatcaaagctcaggttgccaggtctgtttcattaaagggattttgttgaggctgaaaaaaaaatcgacgtggaggaaaagctaacttgtgccaagcaaaggtgagtcagtggcatggacttacaataatgccagttatgaaagctgaaggcctaagacccagctatctgactctactggctgtagacctaaggggcagatagggttaaccatagctttggtgtttacacacgtttaagattaatgctcctgctgaaagaatttttttacatgtcagccaaagagagttccttatgaagacctggatatggtccagccaagctagaatctcccacttcctgttttctcttagttggcccaccagctggaggagctccagagtatctaaatttccaattgtgt

SEQ ID NO: 1886979 - DNA, 4001 bp, Homo sapiens
ataaagtgttaaaaataacccaaacagctgagatgagaggcaatacttttggttattcatttgtttttatttccaactcctcatctgttatacaactttggccttttaaaaatgaacttatttgtaaataagaataatgagttggcaactggattcaggtctggccattttacctgagtgatgaaaaaataaatgatgtagcggtctgcgaaaccatctgactcccctttgaaatcctcttgtttcctcctgagattgtctaattatagagtaatgctggaagtattcttcacttgcagattaattagttgatgcttaagtagttctttgaacataaaaggcaacatgtaaatctaagtgtaatcaatcatcctcaagctaatgatcatttaattagcgctttctgctagtttaacagtccataaagaagagggcaatttagggaagggtctcccaccattgcaaagaggtaagatgtagctataactagaatgaaaaacaatgttcaaaatgaaggttttaacattggaaataaattggaaattgactctcccttcttctggtgactaacagccatgagggaactgaaaatgaagcttatcttttagtagcatttgcatatttccagaattaggaatcacagtttaaattgggcttatctaatgttttgtggcaaaaccaaatacttgaggtgatatttacagggcagaaaaaaaagttaactctggagtgtttgtaaatattatgaaggcttaacttcctgcattcttggtaaaatggtttcctaactaggaagtcatgttcaagttgaaagttatatgataaagctagttgttttgtaaaatacttgtattagactttcttacatgattttctaattatttctgtattaattcccctatttgattatatacgcaaagccaggtgccttgcctatttccagccttattcagctaagagtcagcgttcattaagtgagtgtatcaatgaacaaataataactagaaatatacctacacaattaacatgagaaaatgtggctttgggtataaaaattattcttctaacttaaaacatattacgtcaaagaaaatgtaaacagttctgtttgtcaattaagtccccactctaatgctgggccgttaacacaaacatcatcacaaagagatcatccagccaacacgctcaagttacccagcactgcaaggagccgtactggtttatctaatcaatacctgcatcacatgactttttaaagtcacagttttctcaactatgaattggggcaattgcaacagttaaatggaatgatcacaaaaccaaagtaattatttaataggtgtcagcattattaacatcagttgatttttctttttacataattttaactcaacagagaaaaaaatttaaaaccttgctgaaaatacgtgtagccctaccctgcatggacaagaatttgctttgccaactgataattcaagtagcacaaaagcaacgttagagatcagcactgacacctcatgttagtaagaggcacacacctcaaacctaagctttcagggatgttgtaaaattcatcatttaaaaagagatttttaaaaaggcaatagcagttatgaagatatatatcacattagctttttctcaaaagaaaaaaaaagatgcaaagaatttaactgtgaaataaatagtataattagggtaatagtaatactatttaaaattttattcaaaaaaagaaacacttcaacaatagtagtagatgagtgtctcaaagtactcagacgtctaccctgtttttcagaagcatgtttttcatgttcctatcagaactcatggaagaatttctacatgcaatttcttcaaaaaaatctccacatctaaatctgacaagacagaagttttgggcaatccttaccaaataggctggtcatacagcagcacgcatttgactgtattccaaaacatgtgtcttaaaaggctctactgaaatggtccctgcagaagatgaatgcacagaatctatattagacccacaggtaaagctttggatgcaaaaaccacattcaccctacagtcttttgacaaaggtttttcgtgacttagcctctgacttctcttacttcttgagcggatttaataccatcgacttctacagtgtataaataatcttggtctatgcacccaaagttatgtaagacagtagaaaagaacctacctcaatttgagtaaaacatcagtttttagaaaatcatgaatctgtgtaaagcaaggcaggagaaaagcagatattgctaataccaatagattaaaacttacactaagaaaaaaagccaccactttgtaaatattatattggataaatctgaagtggtgtctaacactattccttggctccttttctgaatatgaatgctttctgcattttcttaaaattatgagaatttttgaaaactccaaaaacagaacaaaatttttatcattgctgatttattctcaagctttccctcttctaagaaaacaaaagaggaaaaataaaaacaatatataacaaataaacaaacctaagccatagatgctgaattctgctacagttatcattttgtagaaggatgagtaaaacaagataaaacacgtgagtgttcatttacagaagttacaagctttatgaaatgcaaaggagctgtattttaccacaggaagccaagtgaaatagggtgaaacagaagtcgatcatattcaaataattaaaatacaaatacatttcatgaagactctgattccagacctctgctctcactgtcttccacccccttttattggaatctctgaaaccattttgcttggggcagaaagtagattttagtatagtaggaaaaatgccaaacatccatggcaacttagaatttttccactttctttacatgttcaattgagaccttcataaaattataaatgaaaggatacattatgagcactttctttgaaggggaaaaagagggtggggggaggccttgcctggaagtaaaattttggagtctatatccttcttctctgcagaactcttgggagctttctctgccaacagcaggacccctaaaaaaagcttgcctttgccttcagaattcaaaaaagtagaaccaccagttgctcccctgaccgtgggtgagacgttgatcactaggtggggactggaaagtcctgggctccactttcttgtccctcaaggactgaggtcagtgtgtcttggcgccttatatccactctctccatcctcccgcattccctccccctcaaccagggattcactcctgtttacactggggagactgtaacttctgtttcttaacgtttaaaagaagtttaaaagcttataaaaaggctcttaagatttcttggacaccaatcacttcttacagaacaatattttgatgagttaagtgtaaatgaatcagaaacctatgtattaaatttcccttgacatgaacatcaatttaaaatattaatggaaaaaatgcccagggctcgaagtgttgggggttttctcaaacccaaaatgcttgaacgtggagtggaaatccattcagatcaaccagatttgctgatcctccctctcaacctcccctagattgtaattaccgtggagggagtagtatttccagctattgaccatctggctggggatagatcacattcctggtcattatgcttgcatctcagcagaagcccaaggctgggctgaggctgttgagatgtccagccgctgttcacagaaggctgaccctaaaagctgcctttttttttttttttttgaccaaggaaactaaataaacaatcacagaagatcataaatcactgacaaagatatttagatttgcaacagccctcaaaaacagaatgtgccacaatttatccctcaaagattaactcaatcctgggtcctataattgtgcatcccatgacttctgatgataaatgacacaagggtcaaaacttgagaa

SEQ ID NO: 1886980 - DNA, 4001 bp, Homo sapiens
tatgttcctggcacagttaaaaccagaggcttgatttattttagagtagccatgttaaaaatctcttttatttctagagaaattcataccgcttaggaaacacaagcaaaggaaacaaaagccttgaagctgagcaaataaagaggtaattttctatgtgatggcaaattgggggagctttcaagcatctattgttcattattgggaagacctatgttaaactttgtacgcgtctatgaaatacatttatgaggtattaaatataaccctgttcctacgaattaataccatgtctttgcagcgttcagcctcatttctcacacagcaggctatcagaaaagtctctgttgaaaagtctagagcctgagtcgaagtcaccaagttacaatgactcaatattctccattatttattctcatacacataccttaacagaacaagcgatatacccgctgcgtttgtataaagctcccatgatgtacattctaatacatacacttaaacacacaaatctgtttgtcatctgggaagggtaagattttagttaaacctcagaaagacttctgtgtaataattggaagataactgaaacccctgatgattcattttctctactcacaaaatgagggttaataaaaataataataataaatgggtcatttggaaagtacctaaaatcctaaggctaaatgtattgtgtagatataggagaatctagtgttatagaaggtatacatcagaccactctctggcattattcactggtcataacatagatgggaatatatagctactagaagaattttctcctcggaatgcctagaactaaacaactgatacaattactgtccacaagcaatatggcattttcaaggctttgtcaagcaaatatttgaagtatatatatcacattcgggtgggcatttctgtgcaaatacaagcatgggcacaagcccatttaaaccccgtactcctctctgcaaaacggatataactccattaaggtctattacttgattatacccagtaatgattattgtaatccaggagaaggagaacagagtaaagaatattgaggctctgatgagacatacagccccaaaacccttgggtccccctttcatctttagttacttgtcagcccagaggcctggcctgtgggaacccagctcagcagcaccttcatgtggatgaactttctagataagcgccttgggtaccaacatgctgtaggaaatccgatccacagcccgtgcctgctgctcactcacttaactttcttgtgttggaaaccaggcaggggcccttcacactttccaacagctcccttgtttgcttatgtggaatcatgcagactgagagcaaagaagtatacaggaggcaagggcaggggatagaggcctggtcaggagcaagaagacttggggcaagaaagcctgccctttgggagaagagtcattcatacctctccatcaatccattgctgattatcctccctaactcccttcccccaattcctacacatcaatacaattcctttgtagaggttggccagcttctcccccagcaggtggccagaatagactctgctgggagattgcaagtcacccctagtgcctacatcgaggcaaaaagagaagaaataaggatcacagtgaatcatctgtcaaggttggcagaaacgagattcgactgacagctttttagcccaggcagctactcacctggatctggcatgaggcttgaccaagtcaggtaaaactccaaaatccaaatgagtaagtccaagagtctctactctgccatcttttcctctgccccttggccatcgggtgtggtttagctgaccaagatcatggtccttttgaattcagcagagttgtagaactcccgggccttattctaatcctgtctactattcctcagtctcgaagctgcttttgaagccagaaagcaccggcagtggagtgcagaaagcttgctccagacattgaatgagcccacagaatacctcaatctgatcttttatagtgctttgtttattacctgtgtgcccttatttcataagggaactgagaaagagagagagagagagagagagagagagagagagagcaggaatgatgaagatgactattagtagcaatccaaagacaccttttcttaagcctcattcatagaagcaaatgtggccaaacaacctagcaattgttctctcaaatgtcacctttctgtatgggccactgtgccgataaaactcggctctctcgttttctgctccccctgcagcccctcctgaaaaattacgatgttatcctccaaatatctccggagaaattgaaccgacaaggaaagcttttcttcttctccctccccgtgcaccctcctcccgttttttctttcttcttcacgcagcttgaacaatttggctctgttctgggtgcattcctgtggcccattctctttcggtcccctgtacaggcctgaggatggtgggccagaacacaggcccacattcagacccaggatagcgcttgggggtagggccggggcggaggaaagtgaaccaaatgtacctgggattgttgcgccaccaacctaatacctgggcagaaaaacaaaggctctttagaaagagcctgagcttcggggtaacccatcccccccaccctcccagagttcaaaagataacaggagctgaaaataaggcgctcacataattaaacttttccaagtcatttcaggggacattacacctgatgacagagaactcgctgctaaccctttttgatgaacaatctctgttaagacaagaagggagcctttttctccttgtgtgtgtgtccttgtgggtgcagacccgtgtacctgcacaggtgcatccgtgtctggatgaagtgatcaagccccacacctttttacataagcagaggtgtaaccatcgcttggaaatcctctgatttcaggggaacctacaaaatgaggaggccctctcaacatcaactctcttttattctcaacaaagggcatgtgggcattttaaattttttattcatgtatttatttttgcgtgggatccagaatttgcacttgcccaggttagagggtagaaggcatggcaatcagttctgacagtgaaggaaaaggaattcctgggtccatacaaatcttaaggtgtttagagggcctttcttccaaattaggcaggtgccacacctgttaatacgatcagccttcaagaggcaacttcaagacagcacctcatcatccttagcgtcatgctccttagccaaactttttattaagaggaagaatttttagtcagaaaactggaaaaccctgacacaaagagctacctgtacaagacaactgggaaacaaaaagggaacaaggggccgggtgcagtggctcaagcggcagtttgggaggccaaggcaagcagatcacctgaggtcagcggttcaataccagcctggccaacatgatgaaaccccatctctataaaatacaaaaattagccgggtgtggtggcagacgcctgtaatcccagctattcaggaggctgaggcacgagaatctcttgaaccagagaggcggaggttgcagcgagctgagatggcgccattgcactccagcctgggcgacaaaagcaaaactccatctcaaaaaaaagaaaaaaaaagaatggaacaagtgtgcaccttaacaccaaacaggagttctgctctcttgtaaataaaacacaaagacacacttacaccactgctctaaatcactgcttatttgtttttcaataagactatttgctccatgagacagggactatgtcactgaatccccaacatctagcacatagaagtactcaataactctctccgaatgttgaaaaattccagatacacgaggaagaggaaaacaaatatacagtggtatgctggagctgttccacacccactcacaggagccaattattaaatttatgagagttttctgagccaatt

SEQ ID NO: 1886981 - DNA, 4001 bp, Homo sapiens
cctcagcctcctgagtagctgggactacagacctgtgccaccacacctggctaatttttgtacttttcgtacagacagggttttactgtgttgcccaggctggtctcaaagtcctgagctcaagcagtccacctgcctcggcctcccaaagtgctgggattacaggcgtgagccactgtgcccaaccctattccctttagagaggactttagattatctgcttttaaaaatattaatagaattaaatgcctttttccccccctcttcttttagttttaataaatggcatctggccaggcacagtggctcatgcctgtgattccagcactttgggaggccaaggcgggcggatcacctgaggtcaggcgggtggatcacctgaggtcaggagttggagaccagcctgaccaacatggagaaaccccgtctctactaaaaatacaaaattagccaggtgtggtggtgcatgcctgtaatcccagctactcaggaggctgaggcaggagaattgcttgaacccaggaggagaggttgcagtgagctgagatcgcaccattgcactccagcctccaacaagagtttcactccaacaagagtgaaactccatctcaaaaaaaaaaaagaaaaaagaaaagccatccatcacgattaaatgactttagattatcttgtttattgtctgtcttaccagacagaagtaagctctatgagagcagggattttttgttttatatcaccaatgtatttctgagacctagtaaaatagtgtttggaagatagtaggagtgtggcatatgtgggtttgaatcaataaatgaattttgtggcatgatgggaaatgaagaaaaggtggggatagatggcaccccctctaggcacccgcatcccgtcctgctgtccacctctgctgctgctgtttccccgacccaccgtgatgcccttggctgcccctctccccatcggcttctgagtctccctctgctcctaagctgagtcctctgctctccttgttctcccagcagcatccgttgtccccatccctgcctgatattatagttcatcccagtttctgtgtttctctattacttccagtataagtattataataataaaacacatgtttgcatgttattttatggtttacttttttgggccttctaaccactcttcattcagacttcattatcccatcttatagaatatcacagaagttaaattgacttgttcagcatccctggctaaggagctgcagagcctgggcctttgggataccagggttcctctgcggcaatggccactgctcctcgaggacagggagctgcctcgtgcatcttcgcgtccccagaaactggcaggctcagtgatttgtactgaggagcagctagatggatgtttgggttgggttgactttctcttgtcacatgtcagctgtggcttgagaagatgagtcaggtggcagtttgcaagatgcatgaggcagaggggtgggctacaagcctgctggaggagcccaggccccaccagggataatgtcagtgggaaaggtaggaatggacatctggaaggcagaaatgacagggcctctgagcagttaaacatgaggaatgaatccttttgacaattactggttttctaagctgctgctggggaggatagaggtgggtgagtcaggagccactgcagaggcttctgggaattgtagttggggctctaaccctccttctgctcttcctttcccgtgctgcctgccaccagaggggccatggcaccccctacaggtactgggggtgggactggtggtgcatgtgtggttttttggggtaaggcaaggtgggaatctgtgaccatgacccaccttcctccagggtctaatctttccccttcctctgcccctccattcagtggtggtcactctggagccttgtgaaggagctgagacatatgtgaatgggaagcttgtgacggagccgctggtgctgaagtcaggtagaagatgtgtcgcagattgagggttctggggcgtggctgtgtgtaggaagtctcaagggaggtccttctgggtgcatcctagaggaggaccctgaaatacatcagaaatagcacggggatataaagaaggaactgggaagtgaaggtcaaggagtcaggtcttggtttctctttccgccccagggaacaggaagaggatgccaagctcttgcaattccctttggttgacaagaatggggttggtccctgggtgtcagccaggggagcataggctccaactgccttcagacttggggtgatgaaggggagggtgtcacagcccctgtgccagattctctatgccttgggtgtagggatggatttggtgctgatgggaagcgagtttacttttccctcctcccatctctagggaataggattgtgatgggcaagaaccacgttttccgcttcaaccacccggagcaggcaaggctggaacgggaacgaggggtccccccacccccaggaccgccctctgagccagtcgactggaactttgcccagaaggaactgctggagcagcaaggcatcgacataaagctggaaatggagaagaggtgcgagggggttacccacgtgccccatggccgtctaggccgtccctcccgggcctctgggcccgtgtcctcctcttgtcagatactcaccaaggttgctcttccttccctccctgtccaatcccaggctgcaggatctggagaatcagtaccggaaagaaaaggaagaagccgatcttctgctggagcagcagcgactggtgaggggcagcaggggctggggatgggctgatgggcagatgagccgcaagcctgagtccgagtgcagtgctcaccgctgagccagagtgggaaatgggcatgggggtaaggggaagggtccaagaggaaaaagccaggagagagatgtgactacaggaagaatccattgtgaggaaggaaggaagattcctccagttgaccaggccttcccatactccagtttctcgtgccaagtttatgattttcaccatatccaagtaccacctgtgttggtattaagattgttgtggtttttttttttttttttttttttggagatggagtctcctgtcacccaggctggaacgcagtgggatgatctcgacttactgtagcctccgcctcctgggttcaagcgattctcatgcctcagcctccccagtagctgggattacaggagcccgccaccatgcctggctaataattattgtatttttagtagagacagggtttcaccatgttggccaggctggtctcgaactcctgacctcaggtgatccgcctgcctcagcctcccaaaatgctgggattacaggcatgagccaccgcacccggccatggactttctattttgtttttgaggcaggatcttgctctgtcaccctggctggagtgcagtggcctgatcatagctcactgcagcctcgaactccttgggttcaagcagtccttccacctcaacctcctgagtagctgggatcacaggtgtgcacttccatgcctggctacattttttattttttgtagaggtgggggtctcactacattacccaggctggtcttcagctcctgggctcaagtgatcctcctgccttggccttccaacatgctgggattgcaggcacgagccaccacccctcaatggtcttttaagtcttgcacaaagttccacactcgattagctacaactaatacttatggtaactttctcggtgccggccatggttctaagtactccacgtggatctgggaggtagatcccgtcactatctctgttgtctagaagagcagcgttaagcagtctgcccaagggtgcgctgttggggtggagcaggacttgaacccaggctccctgatgggcgtgtttccagtgtacttaggacacactgggccaagacacatgggctctggatgtccttagccctctcttcctctttctttctctggccccagtat

SEQ ID NO: 1886982 - DNA, 4001 bp, Homo sapiens
agtagcaagaaagcaaataacctgattttaaaaatagacaaataatctgaatagacttttaaaaaaaatttttttttgtagagatgaggcttcactatgttgcccaggctggtctcagattcttgggctcaagcggtcctcccaccttggcctcccaaagtgctgagattatgggtgtgagccaccatgcccagcctgacacagccattcttaaaagaagacatacaaatggccaacaggtttgcgaaaaaaaaaatcactattattagggaaatgcaaaataagattacaatatcacctcacacctgttagcatggctattaagctgggtgtggtggctcacacctgtaatctcagtactttgggaggctgaggtgggcagattacttgagggtcaggcgtttgagaccaccctggccaacatggtgaaacgccatctctactaaaaatacagaaattagccaagtgtggtggcacatgcttgtaatcccagctacttgggaggctgaggcaggaagattgcttgaacccaggaatggaggttgcagtgatttgagattgtgccactgcactccagcctgggcaacagagtgactcaatctcaaaaaaaaaaaaaaaaaaaaaaaaaaagaattgctattatcaaaatgatgaaaaaaatgtgttgctgaggatgtggagaaaccttttacactgttagtgttattacagccattatggaaaactatatggaggtttcccaaaaaattaaaaatagaactaccatatgatccagcgatgctatttctgggcatatattgagtaactgaaatcagtatatcaaagacttatttgcacttccatgttcatttcagcattatgcacaatcgctgagataatggaatcaacctgtgtccatcgatggatgaatggataaagaaaatgtagtaaacatatgcaatggatactattcagccttaaaaaagaatttctgtcatttgtgacaacatgaatcaacatatgcaatggatactattcagccttaaaaaagaatttctgtcatttgtgacaacatgaatcaacttggaggacatactaagtgaaaaaagccaggcacagaaagacacataccacatgatctcacttatatgtggaatcttaaaaagtcaaactcatagaagtagacagtagaatagttgttagaggctggaaagggacggggcgggtaggagatgcaggatggggagatgctgttcaaagggtacaaggttcagtcagacaaaagcagcaagtttctgagatctattgcatagtgtggtgactatagctaataataatatatcgtatatctcaaaactgctaagagtaaatttcaaatgtctcaccataaaaaacgttaaacaaggtgatggatatgttaagcttgacttagtcgttccatattgtatacatatattaaaatataacattgtaccccattaaatatttacaattatgatttgtacatatatttaataataataaaaatctaaataaaatattaaagaatgcctacaaagcaaggtttaagatgtaaatgaacacagtagtatcacggaagggattaaatattgtaacatttattgagcactacgtatatatttttgaattcccacaaccctggaagaatgagaaaatcgagactcagggagcgttaagtattttgcccaactgcatacgataaatacataggaaaaacaaacacacagaagaaaaccaaaccaaccaaagtatctctttcaaaaggaaacgacagtctccttaaaggcaacccgagacaaatttcagcaaagccgtgggacacatggccttcgagctgctgtccattattgagtagcagaagccaagaaggatggaatgttttggaagaaaggggtcgggggtcggggtgttcaaaggacggaccgaaggtaagattgaagtggggtcagaccatggcgggacagcgcaccggagaatgaacagcgattagggaagagtggcgagcgggtggcaaggacggagggcggaatcccggccggggctgcgggaggaaagcgcacggacaggagccccaccgctcgaatgcagcgcccggcggctggcctcgtgaggtcacaggcccttacgaggtggggcaggcaggcgcggccgcagtgccttccagtcagcgcggaggcggtattgagttcagccgctccccacagccccggagcccctgggcggtggcggtggccgcggcagcaccggctcgacagccgatagggtcctgggcccgctccgctcggggtggtcggtgggcggagcgtcgggctcggtcaggtgaccgcgggggcggggccgcgcggcgcgggatcctgggaaggctgcagagctagagcagcgccgcccgaggggcggcaggggctgaccacagagagcgcgggggcctccagccgagaggaagggagggcagctcgggccggtagtgggacccttgggggacagaggtggggaggggaggcgagacccgctgaggagttgggaggggagccttcgaggtggagggtggagaatgcagtagggtgcgagggaggaaggagaacagtggtggggctgggtgaaggaaggttccagaaaggaacagtgaggggactgagtgggacaaaggggcagattgaagggtgactgagactgatcaggtggttcctcagaaatggtggttgttgtagaaggctggcggtcccgggggtggtgtcacttccctgctccttcagcgggaggcggagacctctattagcacactcatttccatcttgcgggtcgttcactcgctagcttacaggtcctctttcttcctgtagaagtcgttggcttcgtaagagcagggtctatgggaagcctcctcagcgtgggttcttggaagaggtggaggttcgttcactcgacgtttgttacacaaatatgaaaacagggtgacgaaagtttgaacgttcatgaatggcagtagctgcaatggagttgtgtatgcagttggtattaatgacgttttcagtccctctggcgagagaaaagcgagcgagtcgggcggcttgtgagggaaatgtggcatgagaggaaagaggaaggtattttgtgaaaggatgtcatacagagtcatgcttcagtgaagacgcctttgtttttctcatcttaaagcctcacagccccattttcctctcagctactgccttatttctcttaacaacgtaactccttgaaagagcctaccctactggctgggttcaatttctttaccccgttctctcttgtactcactctgacgacattgtctccttaccaccccacccagatggctcctttcaagtttgtcagtgtcctccgtgttgtgaaacctagcgaaccattcagtactgatcttaaccgcccaccccaccccccttttttttttttgagacaaggtctctgtcgtccaggctggagtgcagtggtgcaatcatagcccactgcagcttcaaactcctgggctcaaaagatcctcctggctcagtctttggagtagctgggactaaggtcgccatgtccagctgattaaaaaaaaaattctgtagaggtgggagtttcactgttgcccaggctggtcttgaactcctggccttaagcagccctcctgcttagacccccacccccgcatcaaagtgttgggattacctgcataagccaccatgcacagcctgattgctcactcttgaagtactttcttcacttggcattcaggaacccagacctacctgatttccctcctcacagtaaccagagtgatcctttcagaaagaacttcagattatgtaatccttctcctcagaactctttcaatgcttgtcactccttcagagtacaagccacagttcttactgtcatctaggggtcctccatgatatgccactttcacttagcctctctgatctctcctgcttcagcctcctggggccttcccactattccttgaacattcttcttgcctc

SEQ ID NO: 1886983 - DNA, 4001 bp, Homo sapiens
acaatatcacctcacacctgttagcatggctattaagctgggtgtggtggctcacacctgtaatctcagtactttgggaggctgaggtgggcagattacttgagggtcaggcgtttgagaccaccctggccaacatggtgaaacgccatctctactaaaaatacagaaattagccaagtgtggtggcacatgcttgtaatcccagctacttgggaggctgaggcaggaagattgcttgaacccaggaatggaggttgcagtgatttgagattgtgccactgcactccagcctgggcaacagagtgactcaatctcaaaaaaaaaaaaaaaaaaaaaaaaaaagaattgctattatcaaaatgatgaaaaaaatgtgttgctgaggatgtggagaaaccttttacactgttagtgttattacagccattatggaaaactatatggaggtttcccaaaaaattaaaaatagaactaccatatgatccagcgatgctatttctgggcatatattgagtaactgaaatcagtatatcaaagacttatttgcacttccatgttcatttcagcattatgcacaatcgctgagataatggaatcaacctgtgtccatcgatggatgaatggataaagaaaatgtagtaaacatatgcaatggatactattcagccttaaaaaagaatttctgtcatttgtgacaacatgaatcaacatatgcaatggatactattcagccttaaaaaagaatttctgtcatttgtgacaacatgaatcaacttggaggacatactaagtgaaaaaagccaggcacagaaagacacataccacatgatctcacttatatgtggaatcttaaaaagtcaaactcatagaagtagacagtagaatagttgttagaggctggaaagggacggggcgggtaggagatgcaggatggggagatgctgttcaaagggtacaaggttcagtcagacaaaagcagcaagtttctgagatctattgcatagtgtggtgactatagctaataataatatatcgtatatctcaaaactgctaagagtaaatttcaaatgtctcaccataaaaaacgttaaacaaggtgatggatatgttaagcttgacttagtcgttccatattgtatacatatattaaaatataacattgtaccccattaaatatttacaattatgatttgtacatatatttaataataataaaaatctaaataaaatattaaagaatgcctacaaagcaaggtttaagatgtaaatgaacacagtagtatcacggaagggattaaatattgtaacatttattgagcactacgtatatatttttgaattcccacaaccctggaagaatgagaaaatcgagactcagggagcgttaagtattttgcccaactgcatacgataaatacataggaaaaacaaacacacagaagaaaaccaaaccaaccaaagtatctctttcaaaaggaaacgacagtctccttaaaggcaacccgagacaaatttcagcaaagccgtgggacacatggccttcgagctgctgtccattattgagtagcagaagccaagaaggatggaatgttttggaagaaaggggtcgggggtcggggtgttcaaaggacggaccgaaggtaagattgaagtggggtcagaccatggcgggacagcgcaccggagaatgaacagcgattagggaagagtggcgagcgggtggcaaggacggagggcggaatcccggccggggctgcgggaggaaagcgcacggacaggagccccaccgctcgaatgcagcgcccggcggctggcctcgtgaggtcacaggcccttacgaggtggggcaggcaggcgcggccgcagtgccttccagtcagcgcggaggcggtattgagttcagccgctccccacagccccggagcccctgggcggtggcggtggccgcggcagcaccggctcgacagccgatagggtcctgggcccgctccgctcggggtggtcggtgggcggagcgtcgggctcggtcaggtgaccgcgggggcggggccgcgcggcgcgggatcctgggaaggctgcagagctagagcagcgccgcccgaggggcggcaggggctgaccacagagagcgcgggggcctccagccgagaggaagggagggcagctcgggccggtagtgggacccttgggggacagaggtggggaggggaggcgagacccgctgaggagttgggaggggagccttcgaggtggagggtggagaatgcagtagggtgcgagggaggaaggagaacagtggtggggctgggtgaaggaaggttccagaaaggaacagtgaggggactgagtgggacaaaggggcagattgaagggtgactgagactgatcaggtggttcctcagaaatggtggttgttgtagaaggctggcggtcccgggggtggtgtcacttccctgctccttcagcgggaggcggagacctctattagcacactcatttccatcttgcgggtcgttcactcgctagcttacaggtcctctttcttcctgtagaagtcgttggcttcgtaagagcagggtctatgggaagcctcctcagcgtgggttcttggaagaggtggaggttcgttcactcgacgtttgttacacaaatatgaaaacagggtgacgaaagtttgaacgttcatgaatggcagtagctgcaatggagttgtgtatgcagttggtattaatgacgttttcagtccctctggcgagagaaaagcgagcgagtcgggcggcttgtgagggaaatgtggcatgagaggaaagaggaaggtattttgtgaaaggatgtcatacagagtcatgcttcagtgaagacgcctttgtttttctcatcttaaagcctcacagccccattttcctctcagctactgccttatttctcttaacaacgtaactccttgaaagagcctaccctactggctgggttcaatttctttaccccgttctctcttgtactcactctgacgacattgtctccttaccaccccacccagatggctcctttcaagtttgtcagtgtcctccgtgttgtgaaacctagcgaaccattcagtactgatcttaaccgcccaccccaccccccttttttttttttgagacaaggtctctgtcgtccaggctggagtgcagtggtgcaatcatagcccactgcagcttcaaactcctgggctcaaaagatcctcctggctcagtctttggagtagctgggactaaggtcgccatgtccagctgattaaaaaaaaaattctgtagaggtgggagtttcactgttgcccaggctggtcttgaactcctggccttaagcagccctcctgcttagacccccacccccgcatcaaagtgttgggattacctgcataagccaccatgcacagcctgattgctcactcttgaagtactttcttcacttggcattcaggaacccagacctacctgatttccctcctcacagtaaccagagtgatcctttcagaaagaacttcagattatgtaatccttctcctcagaactctttcaatgcttgtcactccttcagagtacaagccacagttcttactgtcatctaggggtcctccatgatatgccactttcacttagcctctctgatctctcctgcttcagcctcctggggccttcccactattccttgaacattcttcttgcctcggggcttttgtacttacttttctttctggctgaaatgctcttccctaagatattaatcagctccctacttcagttcttgcaggtctgtactcaaaagtctccctctcagtaaggtcttccttggccacccattctgttccctgcatctcttcccctatactacatttcatattcccctccctgctttacttttttttttgtacttattgcagataacatacaatatgttttatttttctattttattatttcactccctgactagaacataagcttcatgagggcaga

SEQ ID NO: 1886984 - DNA, 4001 bp, Homo sapiens
ccatcccaggccttcaccttgccgggttcatttcctctccctgtaccctaaacactttcaattatggacactctcttgtctctgaactcggataaatgctaccttgttaactaatagtaccactgagtatattaatgattaatagctaattagtcataatactgtaatacaatggaggcttcctttaccgcagctgctgtaggtctcaaacacacacatccccttccctattcctggccacaggacaggcgaggctctaaatctgtttttctgagcaccctggcaatctcgaaactgttcagtttttagcggtcccattcatacggcgaatgaccactactgcttgcatgctgccgagctgatttctgccccccgtcactcccactgccctccaaggagaacaaggaggtcagcagtcgttaagtttttattcaaagtctctttttacttccaaatctcacgtcgacccacttttctgctttggcccgtttcttcactttaccttccccatcctaacccgcgcctattttgtggaatcccacagcagcgcctgctacaaccccctgcactcttcactttggcttcctttcggcaaccacgccccccgactcacggagagcgccgcgcatgcgcagctctcgtctttacctgggctcccggcagtgggcggagtgggagaaggcgggggcggcgcggggagccggcggttatctgggcggcggagcgctcacaatgtggcaggagacagaaaaggtgcgcccgggccggcccgagggctgcgcatgcgcgccgccgctcccagcggccgggatgctgagggggcgggcggagggaggtgtcgggatccccgttgggcgggggggccagcgagggaaggggccgcgggcgcgcgcgggcgcgcgcgtcctcgccgccgctcgcctccctccctgccccctccggcacacacatccacacacgcacaccccctcccctgccgcccgccccgcgctgcccgccccgccggccccgctcgccctcgcgcgctgggaagggagtcgcgagacgtcggagcggcggccacgtagcgctgcggcggcagcggcagcggccgaggccgggtctgaggagcggccctgaggacagacgttgggcagggggggaggggctggcccagccggcggttgtgactcgagcgccgcggctgcaggcccccgccgcagggatggaccgccgaggcggcggccggggcggcggaggcggaggcggccggcccgggtgagtaagggccccttcccccacgcactcgccaccgccgcggcggcgcccccggcagcccttcctctccgccgcccgcggggccggcccgggctccgggggccggcgtaacccttcgccgaggcagctgcgtgcgctaggccggagcagcccccatccggctgggaggccccgggcgctgagctcctcaggcacccagcttgggctgggggcgccccgctcctgctctttcgcccccttcctcctggacccgggcttggctgcagttttgcagcgggtccgctcgccctgaggcctgaggggaggctggggcggcacgggttagcgggccgagaggaggtttgcaccggtcctcctgcgagcgttctcctgccctgcagctggtggcttgcacccactacctcccccgccttgcggttgcacccaaacctccaacccccgggagtattgtgccgccagtagataaaatgcgtctgatgtacacccgccaccggcagccccacactcaccccagtgggtaatgcagacctttctccacccccacctcctcctcccctccaatcaggctctgctgaagattcttagatccgagacaccaaaggtagtgacacccccgttacatctccacgtaacatgttcattgtcgagggatgtctccaatagaaatgataaatgcccctgcctcacctcgaagtctgtcttcaggattcgagaccttctctgaaaaggtccagctttgatcacaactagagcatccctcccccacaacacagacacactcatacactcactcacttcctgattgccgagcagcccctgtcaccgcggatccattgtcagaaatggcttttgccaatcaaaggaatgtgcttgtgcctttggagaagggtgctttccacatccacgttttcggggtgttcctgcgtgagtctgcctttgcccccagattgttcccgtgttcaagcatcattatcatagtgtatcccttacatgcatctcccgtggaccctcaggaacacctgagtgatgcttttttcccagttgattagatatggtgtgtgcaagtttctcctattttgttgtagtgtttgggatctatgatcaaggcataatgtattcgtagggtagtattcaggaaagaatgtgtattttttttttccagaggatggccaggcccgtattgttctgggaatggcaactagcacatgctttgttgacaacatgtgtgtgcttagggattgaggagctgctgttgctgggatgtgtggtgtctgagctgaatacaggtgatgtcgtcgagtggggctgttttgtgagtggggcttgacactgtgattgtcagtggtggcaggcagcttggttgtttatatcaggaccgtgcacagtattcagataggtaatacctttagtataattttgtttaaactgttcactaagttttagtgatcctggaactgacttcagtggttagtaatctttgtttgggttcatggaagtctttagaaccgtcttctccattaaatagacacataattttgtatgccactaaagtcaacttgaagctggtcctgggacttcaggttaagatctctgttatgcaaaagtgaaaggaacttgcgttgtgtgttttgtttagttggttagtttttttttaaaaaggattagagtacattgtctggccctgagcaataaacaacaaagtagcttatgcatgtaaccttgtgttttgttctttgattaggataagttaggtatttgtaaattatcatttcctcgttttcctgtaaaaaggaaatgtatgtgagagtctttcagaaaaagttaaaactagagtcaaaataatttgtttagacttgaccaattggtaatgtatgttcctggcaccagattctaaatgtagcaaatttcaacagcaaagtccaaggtctgttttataatgcctatcctgaatctttatgcgttggctgaagttgatctgatctcttaaaagaaggctatatcattctcatagcggtgtacctgctccataaaaaggatttttttttcaactttgttaactgtgatttcatgtcttaatggggatggtgccatcaaaatcattcattttgaaattttgttttaatggaaggattttaattgtggttagggaattcagcctccatatatagaatctggaactgaggatgaactttgcaccattctatcaataagcaggtgataaatatcagctatttttgtttaaattactctgcacccagcttttgcctttcggtcgtattgcaatcaggagatatttattccagcttgtgatagtgttggaatgggtagtaattttaagcacagtaccggctctttaggagcttacgattctgccattatttttcacttaaaaaattctttgagaccttcctattctttgcatctggggggttctgagaagctaaggaatttatgatattaactggcactttggaaggcaagggagccttggaatcttgcctatagaacctgttccatacacctgaagaatagcatttattctactaattatgcagcataccctataagtttgaaagcatgctgaagttgcaaatattgccttttttattatctcataaacatgctgccagtgctttatattacacattatattttttgctcatgtcatgcctgaagttttactgtcggaaatcatttggctattctaaacccaaaccatttcaaagttgcaagtaggttacttt

SEQ ID NO: 1886985 - DNA, 4001 bp, Homo sapiens
ccatgtctcaaataagaaaaaaaaaaaaagaaaaagaaaatgtttatgtgctattggggtcagccttagtgcaagaacattagttaagtgtgcttttaataatggaaggagttccaattaaggtaggatttggacaacttcagggaagtttggtttatgttgggaaagggaaccctgacctcggatttgctgtcttgggtcttttccatcccaggccttcaccttgccgggttcatttcctctccctgtaccctaaacactttcaattatggacactctcttgtctctgaactcggataaatgctaccttgttaactaatagtaccactgagtatattaatgattaatagctaattagtcataatactgtaatacaatggaggcttcctttaccgcagctgctgtaggtctcaaacacacacatccccttccctattcctggccacaggacaggcgaggctctaaatctgtttttctgagcaccctggcaatctcgaaactgttcagtttttagcggtcccattcatacggcgaatgaccactactgcttgcatgctgccgagctgatttctgccccccgtcactcccactgccctccaaggagaacaaggaggtcagcagtcgttaagtttttattcaaagtctctttttacttccaaatctcacgtcgacccacttttctgctttggcccgtttcttcactttaccttccccatcctaacccgcgcctattttgtggaatcccacagcagcgcctgctacaaccccctgcactcttcactttggcttcctttcggcaaccacgccccccgactcacggagagcgccgcgcatgcgcagctctcgtctttacctgggctcccggcagtgggcggagtgggagaaggcgggggcggcgcggggagccggcggttatctgggcggcggagcgctcacaatgtggcaggagacagaaaaggtgcgcccgggccggcccgagggctgcgcatgcgcgccgccgctcccagcggccgggatgctgagggggcgggcggagggaggtgtcgggatccccgttgggcgggggggccagcgagggaaggggccgcgggcgcgcgcgggcgcgcgcgtcctcgccgccgctcgcctccctccctgccccctccggcacacacatccacacacgcacaccccctcccctgccgcccgccccgcgctgcccgccccgccggccccgctcgccctcgcgcgctgggaagggagtcgcgagacgtcggagcggcggccacgtagcgctgcggcggcagcggcagcggccgaggccgggtctgaggagcggccctgaggacagacgttgggcagggggggaggggctggcccagccggcggttgtgactcgagcgccgcggctgcaggcccccgccgcagggatggaccgccgaggcggcggccggggcggcggaggcggaggcggccggcccgggtgagtaagggccccttcccccacgcactcgccaccgccgcggcggcgcccccggcagcccttcctctccgccgcccgcggggccggcccgggctccgggggccggcgtaacccttcgccgaggcagctgcgtgcgctaggccggagcagcccccatccggctgggaggccccgggcgctgagctcctcaggcacccagcttgggctgggggcgccccgctcctgctctttcgcccccttcctcctggacccgggcttggctgcagttttgcagcgggtccgctcgccctgaggcctgaggggaggctggggcggcacgggttagcgggccgagaggaggtttgcaccggtcctcctgcgagcgttctcctgccctgcagctggtggcttgcacccactacctcccccgccttgcggttgcacccaaacctccaacccccgggagtattgtgccgccagtagataaaatgcgtctgatgtacacccgccaccggcagccccacactcaccccagtgggtaatgcagacctttctccacccccacctcctcctcccctccaatcaggctctgctgaagattcttagatccgagacaccaaaggtagtgacacccccgttacatctccacgtaacatgttcattgtcgagggatgtctccaatagaaatgataaatgcccctgcctcacctcgaagtctgtcttcaggattcgagaccttctctgaaaaggtccagctttgatcacaactagagcatccctcccccacaacacagacacactcatacactcactcacttcctgattgccgagcagcccctgtcaccgcggatccattgtcagaaatggcttttgccaatcaaaggaatgtgcttgtgcctttggagaagggtgctttccacatccacgttttcggggtgttcctgcgtgagtctgcctttgcccccagattgttcccgtgttcaagcatcattatcatagtgtatcccttacatgcatctcccgtggaccctcaggaacacctgagtgatgcttttttcccagttgattagatatggtgtgtgcaagtttctcctattttgttgtagtgtttgggatctatgatcaaggcataatgtattcgtagggtagtattcaggaaagaatgtgtattttttttttccagaggatggccaggcccgtattgttctgggaatggcaactagcacatgctttgttgacaacatgtgtgtgcttagggattgaggagctgctgttgctgggatgtgtggtgtctgagctgaatacaggtgatgtcgtcgagtggggctgttttgtgagtggggcttgacactgtgattgtcagtggtggcaggcagcttggttgtttatatcaggaccgtgcacagtattcagataggtaatacctttagtataattttgtttaaactgttcactaagttttagtgatcctggaactgacttcagtggttagtaatctttgtttgggttcatggaagtctttagaaccgtcttctccattaaatagacacataattttgtatgccactaaagtcaacttgaagctggtcctgggacttcaggttaagatctctgttatgcaaaagtgaaaggaacttgcgttgtgtgttttgtttagttggttagtttttttttaaaaaggattagagtacattgtctggccctgagcaataaacaacaaagtagcttatgcatgtaaccttgtgttttgttctttgattaggataagttaggtatttgtaaattatcatttcctcgttttcctgtaaaaaggaaatgtatgtgagagtctttcagaaaaagttaaaactagagtcaaaataatttgtttagacttgaccaattggtaatgtatgttcctggcaccagattctaaatgtagcaaatttcaacagcaaagtccaaggtctgttttataatgcctatcctgaatctttatgcgttggctgaagttgatctgatctcttaaaagaaggctatatcattctcatagcggtgtacctgctccataaaaaggatttttttttcaactttgttaactgtgatttcatgtcttaatggggatggtgccatcaaaatcattcattttgaaattttgttttaatggaaggattttaattgtggttagggaattcagcctccatatatagaatctggaactgaggatgaactttgcaccattctatcaataagcaggtgataaatatcagctatttttgtttaaattactctgcacccagcttttgcctttcggtcgtattgcaatcaggagatatttattccagcttgtgatagtgttggaatgggtagtaattttaagcacagtaccggctctttaggagcttacgattctgccattatttttcacttaaaaaattctttgagaccttcctattctttgcatctggggggttctgagaagctaaggaatttatgatattaactggcactttggaaggcaagggagccttggaatcttgcctatagaacctgttccatacacctgaagaatagcatttat

SEQ ID NO: 1886986 - DNA, 4001 bp, Homo sapiens
gtaatttaaaaagaatagaaatttatttcttacagttctggaggctgggaaatccaatatcaaggcgccctcatctggtgtgggtcttcttgctgcatcatcccctagcagaaggcaggagggcaagagagtacatgagagagcaacagagcaaaggggtccaaacttgattttataacaagcccacttttgagataactaacccactgtttattttttaattaattaattaatttattattattattttttgagacagagcctcactctgtcacccaagctggagtgcaatggcgcgatctcagctcactgcaacctccgcctcccaggttcaagtggttctcatgcctcagcctcctgagtagctagaataataggtgcatgccaccacgcccagctaatttttttgtatttttagtagagacgggtttcaccatgttggccaggctggtctcaaactcctggcctcaagtgatctgcctgccttggcctcccaaactgctgggattacaggcatgagccactgcgcccggcctggagataactaacgcactgtttatgatatgaatccattcatgaaggcagagccctcatgacctaataaactcttattaggccccagtttccaacacttttgcattgggattattaagtttccaacatgtgaactttgggggacacattcaaaccatagcagtgctattttagggaaaagtagctgcatgtgtattgaaaatgtcagccaggtacagtggctcatacctgtaatcccattactttgggaggctgaggtgggaggactgcttgagcccaagagtttgagaccaacctggggaacatagggagaccttgtctctacaaaaatttaaaaattatccaggtgaggcagcacactcctgtagtcccagctactccacaggctgaggtgggaggcttatgtgagcgtggtaggaggaggcggcagtgagccgtgatcatgctactgcgctccagcctgagtgacagagtgagaccatgtctcaaataagaaaaaaaaaaaaagaaaaagaaaatgtttatgtgctattggggtcagccttagtgcaagaacattagttaagtgtgcttttaataatggaaggagttccaattaaggtaggatttggacaacttcagggaagtttggtttatgttgggaaagggaaccctgacctcggatttgctgtcttgggtcttttccatcccaggccttcaccttgccgggttcatttcctctccctgtaccctaaacactttcaattatggacactctcttgtctctgaactcggataaatgctaccttgttaactaatagtaccactgagtatattaatgattaatagctaattagtcataatactgtaatacaatggaggcttcctttaccgcagctgctgtaggtctcaaacacacacatccccttccctattcctggccacaggacaggcgaggctctaaatctgtttttctgagcaccctggcaatctcgaaactgttcagtttttagcggtcccattcatacggcgaatgaccactactgcttgcatgctgccgagctgatttctgccccccgtcactcccactgccctccaaggagaacaaggaggtcagcagtcgttaagtttttattcaaagtctctttttacttccaaatctcacgtcgacccacttttctgctttggcccgtttcttcactttaccttccccatcctaacccgcgcctattttgtggaatcccacagcagcgcctgctacaaccccctgcactcttcactttggcttcctttcggcaaccacgccccccgactcacggagagcgccgcgcatgcgcagctctcgtctttacctgggctcccggcagtgggcggagtgggagaaggcgggggcggcgcggggagccggcggttatctgggcggcggagcgctcacaatgtggcaggagacagaaaaggtgcgcccgggccggcccgagggctgcgcatgcgcgccgccgctcccagcggccgggatgctgagggggcgggcggagggaggtgtcgggatccccgttgggcgggggggccagcgagggaaggggccgcgggcgcgcgcgggcgcgcgcgtcctcgccgccgctcgcctccctccctgccccctccggcacacacatccacacacgcacaccccctcccctgccgcccgccccgcgctgcccgccccgccggccccgctcgccctcgcgcgctgggaagggagtcgcgagacgtcggagcggcggccacgtagcgctgcggcggcagcggcagcggccgaggccgggtctgaggagcggccctgaggacagacgttgggcagggggggaggggctggcccagccggcggttgtgactcgagcgccgcggctgcaggcccccgccgcagggatggaccgccgaggcggcggccggggcggcggaggcggaggcggccggcccgggtgagtaagggccccttcccccacgcactcgccaccgccgcggcggcgcccccggcagcccttcctctccgccgcccgcggggccggcccgggctccgggggccggcgtaacccttcgccgaggcagctgcgtgcgctaggccggagcagcccccatccggctgggaggccccgggcgctgagctcctcaggcacccagcttgggctgggggcgccccgctcctgctctttcgcccccttcctcctggacccgggcttggctgcagttttgcagcgggtccgctcgccctgaggcctgaggggaggctggggcggcacgggttagcgggccgagaggaggtttgcaccggtcctcctgcgagcgttctcctgccctgcagctggtggcttgcacccactacctcccccgccttgcggttgcacccaaacctccaacccccgggagtattgtgccgccagtagataaaatgcgtctgatgtacacccgccaccggcagccccacactcaccccagtgggtaatgcagacctttctccacccccacctcctcctcccctccaatcaggctctgctgaagattcttagatccgagacaccaaaggtagtgacacccccgttacatctccacgtaacatgttcattgtcgagggatgtctccaatagaaatgataaatgcccctgcctcacctcgaagtctgtcttcaggattcgagaccttctctgaaaaggtccagctttgatcacaactagagcatccctcccccacaacacagacacactcatacactcactcacttcctgattgccgagcagcccctgtcaccgcggatccattgtcagaaatggcttttgccaatcaaaggaatgtgcttgtgcctttggagaagggtgctttccacatccacgttttcggggtgttcctgcgtgagtctgcctttgcccccagattgttcccgtgttcaagcatcattatcatagtgtatcccttacatgcatctcccgtggaccctcaggaacacctgagtgatgcttttttcccagttgattagatatggtgtgtgcaagtttctcctattttgttgtagtgtttgggatctatgatcaaggcataatgtattcgtagggtagtattcaggaaagaatgtgtattttttttttccagaggatggccaggcccgtattgttctgggaatggcaactagcacatgctttgttgacaacatgtgtgtgcttagggattgaggagctgctgttgctgggatgtgtggtgtctgagctgaatacaggtgatgtcgtcgagtggggctgttttgtgagtggggcttgacactgtgattgtcagtggtggcaggcagcttggttgtttatatcaggaccgtgcacagtattcagataggtaatacctttagtataattttgtttaaactgttcactaagttttagtgatcctggaactgacttcagtggttagtaatctttgtttgggttcatggaagtctttagaaccgtcttctccattaaatagac

SEQ ID NO: 1886987 - DNA, 4001 bp, Homo sapiens
gggacaaaagccacctcgttcagtgtcacctgaatgtgggtttcgtatcaaatgtagaggcatttaaatttacattatcagatgaacactgagaaaggcacagatgacatctccgacagaggaagggaagttgtaacatctatgtaggcctgtttcagtatgtaacacactcagggcaggtggaaaagcatgtggagacgcactcatgcctggctctcacttccactcccgtagagctagccctaaaaaaaaaacccacatggttttatcaaactaactgcattaaagtggcacttaaagttcaaaaatagttgtccctgagttactaggtcatttgctgcttgctgaagagtcagatcccaagtttcacctcaacagattgctagcagaattatagcaataggagagcaaaatttgaactccgttttgccacaagcaaccaccatgtgaacaagttctgattttaaaagggagggatcccatctcttaaaagaatttttttgtattagccaggcatggtggcatacacctgtagtcctagctactcaggaggctgaggcaggaggatcacttgagcccaggaggtcaaagctgcagttagctatgatcgttgccactgcactccagcctgggtgacagagagacccagtttcttaaaaaaaaaaaaaaaaaagtaaaaaggattgtattccaagtccctggagggtgtgcagtgctgacattttggggcaactatttttacagtctttggaaaaggaaaaaaaaaaccaagtcacaaagttcttaaagaaaactgggttctaatgaatcaatttccagtcacaacacacttacgagtttctataaggtttgtgggtttgtataatgtttacaggtttttataacgcttcagagtagaggacagggacttagaaaaaaatcactctctactgtgactacatcctcaaccattttatttctgcttaaaaaaggacatacaacgtttgtagaggtctgggctcttggcaggagttctttcactcttctgccaaagcatttctccaaaccccacagagcagagatgcacgaattctcactgattctcacaatcaaacaccatgtcccatctgctactgtctcaagttctatcccttataagccaaagactacttcccacacacaacctcacaacaaacatgaaggagcctaaggcctgcctttaacactgcacatgttcattttaccatttgctgaagttgttttagaaaactgtatgatatgaaatatattgaagctcaaacattaatcacatccaagtgtactattgttagtgacgggatctatacgtcaaatagcaaagcatttacccctgtaatgcttttagattcacagaagaatctagatagaaccaaatacatatactgccatggccatgtgattttcaagtattaaaagttcatttgcataaggaatcaacctgagattttcctaaaccacttctctggcactcagtattatagccttcattcaatacaataaaagccaacaacttgacaattattgaaaaaaaattatattttggaagaactcactacataaggtgacagaattccaaaatcaaattacatgaaaatatacatcgcaatttctttgtacaataggtgagaaaaatctgcagtatagaagaatagaggcagagaaatatgaaggactaaggagaagggtatgagagtaaataggatttgtaatagcaaacccagaagttaagtagaaagcctgtagctgtgcatgcttcatttatccaaccttaataccaggcaactgaagagggaaaagtcagatttgctattgtttggggaaattttcagtaagttgaattaagaaccatctatttttagttctcaggggtaatgactgggatcaagagctcacaacggccaataaatgttattgctatatccaatccaagaggtgggtgcaactagaatacaaaaaggacaaagcacctagtgatgactccttcgaagtcatcattaaaaatcaagtaattgctcattaagtatttcagtatttgaactaaatcatttgagaacattctggcaggtaagagataaaagcaaaggggagtgtgtcaaaacaaagaagatacaaaagtttagtaagtgaaaagagtttaatgaagcctcaagggtttaagggaaattaaatggaaacttttaatcctaattgcttttcatctgacatgcttaaaggaatccttttaaactgataagaaacaatgaataggaaagaaaacctgctaaaatctcttagaatttacacgattcttattctactacaagaaagcattatttggtacaaggtgtatttgtggatgtacatgaacagtatatatattatccggatcatgttgtgctatgtacaggtctttacaattcttcctgaaggttaaaacagttcattagaattcaaaatgcgtaatcatctgtaagttggcacttgttaggctcttgtcagcattgataactggcatgttttattgcagcccagttccagccagtgtttgccaacttgtacaacagaagtccagcaataggtgggtagagtgcaggaaaaacagtgccatgtttctcaattggagacctacaacaacaaaaacaacattatatagtcaattcatcaattacaaaagaattaactgtaagtaggttttatccatattagatttatttgacaacaaatccttaatttcattctgagctcactttgtttctatctattatggtagctcacagccacgtgggtatatttaattttaaatgtaaattaattgccattaagtacaatttacaatttagttcctgagtcatgctaagcacatttcacgtgctcagtagtcacatgtggctagtgactggcaagctgaacagcacagctgtatccttatcatcacagaacgttctactggacagcgctaatttagatttttcaatacttcaaatgtctttcaacttatattaaatctagaatccataagagaagatttaaaagccaagtgatttggaaatttacaaacatttgaggatgttcagagaaacaacttaagattgccacacttcccaacttgctaaattctatctaactcactatagctcccttcaaacccattttctccacaaagcctgccacaaatgaccctccatcccaaccacagtttctaagtgtttcaaatctgttggcctcgtatcatccagttagactgtaagtcaagaacacatctacataaaaagcagcaccgcctcatcgagttctgatgtgccaagcagcatgctaagcgctttacaaactcatttcctgaatgctcacaatcatcattatgaaggagtctcccctctaaagctgagacaagttcacatagccaataaatggctgagtttcctgttcaaaaagttagaaaaacactaggttgaagtttttgtttgttatttatttgagacagggtcccactctgtccctcatgctggagtgtagtggcatgaacatggctcactgcagcctctgggctcaagtgatcttcacacctcagcctcccaagcagctgggaccacaggcacacaccaccatgcccagataatttttaatttttttttgtagaaacagggtcctcaccacgtcacccaggctggtcttgaactacaggctcaagcaacgctgccacctcggcctcccaaagtgttgggattacaggcatgtgctactgcacccagtggttaaagctttaaaagtctcatttgactattagacttttcagagtctttattatattaatatgtgctttgaaaggggggtgggtgggggcgccaaggacagcagaaaaggaaacacctattaggactgcatctttaggtcaagtgttccaaagaactcagaaactctgaatccattgccatgcacaattttgggcaaaagaaacagaagatgactaagaaatcaagggatataattttaaattcctcacagag

SEQ ID NO: 1886988 - DNA, 4001 bp, Homo sapiens
cgctccccgggccctgtcccgcctggacgcctccctccaggagcctgcgccccggccccggggtcagggttgggatgcgggctctgcaggcgccccggcgaacagctctacctggaggctgtccctgccccgcttagtccaagggccttggtgtgggggcctccgctgtcaaggcgggggaaccggttctctcggtttctctccccttccccagcggcttcaacgcagacgtgagcccgagccgggcccgcccccgccccctgctctccggctctcacgccgccccccgagagaggctgcccacctgccctgtgacccctacagtgtccccaagagagtggcccctggagaatgcactctgagacagtgactgtccgtgcggagtcccaaagcaggggccctcaaagctctccggagtggtcacaagccccgctcccgccccggctgggtgtgtcagggatgggggagagcttaactaaatctgccggcgcccctccaccaaagccatgagtcggtggtcttctccggaagtgcatggcccctccaagctcccacactgaccacatctcctcctgcctcctaaggtgacccaggccaagggccaggagaccgcggcttgccgaggctgagggaccgaaggagcagggtccaatccgggactcccgtagggctccttcgccactttgtcaagcgttcctcgactaggaaagggtatacacttgagtcactaagcacactgggccccggaggcggggtcatcgagctgcccagagccaacaaaccccaaggtggacactgccccggcgccccttccccccggaccccgcagcgcactcacgtctgctgggcgggcctcagggagcccaagggccgggtgggcggggccggcaggttaggcccggaccatcgccctgggcggggcttccgaggtggtgccggagaggtttcgcggaatcggagctggcaacggcagcgaatagggacagcgacgctcaggagtgctgtcacccatacccaaagaagctgcgtctgggcggggcgaggaggaacctgaatgcctctgctggggaccttggggggcattgggacgaggaccggagcagaaagccggggtccggagccaggaaggctgcgtctgaaggggcgctggctggtcgctagcggagcccaaggagggtgggcctcccctgtcccgccttcccccttcccttctcccccggggatttgctgtcccggagtccctgcgtccctcccgcctgcggctctgggaatgccggtctggggctggttgtctagtgcgggcgttcccgttcgcggggaggtcattggcaccctgaatcacccactgcgagcccttccaaccggattgtagacctgccagctccgggcccacctcccccaacagggcctttcccggagcaacccggccgggcctggaaaaactccgagagggattcccagcgcagggacgcccaccggagcgcagtgtctcgggctggataagaaggggacccggccacagctccttcgccaacctgcgggaacacagagaaggggagggattggtgggggccgagaggatccctggagcgcgagagcgcacccgtcgccaggaggtcccctgcgtccactgcccaggcgacgcaagctacagcggcgtcaacgcctgggtcggcgctaggggcctgggcctgctccccacccgcctccagagggagggcagcccttcgcctaccttctcctccccgtgggatgcggcccgagcagctcccgccccagcacggagacaaggggagcaggcgcgcggagctcccgggtgcggacccgccacctgccgcacccttccctccccaaccctgcccctttccccacccccaccccacctcccacctcaactcccgctcggcggcccactgcctgcccgggcacctcggggcgtccgctcgccggcctcgtctccacttgtcccggcaggcgcgcgtgggctcggcgtcccgcgctccctcctcgaccgcgcggctccggcgctgccaggtttcctgtatagcactataaccagtgaggcaccggcggagagcgcccggcagaacttcctcccggactggggctgggctgcggttgcgagagacaatccccggcgtcctggcttcctgtcgcctctgggccaggcccgcgcctgaagaggaaagatgccaccccctcccctgcatttcccgggatcctgggccactcccgggatcctggctgtctccagggaggaagaggccgcggggctgagatggtgggactggggatggcgggagtctcccgcgcagcttctcctggccagattgccttcccaccatcccccactccctcttgacccttgcggggaaagaggtccaccctccaatccgtccacagggtaagctcagaacaacctcctgggggccaggagtccagccccagggccctccgccttgggggtcttctgtttgggaattatctgcctctctggacaagctgcctcgccctgatctgagcctgcgctcactccacacgtcacaaaccacagccctagcagaccccctgccctcaggggcccccagaaacagttgtgcctatggacgtggctgtgtgtgcggagagctggctgattcaggccagtgttctgggacgaagagaagcccacaccccaggccatggcccctcttgactccacctcctgggggcccagggttggatgggaagctgaatctggccacactcgttctggaactcccttacctctgtatctttgcccctgctaggcgttgcccacccgtgagtctacacttcctctgagaatctcagtgtgtctgaggcctggtggcactttgggaccctccagggtgggcacacagcagaactcagcattggtctttggtgcccgacatgcttagaaaatagtgactggaggaatcttctctccctccctaccttttaggtctctccccacctgcagcacagccaggcagcggctggcagtggtgatggtctttgcgtggggtcaggcaggtatgatgccccactctgctgcttggcggctggtaggccttgggagttctgccttatctctgcagctcagctttctttcctatcaatagtaacacccacttcactggattattgggaagattaaatgagatccactaagcagtgcttaccacatgcccagcgtacaccatatatcagctatttttttttttttttttttttttgagatggagtctggctctgtcgcccaggctggagtgcagtggcacaatctcggctcactgcaacctctgtctctgggttgaagtgattctcctgcctcagcttcctgagtaggtgtgattacaggcacccaccatcatgcccagctaatttttgtatttctgcagagacggggtttctctatattggccaggctggtcttgaactcctgacctcaaatgatctgactgcctcggcctcccaaaatgctgggattacaggcgtgagccacagtgcctgcctatatcagctattatgacacttttattatgtgatgagctcttggggtttggactggaatctccaaaccacccgtcctccttcaggcagaagagaaggggaagtcccagctactcgggaggctgaggcaagagaattgcttgaacctgggaggcggaggttgcagtgagtcgagatcacaccactgcactccagcctgggtgacagagtgactccgtctcaaaaaaacatgggtgagaaggggaaacaagtgccctcagaggcgcttggctgaggatggagaggggctgagcccactggcagggcagaaccaggtcatgtgccatggccctccactgggcctccctcccccagtttctcttctcttctctggccctaccatctattgtccttgggggaagctgtggcacctagatgggcagagggtgccaacttgtaatctgaaaggggccttcaaggacaggaaatcgcagatctgaatgttg

SEQ ID NO: 1886989 - DNA, 4001 bp, Homo sapiens
ccaccaaagccatgagtcggtggtcttctccggaagtgcatggcccctccaagctcccacactgaccacatctcctcctgcctcctaaggtgacccaggccaagggccaggagaccgcggcttgccgaggctgagggaccgaaggagcagggtccaatccgggactcccgtagggctccttcgccactttgtcaagcgttcctcgactaggaaagggtatacacttgagtcactaagcacactgggccccggaggcggggtcatcgagctgcccagagccaacaaaccccaaggtggacactgccccggcgccccttccccccggaccccgcagcgcactcacgtctgctgggcgggcctcagggagcccaagggccgggtgggcggggccggcaggttaggcccggaccatcgccctgggcggggcttccgaggtggtgccggagaggtttcgcggaatcggagctggcaacggcagcgaatagggacagcgacgctcaggagtgctgtcacccatacccaaagaagctgcgtctgggcggggcgaggaggaacctgaatgcctctgctggggaccttggggggcattgggacgaggaccggagcagaaagccggggtccggagccaggaaggctgcgtctgaaggggcgctggctggtcgctagcggagcccaaggagggtgggcctcccctgtcccgccttcccccttcccttctcccccggggatttgctgtcccggagtccctgcgtccctcccgcctgcggctctgggaatgccggtctggggctggttgtctagtgcgggcgttcccgttcgcggggaggtcattggcaccctgaatcacccactgcgagcccttccaaccggattgtagacctgccagctccgggcccacctcccccaacagggcctttcccggagcaacccggccgggcctggaaaaactccgagagggattcccagcgcagggacgcccaccggagcgcagtgtctcgggctggataagaaggggacccggccacagctccttcgccaacctgcgggaacacagagaaggggagggattggtgggggccgagaggatccctggagcgcgagagcgcacccgtcgccaggaggtcccctgcgtccactgcccaggcgacgcaagctacagcggcgtcaacgcctgggtcggcgctaggggcctgggcctgctccccacccgcctccagagggagggcagcccttcgcctaccttctcctccccgtgggatgcggcccgagcagctcccgccccagcacggagacaaggggagcaggcgcgcggagctcccgggtgcggacccgccacctgccgcacccttccctccccaaccctgcccctttccccacccccaccccacctcccacctcaactcccgctcggcggcccactgcctgcccgggcacctcggggcgtccgctcgccggcctcgtctccacttgtcccggcaggcgcgcgtgggctcggcgtcccgcgctccctcctcgaccgcgcggctccggcgctgccaggtttcctgtatagcactataaccagtgaggcaccggcggagagcgcccggcagaacttcctcccggactggggctgggctgcggttgcgagagacaatccccggcgtcctggcttcctgtcgcctctgggccaggcccgcgcctgaagaggaaagatgccaccccctcccctgcatttcccgggatcctgggccactcccgggatcctggctgtctccagggaggaagaggccgcggggctgagatggtgggactggggatggcgggagtctcccgcgcagcttctcctggccagattgccttcccaccatcccccactccctcttgacccttgcggggaaagaggtccaccctccaatccgtccacagggtaagctcagaacaacctcctgggggccaggagtccagccccagggccctccgccttgggggtcttctgtttgggaattatctgcctctctggacaagctgcctcgccctgatctgagcctgcgctcactccacacgtcacaaaccacagccctagcagaccccctgccctcaggggcccccagaaacagttgtgcctatggacgtggctgtgtgtgcggagagctggctgattcaggccagtgttctgggacgaagagaagcccacaccccaggccatggcccctcttgactccacctcctgggggcccagggttggatgggaagctgaatctggccacactcgttctggaactcccttacctctgtatctttgcccctgctaggcgttgcccacccgtgagtctacacttcctctgagaatctcagtgtgtctgaggcctggtggcactttgggaccctccagggtgggcacacagcagaactcagcattggtctttggtgcccgacatgcttagaaaatagtgactggaggaatcttctctccctccctaccttttaggtctctccccacctgcagcacagccaggcagcggctggcagtggtgatggtctttgcgtggggtcaggcaggtatgatgccccactctgctgcttggcggctggtaggccttgggagttctgccttatctctgcagctcagctttctttcctatcaatagtaacacccacttcactggattattgggaagattaaatgagatccactaagcagtgcttaccacatgcccagcgtacaccatatatcagctatttttttttttttttttttttttgagatggagtctggctctgtcgcccaggctggagtgcagtggcacaatctcggctcactgcaacctctgtctctgggttgaagtgattctcctgcctcagcttcctgagtaggtgtgattacaggcacccaccatcatgcccagctaatttttgtatttctgcagagacggggtttctctatattggccaggctggtcttgaactcctgacctcaaatgatctgactgcctcggcctcccaaaatgctgggattacaggcgtgagccacagtgcctgcctatatcagctattatgacacttttattatgtgatgagctcttggggtttggactggaatctccaaaccacccgtcctccttcaggcagaagagaaggggaagtcccagctactcgggaggctgaggcaagagaattgcttgaacctgggaggcggaggttgcagtgagtcgagatcacaccactgcactccagcctgggtgacagagtgactccgtctcaaaaaaacatgggtgagaaggggaaacaagtgccctcagaggcgcttggctgaggatggagaggggctgagcccactggcagggcagaaccaggtcatgtgccatggccctccactgggcctccctcccccagtttctcttctcttctctggccctaccatctattgtccttgggggaagctgtggcacctagatgggcagagggtgccaacttgtaatctgaaaggggccttcaaggacaggaaatcgcagatctgaatgttgtctgtttccatcccattttaccgcaatctgatttccctgagaattagtctgtttccaagggcgccttcgggaagaatcctcacaggcctaagccctccccaggccagactcctgcccactcagggatggggcaatgagggctctgaccaggccaggcttgtggtcatggcaggtgcataacccagctcctggcttaggaggtattggcatctgggcacaggtgtgcgccatgaccgggagaagctatgcacagcctccacctgcctgccaccgccacctctgttctgcacaggcatccagctccaaagctgggtgggtgactcagcagctgatcacccccagggaggggtgggggtgggctcatctctgacagtgacaggtggatctccacctgaggcctcagactccaagctgagcgcaggtaagacagctaggactgagggcccgctgggtccaggagaggtgggagaaggcgacagagagaccagcaaaccc

SEQ ID NO: 1886990 - DNA, 4001 bp, Homo sapiens
gtgagccaccacgcccggctaatttttgtatttttagtagagacgggtttcaccatgttggccaggctggtctcaaactcctgacctcaggtgatccacccgcctcggcctcccaaagtgctgggattacaggcgtgagccactgcatctggccccaacatgtactttcactagatattttattttgcgctttcactaactacttaattatctgcactactgccaaatacaaagttccgtgaagatttggtagcataaatgaagaattctaagtaattccactgactacatgtcactcgttcatcataggctggaaaataatattaccttgaagtgctaaactgtgagggtgaaagatgcttttttccttccccgtgttgtatcactgcagccccctccctagaggtgggtcagacgagcctggaagtacatttccacatgaagtgcggcacttgctatagacttttgagttccggcacaagatcccagtcttggcttcttggacctgagttcgaatcccatttctatgactgagctccgtggataaccttacagcaagtcactgacactctctgagcttccctttccttcagccaccacctaggaacgtcacacaggctgacggggttactaaatgagacagtgtgtgtggaaggtggaccatcaatattggcccccagtcctccctccatcacatcaagtatgggttttgctctttgtcaacggtggtactttacacctacagacatacacgtgaggtctcagccttttcatctgagtctactggtagaaggttttctgaatggaaatggacaattcaaagaatcggaagaggagcaagtgtttccaccctctgctgagatttcagtccttcttgcacttaagcactgctctaaatgtgaagcgacaattcctcatctgtggcacgaggaagacaaggcttagtaaacggacttaccctgtgcaaggaatggaactggacgggaacccaggtctgaacgtcgaagtctgtgctctttcctgcctcttgctcccctagggtgggtggaaaagagtcttgggtttacacctgcctggccctctcagagcaccatttgcgagccagttctgccaagtccgactgtacttttcctctaccccttctcctttcagttcccctgtgagggaagcacccacaatcttcctcttccctaaggaaacccacgcttctgcttggattgagaccggcagacaggctacatctcaaagggcacctcgaggggcaagggcgttctgtagtcacaacacagtccgtggagtacaaagcacagcctccaccaggcagcattagctgctccaaccaggaatttaaaacaccaaccgctgttttagtcatttggctgagccacagcagagcatgtgaatgtcacagaacagagcaggaacgccggggcacgtgtgatgcccatcatcagtggggcaggcgccgtccgggcctctgatactgcgctggcactcataccgagagccgcgtactcgggattactagagaggttcgacacatcagtgctgcccgcaggaggcaggagtcagttcattctattcagcctcttctgggttttaccgaggttagtgcccattcagcaaaccaagtctcctgtgcaccaacttccctaaaaaggccgtgaccctttcctgaggggaccccctctatcgccataaacctgctgcacctttgaaatgctccttcttccagagggctcttgacttacttttcccacctggccccttctcctcctatgtgcacaactgctgggcggccacatctgatcctgtaccagaaacataaggggagacgggatcctccttgagcccacacagaccccagcgttctccccagaaacgccccttgtgagaagcaaggccggctaaccgacagcatctacaccacacagaaccctcaccttctgatataagcaacacacgacatgcatggtagccagccaaccagaggaaccccaaacaagggtcaacaacagaacactgaacccagctgctttttttttttttttttttttttttttttgagactgagtcttactctgttgcctgggctggagtgcagtggcacgatcttggctcactgcaacctctgcctcccgggttcaagcgattctcctacctcagcctcctgagtagctgggattacaggcatgcaccaccacgcccagctcatttttgtatttttagtagaaacagggtttcaccatgttggtcaggctggtcttgaactcctgaccttgtgatctgcctgcctctgcctcccaaagtgctgggatgacaggcgtgagccaccgcacccggccttctgaacccagctgctttcttggagatcttggtattactcctggcttttggaaagttactgtttgaagatcactcagcatttcccctccagtatcttcattaactagatatcaagaaaaactggatccaaaggactggcccaacctggatatattctagagtagaaggacagctggaaagaacagaaaaaacagtcagctgggaccattaaaaaaacattaaaaagtcgaaagggattataccaggtaaagagaccatggctagtgtttttttctctttctacttttatttttcaaattttatttctgtgaaaatgtatttgtttacataaaaatacaaatctgggtagcaactgggtatttcaagaaaacaccgtggacagacttgtctccattcccacggggaagtgaaggcgctttgataaaagggccaagggtgccctcgtgtggccacggagggaaatgccgcggcttcagcagaaaggaggggctccaggagctggtcgtgaagtcatcagctcccttctttcaaaaggcctcggatttcccacaggcttttccatcttttccactccttgcagttttgttattcctgtcacaacttagaagttcgagtgctcacatggtaagctttgatttccatcgagaggaaaggctttatgttttataaaaaatatatactaaagtaatctacacgaagcttaggatgagttgaaagggtactgccaaaacgcggccctgcccaggacacacagcagaggtctggagtggggacagtgcggccagcatgtgtggggaaggaagcaggctgacggaggcaaagcagattccgaagaacaaaagcagctttagtttgcctgggcaacaggctcaacttctgtctccacttcagttatcaggagaccagaagccgattctagggaccagaagagaatgtagggtcacatcaccaagatttaatttcataccaaccccgcaacatgaatgtgacctctggacaccgggagagtaacactcaaggttatgacatatgagtcaataacccatttcttcaaagaaaaacttgcccacctgtaccagaggtatatgctatgaaacaacacacaattataaagcatatgcatgaccaaaacaatgcttagatgtcctttaaaaatattttcaatgttctctcactaggtagcctaagaaaatcttctcagggaaggaaatggaaacatccaaatgcacagaaggcactcggctccagactgaaagctggcctgctcatgggttcctttttttttttttttttttttttttttgagacagtcccactttgtcgcccaggctgtagtgcagtggcattctcggctcactgcaacctccacctcccaggttcaagcgagtctcctgcctcagcctcccgagtagctgggattacaggcacgtgctatcatgcccggctaatttttgtattttgagtagagacggggtttcgccatgttggccaggctggtctcaaactcccgacctcatgcgatgcgcccatctcagcctcacagtgctgggattacaggcgtgagccactgcgcctggccacggtcacggattttttaaaactctaaggtcattagcttgacatctataaaatctcctccatgacatgaagcctta

SEQ ID NO: 1886991 - DNA, 4001 bp, Homo sapiens
caggcgtggtggtgggtgcctgtagccccagctacttgggaggctgaggcaggagaatggcgtgaacccaggaggcagagcttgcagtgagccgagatcacgccactgcactccagtctgggcaacagagcaagactccatctcaaaaaaaaaaaaaaagaactttggataaaataatctatcagtcatacctattatgctttaaatattctacctacagatggtgatatcctaaagagtgtaggatctagaccaatggtacttaaattttcacatgcacacacatcacctgggattgttaaaatgccagagtctggcccggcgcggtggctcactcctataatcccagcactttgggaggccaaggtgggcgccatcacctgaggtcaggagttttgagaccagcctgacaaacatggcgaaaccccatctctactaaaaatacaaaaattagccaggtgtggtggcaggcgcctgtaatcccagctactccggaggatgaggcaggagaatcgcttgaacctgggaggcggaggctgcagtgagccgagatcacgccactgcactccagcctgggcgacacagtgagactctggctcaaaacaaaaacaaaaaaacaaaaaaccctgccagagtctgattcaggaagtctggagtgggatcctagagtgagactgtgcacttccgttgacagtacaccaacactgctggtccttgactatgactttatggtcataagatacaggattctaaaatagaatacatggcatatatacaacaggtgatgtcccattatgggacacaaattttaaagacacttaaaattgtataagtatcttttcagtagcgctagtgtgttcccgtgactgtaaagataacacagataatagcaaaagtttgaaatatgatgcctttcaaatggctctcccttcctactttgataggctctaattaggtgcctcacataaatgccctttggaatttctgatacctgccctagcaggttgaagggagattctgaaatgaagcaaggctcctaatcatagtcacaggcagggagccatctcaatttctggaacacagaactgggagtggggagacagcaggcataccagcacccttacatgccagagaagtgagattaacatgacgcgaaaattagcctcttctctcccgttccatcttaaaaaaaaaaaaaattcaaaccattgacaaagaattgctaaaatgggacctgttgctcccacacaccagagccaccctggacaaaagccaacgtcccagctaagaaaacagtctgtcttcttcccacggtaacgtaggctttgtttatatcatcccttggccactccatcctgaaaatgtaagactggcacagtcagtagatgggggcgagttcgtctaggagcctccccaactcagcatcaacacctcccagggcgttccctcctgccttcggctcatctctctcatcacatgccaatcctgggatctgagagagagtagtcttgacatcagcccccgcgaggctgcagctcccaccttccttcggctgtagcttccgagttcctcggttacaacgtgcaacgggtcaggtggccaatgtccttgatctccgcacagtagagcactgggggaaagaagaagggttagtggcagcaggagcatgccaacgaacctcggtattcctcggcgctctctcccctgcatcctccccgggcagcccctcaccgttgctaggcagcggacgccgccagcgccgcgcaggccccaggaccctgtcccagagccgccggagcgcgcgccacccagcactcctaggccccgcccccttctcgctctccccttcttcctccgcctctccgtcagcgtcgctgctttccttggccgggttcccagcctcatctcgttcgcacttggcccgcgctttttcctccaatcgcgaccacaagtccgagtcaagagccatctccgtgaggccgccgcgagggagctgcgagggcgcgcggcagaaggggcacgtgaccacgcggcgcaggcgcaccacgcgcgcggccgccccgccgccgtccccgcgcgccgccagctcgcggaggcaggcggtgcagatcgtgtggccgcagcgggcgcgcgccgttccgggcaggcggcggggcgcgcggcacccgaggttgaaaggacggtagcagatgttgcagtccagctcgccccgctccggaagagagggtaccctcaccaagagctgcatcgtgcccgccgcggactcgaggacgtcgctaacgcggccagctccgtgaacagaacgagcacactctcctggggccgggtcgggtcctggggccggcgccgcggcctctttcccctttaaataggggaataagtgaggccccacccttcggagcgtcacgccttgatcgggccgctccctgtggcggcacgtgtgggggcggtggaggcttgaggccgggaatgacagcaatgatggagtcggggaggcggcccaggccatgccaggaccggagccctgggggccaaagcacccattcctccctactcccgggggagcggggtggggctttccttcttcccccaacgcaacgccagcgctccttaattctaccatgtacaaagccccgggtctctctctgcgcctgagccctcagtcactggcacaagtctctaaagccccctccgcctattcagttgctcgcagttagtttcacaatcccacccagtttccaaacacggcccgttctgcccaacctttagtggtccctgggcctttgaatcgattttgccctcaattctcattatagatgacctctctgtgttgtttgtaaggctggcttcctaaacttcattctccccaaactgcttaactctcagctggtatctcagcctaaggagggacctagatgccaggaccatggctttaggaatgctgggaatcctttccttccggaggcctggacacccacacatcgtgatggccccagcaaagctccccagcataagttctgactcaggggtctgacttctcccactggtaaacaggacatggtactcacaacccacattcccctcatggtgccacacccacacacagctgcctcctcaccctcctctcctggacctgcagcccaggttctgttatggagggtgataacacagtctagagccagctggcttgagttcagatcctagcttccacctcttactagttgtgacactttgagcaagttacttaatttctctgggccttggtttcctagttttaaaaatgtggataataataatgaggactgaatgaacttatatgtgtaaggtgcttcaaatggtgtccagtacacagtaaaacaccaggtaagtactatattagctactattgttatcctgtgcccccagcctatactgaattcacattaacttctgagtacccaacattttcttttttttcttttttttttttttttgagacggagtcttgctgggttgcccaggctggagtgcagtggcaccatctcggctcactgcaagctccgcctcccgggttcatgccattctcctgcctcagcctcccgagtagctgggactacaggcgcccaccaccacgcccagctaattttttgtatttttagtagagacggggtttcaatgtgttagccaggatggtctcgatctcctgacctggtgatccgcccgcctcggcctctcaaagtgctgggattacaggcgtgagccaccgcgcccggccagtacccaacattttcaacacccatccatcttgaccaatatgtgcatgatgagcttctccacacccatggcatttaccagctatcacaggcaatgcaaagctggtttttaaacctaaattgttaaaacctagagggtaatctcttttgaggaggtataccatcatttttaagcaaacatttcagaacttttgaatggtattgtctgtgatcatgggagaagctgtctacttattacagtgatgctgt

SEQ ID NO: 1886992 - DNA, 4001 bp, Homo sapiens
cagagaaagctgttatcacagctgcttttgtttaggcatgtctagctgtctgacaaccatctgcctggagtttgtcttcttaaagacacggttgtggtcagcggcttcagtcctagctctgcctcccataaaattcagatcttggacaggcaggtaacctcctgaggctctgttttctcctaagtcaaatgaatatcataatccccacctcacagggaggccaggaggataaaatgagcctgcttgtgaaatgatttgtaaactgtaaagctaggccaggaccctttcccaggctctgaatctaattttgtactcataattcttatgagtacaaaataattttattcttaaagagcaccccagattgcacaagcttcaggacccaccaaacttggacacgcccaaagtagtgtataaatgttcattattagcataagtagttaagggctccagggtcagataacacaggatgaaaatcctagttgtgtgacctctgccaaattgcctaacctccctgagcctcatttttctcgttttaaaacagagataacacttcaaagattgttgtgaggatttaacatttgtgaagcatttagcatagttcctgctgcgtatgtgcttaatacatggtgttttgttcttattattttaagaatagatggagaaaagaatgctcggggaggccaggcagggtggctcacgcctgtaatcccagcactttgggaggcggcggggtggatcacgaggtcaggagttcgagaccagcctgaccaacacggcgaaaccccgtctctactaaaaatacaaaaattagccgggcatggtggtgggcgcctgtaatcccagctactcaggaggctgaggcaggagaatcgcttgaaccccggaggcagaggttgcagtgagcggagatcgcgccactgcactccagcctgggagacagagcgagactccgtcgtctcaaaaacaaaacaaaacaaaacaaaaaaacaatgttccggggaaaatgggtctctgagctgcaataagagaaatgtgagttagatccaagaaagtacatagtaacctcttttttttttttgagacgacgtctcactctgtcacccaggctggagtgcagtggcgcgatctcggctcactgcaacctgcgcctcccgggttcaagcgattctcctgccccagcctcccaaatagctggaactacaggcgcccgccaccacgaccggctaatttttgtatttttttagtagagacagggtttccccacattggccaggctggtctcgaactcctgacttcgtgatccgccctccccgggttcccaaagtgctgggattacaggcgtgaaccactgcgcctggccagagtaacctcttgaagttccctttcgatttgattccttggtggaggagacctttagtctccgcccacttactgccacctggccctacccaccaaacacctgatgggtgctgacgtccgagcccagtctccaaacactctgttcgagcttgggtgggaagagggagcctctgggattctgctgggctgggccctgaaggcaggagtggacgagaaatggatacggtctaggctcagcttcccggctacgcagtgcgttctgtgaaggacggactcatttctacattgacagtcttagcctttgataccagaagtcgcagcacttagggggaaaaatgctttttggtaattataattagcgacatttggttgttaccactgctaaatatgtctgtctttgctgaggagccaatctcagctcggatcagggtgagtggataggagaaataaatctcggcaaagacagcgaggggcctgagtgcgaggaagaactcccagagaccgccagccacctcttggggactcacagcgctgcggaggcgagtccagcattctagccagccgcgcacggacgtcggttcccagatgcgccaatgccaggtctctccagcccggctggccttttcagcagcagcagcagcagccgcaggaaagcggccagacaaatcccacccccggccccgcccgtcacatccatcttgctccccaggcgacgctttctcggagaagcgaggggcggggaggggaaatctaagcctttgggggttgccgacaggtgtttgggggagaaggcggagctggggtagggaggatgaggagggaggggcggtgctgcccctttaagaggaggcggccgagccgggatctttttctctttccccggaaggaaagcgcagcccgggctgggctcgcaaggtggggaggtgcgggactgggcgtggggaggcggggcgcgcgccgggggacccctccctcctgtcctccttgcggtcgaccggtgcgcttgccagatccgccgcgaagccgggatcgaaggcgacagcgcggccaagggggcgcggccgggacaagctgggggccggttgcccggggcagggacggcggcgacccggccgctggggaggcaggaagatagacccacggatcttaggaagggatccgagagcgcagctgtgaaactggctggggctgggggcacgaaaccgatcagcgctacggagcgcagcggccggcgggttccagtgtcctccggcggcgcggggagcaggtgaacaggtcctcacgcccagctccgcgccctcacgcgctctcgccgggaccccgcttccgctggcagccatgggccccggccccagccgcgcgccccgcgccccacgcctgatgctctgtgcgctcgccttgatggtggcggccggcggctgcgtcgtctccgccttcaacctggatacccgattcctggtagtgaaggaggccgggaacccgggcagcctcttcggctactcggtcgccctccatcggcagacagagcggcagcagcgctacctgtaagtgaagctggagggtgtggggtgggagcgagagagtgtgcgagcgcgggatgcgggtccggagctgagtcggagcccagggcagctggcccttgggagccaggattaaggggcggccctctggctgctgggggttggcgggaagtggaggattgggtgtggggtcgggcagtaatcattggcaagtgctgacggggccagaacctgtctggacgccacccctccgccctttagatctctcatgagagcggaagtggggtcccggtggctgagtcctctcccattctgtgaaccgagtacccagcactagcctgttctctccagggctgggagctggggtaaactgcaagataaacacccagcggactccccccttcccgtacgcttgggggaaaaatgagcatatacatttaagcacctcgctggtagtctgcggccacgccagccacaccctctgcagagccagactggatggccttctcaaccgctggcttggcggatggagggtgaggcgatgggtgagtctgggcgtttggagctgtccatacgctccctctgacgccttgaggataggggcggtgaaagagagaggaggacttgtcccaactctggctgggtctcctcctgcccacccgcaagcagtggcactctccccgcagacatcttccctgcattccacagattcgtgttggatcttcaaccctgagtgtgtttgttttggtttgaagagggaaacagtgtttttctctttcttctgttctccttccccaacagctgcaaggaggaggggaagagctatgcacagtggaggaaggaggaggaggttgcacccagcctcctgggtccccctcactccaccagacgccctcatgcccaggagcatgtccaggcttcagaggtctctctgccgtggcctcagagcgcgcggaggttggcggttgggggaggtgaagctgtccaaagagggacggtgtttaggacaggttaagcaggtaccatccaccactttgggctgggcgatctgccaggcatctgcccccacctagcctctgcccccacctggcctctgaccccactgaacaagaagacgtg

SEQ ID NO: 1886993 - DNA, 4001 bp, Homo sapiens
tccagaacgcaaaaggcatttttcaaaggtttactgttccccaaatgacaataatgccatattgactgacttcagagaagctctgggaatttggaaaaaccagtcaagcaagcaagatctttaacagagaaaaaaaaaagttggtgaacttgacaattttgttaaagttcacagcattttcctgttttgacagcacttttgcaggtcctgatgcctccgggtcttggataacaccatcctctacttagagctccagcctccagcatccccaagccagcctgccccccacgctgccagcagagacatctttctaaaacacaaatggaatgttactgctcaaaaccttgctgcagcttctggggtgttactcttgaaagaaactacaacagttctccagcttctccggaatcccccaacccacctcagccagagggaagaaaatttgggtactatcgacggcctgagattcatgatagatacacactcgcattcattcattcaacaaacatttaagtgcatattatatatgaaaaaaacaggcaaaaatctctgccttcatggggtttatattctagacagagagagagacagacaaatcagataaataagatatattgtacattagatagtgatataacaaacattatgtgctggatgagccggatgatggaagcaaatccccccacgcacacaccccaccccaaggccttccacatggggtttttggtttttgtttttcttgagacggagtctcactttgtcacccaggctggagtgcagtggtgcgatctcggctcactgcaacctctacttcccaggttcaagtgattctcctgtctcagcctcctgagtagctgagtagctgagtagctgggactacaggcgcacgccaccacgcccgaataatttttgtattcttagtggagacagggtttcaccatggtggccaggatggtctcgatctcctgacctcatgatccaccaacctcagtctcccaaagtgccgggattacaggcgtgagccaccgcaccaaccacagctcttctctttaacaagcacttaatcctaccccgcagtagccctcctgggagcaaacggggtgtcccacctgatgtgggttcgaagatgcttgtctgtgcatctcaacccaagctacaaccgtcccgtcctccctgatcgcaaacacatcccttcccagaaacaaacctgtcactttcttctctgttaaaaggcaatctgcaacttgaggcaacaacggaagtcttgcgaagataacggcggagcgtgccagtgggtttcctaatatggagggactgccctgtagagaggtaggaggcgtggaaattcccagcagctgagtcttagtaattacagccaggagagccctagctgggattcagaaagagagagtgcgcccatgcaggctcctcaaatccagccagccacgattcagctccagagaggctggcccagagaagcaaagaggcttggctgtagctgtgtgtccggaattggcgggttctcagtctcactgacttaaagaatgaagccgtggaccttcgcggtgagtgttacagttcttaaaggtggcgtgtccggagtttgttccttctgatgttaggatgtgtccggagtttcttccttttggtgggttcgtggtctcgctggctcaggagtgaagctacggaccttcgcggtgagtgttgcagctcttaaggcggcgcgtctggagttgttcgttcctcctgatgggttcgtggtctcgctggcttcaggagtgaagctgcagaccttcgcggtgagtgttacagctcttaaggcagcgcgtctgaagttgtttgttcctcctggtgggttggtggtctcgccggcttcaggactgaagctgtagaccttcgcggcgagtgttacagctcataaaagcaatgtggacccaaacagtgagcagcagcaagagttattgcaaagagcaaaagaacaaaccttccacagtgtggaaagggactccaacgggttgctattgctagcttgggcagcctgcttttattcttatctggccccacccacatccactgattggtcattttacagagagcccagtggtctgttttgacagggcgctgattggtgcgtttacaatccctgagctagactcaaaggttctccacgtccccactagattagctagatacagagtgtggacacaaaggttctccaagtccccaccagagtagctagatacagagtgtggattggtgcattcacaaaccctgagctagacacagggtgctgattggtgtgtttacaaatcttgagctagatacagagtgctgattggtgtattcacaatccctgagctagacataaaggttctccaaggccccaccagagtagctagatacagagtgtggattggtgcattcacaaaccctgagctagacacagggtgctgattggtgtgtttacaaaccttgagctagatacagagtgctgattggtgtatttaccatcccttagctagacataaaggtcctccaagtccccaccagactcaggagcccagctggcttcacccagtggatcccgcaccggggccgcacgtggagctgcctgccagtcccgcgccatgcgcccgcactcctcagcccctgggtggtcgatgggactgggcgccttggagcagggggcggcgctcgtcggggaggctccggcagcgcaggagcccacggaggtcggggcgggcggggggagggggaagctcaggcacggcgggctgcaggtcccgagccctgccccgtgggaaggccctaaggcccggcgagaaattgagcacagcagctgctggcccaggtgctaagcccctcactgccgggggctggcggcgtgggccggccgctcagcgtgcggggcccgccgagcccacgcccacccggaattcgcgctggcccgcaagcgccgcgcgcagccccagttcccgcccgcgcctctccctctacacctccccacaagctgagggagccggctccggccttggccagcccggaaaggaactcccacagtgcagcagcgggatgaagggctcctcaagtgccaccaaagtgagagcccaggcagaggaggcgccgagagcgagcgagggctgtgaggactgccagcaggctgtcacctctcagctgcacagctggctattcagtagcagaactgagacccaagagcaggtcttctgggaagcaacagggtatgagcgttaagaacttgggctttagaggcagacacgcttgtttcaaatttcctcttgccttttgctagctgtgtggccgtgtgtatgtttattgagttctgagcttcagtttcctcacctggagaatagggatgccagtgcctgcattccagagagattgtgagtggatcctgttacagcgtcagatatgtggtgggcactcagtaatgtccaatctgatcactgttatgctgacaccagagtctgctgctacacagactcacacaggcatcattcaatcatccggggtctgtttcttcctctctctgtctcccttggcccctctatcactgtcctgtgtctctccttatctctttgtgtgtctctatgtatcccactgtgttttccctgttggtctgtgtgtgttaaaggatctctgtctctctctctccgtgtgtctttgtaagtgcatttccctctgtgcatctgtgggactgtccacttctgagtgtgtatctatttccaaatattcttgtctctttgtgcttgtttctgtgtcttcacccagccctctctttctctccatctctatttttcttttctttcctccctctgtatctctctgtccctctctttctttctttgtctctgtttctcaagctctccatgtgcctctgtctctcacccgctcttctcctcaaaaccagaagtgacccagccgactctcacagttcattacaaggaaaacattgaacaatcattctttgctcgtgcaaggag

SEQ ID NO: 1886994 - DNA, 4001 bp, Homo sapiens
gtttataaatgttaatatactaaatacaccactagcgaaactgactaaggcaaagagaaaagacgcaaaagaccaatatcaggaatgaaaacagaggcctgctctacagagcagtgtatcaagatactacgaaaattctgagaaatacttaggactgcaagcttgacaagagagatgaaattacacacattgaaaaatacacttacaaaactggacacagaaataacgtaaaaccagaaaactaccatatatactaaaggatttgaattgttaaaacaacaacaacaacaaaacagctaacaaataatgttccacaagtaaaattccatgcccagactaaagaaatattccaaacatttaaggaagtaaacacctaaatttctcagacccttccaaagagaagaaatatagggactatttttcaattttgttttgtgaggccagcatcacgttgataccacaatctgaacaggacattagaaaaaaaaaagtatggacccactctttcattaacagaaacacaaatattctttttttgagatgcagtctcgctctgtctcccaggctagagtgcagtgacacaatctcagctcaatgcaacctctgcctcccgggttcaagcaggtatcctatttcagcctccaaagtacctgggattacagacgcccgccaccgcatccagctaatttttgtatttttagtaggaacaaggttttgccatgttggtcaggctggtctcgaactcctgacctcaggtgatccgcccgcctaggcctcctaaagtgctgggattacaggcgtgagccaccgcatccggccagagatacaaatattctaagaaaaattgtataatatgaattaaaccacatatgaaaacataacacatagataccaagtgggatatactaaaaaatgcaggattggttaacattaaaaaatagatcatgtaaaatatcctatttgcagaaaaataggagaaaaacattactattcagaatatatgtaaaaaaagcatttattcaaattcaacaattagtcataactcttagcaaatgcaaaggaaggcagcttccttaatctgattaagcttgtctaaaatgaaattacaacacaggaccactgaagcttttccactgtaatcagaaccaagcaagacttcctggacataccccctctatttcacacagtgctggaggtgtaattgggacaataaaacaaaaataaaggtataagaaccaacatttaagcaatacagctgttattgtatgtggctgacactattatgtacatgaaaaatacaccacaatccaaaaatgatggttatgaatatgtgaattaagccaggctacaggatgcaagatgaatacataaaatcaatcagattcctatgtatcagcaagaaagaaatgcaaaatacaattaaagaacaatgaccagactaggaaacaactatctacactagaaatgagcccatgaagaattaatttataaaatacattttaaaattattcaaatcaatgtaagaacataaatgacccaacagaaaaaccagcactgaaaatgaagaaaaagatgcaaaggccaatattcacgaaattttgcttcgctagcttatttccagtgccagatgacaggaggcccacagggacccagaaggcaggaccccagggaggtgacagtgccagcagcaggagggccggactctgccttgggccgagtggggccacagctccccggtggccatggggtgaagccctggcagcctggcgctccgggcccctgcacacgctttcctccctctgccccgttcctctctccctgtgcctcggccccgtgggatgcgctcgcatccagacttaccaggcccaagaggttgggagaatggagaaggacttgggacggtcctccaggaacacatggaggacgctttgcctacatctgggacacccttctctgaggcctggcctcaaggcaggcgcgcaccacacacgctcccggtcgcttctgaactatgacgaccactgcgcaaggaacctttttgacaactcttattggataataatttccatctctgattgcacaatcttaaccaatcagagttggagactattatccaatccgtgttgtagtacagagtctgctctcatcctatcagaacgaggcttccaggatacctcatttgaatacagctattataaaagggaggcaaatgtccacgcctgctgtgggggtgggctcacgtgcatcttctctgcgttggggtcagccagggagcgtgtgcagagcacctgcattgtagactagccgtggagaaggatgtcccaggtgcaggccaagtttcattgtgttcatggaggatttttcctgtggcaaaggcttctccatcttccaacatctcaggcctggtgagtctggatgtgaccgcttcctgtgggagcccaaggcgcacctgcgtcaggaagcgagacccgcactgggcagagaccaccagcatctgatcctgacccggctcaccgagcactgtgtgccctgtgtcgtgaacaaggacgcttactgtgtctgtggctggctgtggaggcttccctggggctcccaggccctgcctctgaccctcagccttgggagctcagggtcccctcgcacctcggggtccgtgcccaaccacacgatgccccctgtagcctgttttcagaggtcattccccgccccaacacacacactctgcaatatcttaaattatatatatctataaatgatatatacatatatatgtgtatatatatacatatagatatatttttttgagacagagtcttgctctttttgcccaggctggagtgcagtggcatgatcttggctcactgtaacctctgcctcccgggttcaagcgattctcctgccacagcctcccgagtagctgggattacaggcgtccgccaccatgcctggctaattttttttgtattattagtagagacggggtttctccatgttagccaggctggtctcgaactcctgaccttgtgatcgcccgctttggcctcccaaagtgctgggattacaggcatgagccacggcgcccggccaaatgatattcttgtgggcagtctgacttacgttgaaaatttaactgaattgtaatgcattagacttagtgttctcttccatccctatttctttctctctctcacacagggatacacacattctcacaaacacatatatagttttgttttgctggtagaaatataattaacaattgcctacatagctgtaaaaatgaatacattaaaataacttcatttcactgcatcaacagacacattttcctgcgcatacagagctcttcccctttcaaaagggagccctattaaaatttattacatcacatgttaaaaccaaatgtttagagtgtgactcacaaagtaagccaaaagattatgtcttaagtagcagataaacaaatcccatattttatccaattaaccctgtgattacctggattttacaacatatgatgtcttatactgaaaacatgaagctcatatgattgcaattaatacatattcgtccacaaataaaacaatatgtaatacttggttgcttacttggctattgtgttatggctctcgtgggtttctgtgcttttaatttttgtatggtagttttaagttacatttgaaatacaagtcttaaagggtaatgctatacatattggagtcctacaacaatgttcacagacttttgtaatttatgggttgaatcctctaatagagtgtaccattttacccgtattatttgaattttgtaactatgtggatgttaatcccttttgtactaattgtctttcttttaagaaaaactaagtgttccaaatgaaacatatatcttaacgctatttcaaacaatatagtaaattaggactttaaaaatgaagacacattgacagcagcaagctttagctgatataagcattggagtcactaggttttattcgtttc

SEQ ID NO: 1886995 - DNA, 4001 bp, Homo sapiens
cagcaaggcaaaagccacaaagtctttctatacactagcctttgaagggacataccattactgttgcaattttctactagtcacacagagcaaatctggtacaatatgaggggactacaaaagggtaaacaccaggaggcagggatcactggaggtcatcttggaggctgctgtatggcagatgtgcctaacagaaataatttaagcatacccggagaatgaccctatggcctaagaagaatgtgtgttcggacggcccagggcagtggctcatgcctgtaatcccagcactttgggatgccaaggcgggtggatcacctgaggtcaggagttcgagaccagcctgcccaacatggtgaaaccccatctctactaaaaatataaaaattagaccaggagcggtggctcatgcctgtaatcccagcactttgggaggccaaggtgggcagatcacgaggtcaagagatcgagaccatcctggccaacatggtgaaaccctgtctctactaaaaatacaaaaattagccgagcatggtggtgcacacctgtagtcccagctacttgggaagctgaggcaggagaatcgcttgaacctgggaggcagaggttgcagtgagccaagaccacaccactgcactctagcctggcaacagaacgagacagcgtctcaaaaaaataaataaataaaaataaataaataaataaaaattagccaggcattttggtgcgtgtctgtaatcccagctattcaggaggctgaggcagcagaatcgcttgaaccgaggaggtggagattgtagtgaactgcactccagtctccatctcaaaaaaaagaagaatgcgtgttcggaactctgagctaaagaatctctgggagttcaattgctggtcggttcactcctggaaccttcactaaccagatccaggaaaccttctgggagccacagcttctggtggttattgattccaacaatccaacaacgaccaccggcctgtcacagaggcaacttatgttaatcttatctaccatcgctctgtgcaacacagattctcctttgcgctatggggacattgccatcccatgcaacaacaaaggagcttacttacgggtttgatatggtggatgctggtttgggaacttctgtgcatgcatggcaccatctcctgtgaacactcatgggagctcaggcctgatctctacttttatagagatcctaaagaggttgaaaaggaaggccaggtgtggtgattcacgcctgtaatcccatcactttgggagaccaaggtgggtgaatcactgaggtcaggagttcaagaccagcctggccaacatggtgaaacccggtctttactaaaaatacaaaaattagctggcatggtggcacgtgcctgtagtcccagctacttgggacactgaggcaggcgaatcacttgaacccagaaggtggaggttgcagtgagctgagacagcaccactgcactgcagcttgggcaacagagtgagactctgtctcaaaaaaatatatatatataataagataaaaaaagatgaaaaggaagagcaagctgttgctgaaaaaaagctgtgaccaaggaggaatttcagggtaaatggactgctccagctcctgagttcactgctcctctgcctgagggtgcagactgatctgaatgtggcaggtgccctctgtgcctattcagcaattccttactgaagattggagagctcagcctgccatggaagtctggtctgcagctcccactgctcaggccacttgaatgggtaggaacaaccaccaagttgtcttacaggctcataagccacatggaaataaggttgaccgaaaataaacatgtttcttaaaaaaaaaaaaaaaaaaggaacctgggagttgccaatcaggagattcattccttacctatgaggaacataggaatccccatctcatcccatggaatgcaggccatacaggggatcaaggccctttgttttgggttaaatcaaggttgccaggtggaggttgctagggtgagaatgctaagtgaaaacactatataaccagtatacttttttttttttttttgagatggagtcttgctctgttgcccaggctggagtgcagtggcacgatctcagctcactgaaacctccgcctcccaggttcaagcaattctcctgcttcagcctcccaagtagctgggattacaggcacgcaccaccgtgcccagctaattttttgaatttttaatagagacagggtttcaccatgatggccaagctggtttcgaactcctgacctcaagtgatccacctgccttggcctcccaaagtgctaggagtacagatgtgagccaccgcgcccagccagtatgttttttgtaagcaaatgcagttctcctgtccagcctgccaccactggattgccctgtatgtaagtctcctcaataaaccctatgtctcagcctgggaaacattgtgaggacccatctctataatttttttttttttaattagccagaactaatgcctgtagtcccagctactcaggagtctgaggcaggaggattgcttgtgtccaggtggttgagactgcagtgagtcatgattacaccactgtattccagcctgggtgacagagcgagaccctgtctcaaaaagtaaataaattaattaaacaaaccctgtgtctcattcactggctctgcatctcgtcttcagcctctcaaacatggtgccattgctgttgaagtcaataggggtccagcatgacagctgcctaccaacataaaattttggttgcctctaggaaagggagatagatggtttgtgcctggcaggaaaggaagattttcactgtgtatgtttttgtactttttgaattttgaaccctgttaaatgtacttagcaaagaaaaaccagttccccataatttagactgctgattgtgacatttaacatgttatcagaatcacctgaaaggcttgttaaaccacaggttgctgagcccaactatcagagtttctgattcagtaggtctggggtggagcctgagaatttgtatttctaacaagttttagggtgatgcttatcctgctgctccagggaccacattttgggaaccactgacttagacctgcttgtccaatatggtagccacatgtgactattaagaacttcaaatgtgtctagttcaaattaagatgtgctgtaagtgtaaaacatacactggatttcaaagacagtacagaaaaagaatgcaaaatatctctttaataattttatattgatttatgtttgaaaatgttttagatatattgggttaacaaaaatatgttattaaaaataatttcaccttggaagaggaggaagtgaaaaaaagaaaaaaattcacctgtttctttttacttgctaattgctagaaaatttcaacttatatggctcatattatatttctgttggacagtgcagacttagacaattctttcttctctcctgtttctgtgctgtttaacaacaggatttcactacaagactaataaatctgataagctgatagtctaaattattgataggtgatgataacgtaataggtttaacctgttttcattttaacaacaatagctaatgtccatgtataaaagagtatctactagggagaattttctgacatcttggaagtcaggtggaaacaatacctttggttaggcagttcttttccccgcttctcagtccctactaaactccaaacacgtatgttgctgcctcttcagctcatggtaggacagggcctgaaagcaaaagaacaactcatttctcacgcttttttctcataaagtagacatgttgagagagaaaagctaaattaatttggagctacagaacagctgttttaaagctattaagttactatttcatgaatgtcacatgttctgtttaagtgggtcaaaggaattcagtgaatccatacaccaggaaacactttcacaacatttaatcattt

SEQ ID NO: 1886996 - DNA, 4001 bp, Homo sapiens
ttcctggcaggaagcccctctctctgtcagagtgacagggaacagaccctttgtcctcctcactcgtctgccctagcccccagcctgctcctgcaaaagtctctgtttctcctgaacttttcagctgagtcaatcgggctctgggaccccgaaaccaagcctccccagtcactcgcttattcactcaacaaacacaccccccttccccgcactaacccaggcccagttctgggaaccagcaaggggaggggaggggagccccgagcagcgcggcgggaggtggacatgccggggaggagactggcctcctggtggcgggggagggctcctggggaccccaagtccgcggaggaggagacaggagggagcagggagatggaagacccaggagcacgggcgggctccgcgcatgcgtgggaagagaccttggcgtcctcggcgtcgccaaggcaaccggcgccagccatggcctctggggcgggcggaagctggggtcgctccccaccgcagagcgcagtcccgacggtgagggctgagcccgggagcagatcctgccttagcttgggagacggcagagtggggagctgtccctggaggggccagatcctggaggggtgggggacgaggagagacagccccaaaccgagaggaagaggcgtggcagggagcagggaggccgcggggcggggaggagagaacctggcccctgcggggttagggaggccactggccgggggggttggggctcgcgacgtgtccccatccattccccccaccccacctggctgactccgcgcacacccccagccctgggtcaccttcctgcagcccctctcgtgggccgtcccacctgcgcccccgcagccaggccgcgtgaaggaaggtgagactcccgggtccccccaccccacccccaccatcaccaccactcaccctcttctgcctcgcacatcctctgggagtccccgcagcacaacccgccaacccattcttcacccccgggacaggggtgtcagggggagggggactcggaggcccggcgtgggcttgctgaaccccgcttcctagacctgctggaactgatgatgctgcagaacgcgcagatgcaccagctgctgctgagtcgcctggtggctggagcgctgcagccccggcctgcctcgccctgccctcaggtgcgtgtgggtgggccgccggggtcgctcacctgtgggtccagggatgcggatccacctggggttcctgttcaggggggaaaagaactgggagacagaggagcaggaagccagcccgtctctctggctggggctgtttggcatctgtcatgtttcagcctccatgaaaggttggggcggggaagagaccccccaaagtccagaccaccgaggtcttgttttcaaggaggtttccctgtagtgcctcccccactggacttaaggctccaggaaggtaggcaccctggtaaccctgccccatgcatcatgagcgtctggcctggtgcctgacaccgtgtaggggctcagctgatatttgttgaacgagtgaatgaataaatgaatggttagggatacaaagccaggttggctgtgatggcacatggagaggtacaaagcacaagtgcacatagggttgggggatggggacaggctccttggaggagcagaggatcttagaaccagcccttgaaagccaggtaggattttgacccttggaggaggcgaagggtgtgtcccccatccaggctggcaggggcagagtcaggagacagaatgggggaaaccgtgtgcggcagtgtgtgtgtgcaagagtgtgtgtgtgtatgtgtgtgcaagtgggtgtctgtgtgcatgcgtgtgtgtgtgcaaggctgtgtacatgcatatgtgtgtgcaagtgtgtgttcacgtgcgtgtgcaagggtgtgcgtgcacgtgtgtgcgagcgggttgtgaaggcaagtgtgtgcgtgcaagcaagtgtgtgcgtgcaagcaagtgtgtgcaagtgggggtgtgtgcaagcgtgtgtgtgcatgcatgtgcatatagctctaaggctgagccttactcagccaatagtgggcatcctgaggtcaggagaagcagggactgggtggagagagaatgttgttcagctcggaggaggcggagaggggttcaaggaatccagacagaaggagaccctgaggagctactgccacccctcacccctgggtcctcagtgatgacacataggtgggtccaggggccgggggtgaggccggggacagctcagtggactcctggccccagctctgggggtcacacctggaatcaactgggtggccaagttgctcaacgtccttgagctacaggagtaaatgtctccacaatttgttgtccgcatgtagtaaacgctcaataaacacaacccattctttttttcttttcttttctttttcttttttttgagacggagtctctctctgtcacctaggctggagtatagtgatgcaatctcggcacactgcaacttccacctcctgggttcaaacaactctcctgccccagcctcccgagtagctgggaccacaggcgcctgccaccacacccggctacttttttgtgtttttagtagagacggggtttcactatgttagccaggatggtctcgatctcctgaccttgtgatccgtccgcctcagcctcccaaagtgccgggattacaggcatgagccaccgcgccccgcctacacaagccattctttttttttttttccttttttttcttttgagatggagtctcgctctgccgcccaggctggagtgcagtagctcgatctctgctcactgcaagctccgcctcccgggttcacgccattctcctgcctcagcctcctgagtagctgggactacaggcgcccaccaccatgcccagctaatttttttttttttttttttggtatttttagtagagacggggtttcaccgtgttagccaggatggtctcaatctcctgaccttgtgatccgcccgcctcggcctcccacagtgctgggattacaggcgtgagccaccatgcctggccacaagccattcttacaaagcctatctggaggaaataacttaggggaatggaggagtggcggtggggagagcctgatggtagattctcatttcccctccctgttttgcacaatccccaggtctacctggaggttccacaggaagagcctgaggaggaggaggaggagatggacgtgcgggagaaagggcctttggtgtttcaccaccactacttgccctatttgatgccctccccgggtgccctgctgccctggccagcccccttcttccccacccctgcttgtcagccctacttgcaggacgtgcccaggattcagcactgtcctgcctccagggaaagggaggtgtaagtgaggctgggtgctgccagggttctgctctgggctggaagttgcagaagagctgtgcaggggctggtggtcggtggagataacttgtgggtgaaactccagaggccacccctgggcctctgatgggggtctttttctttcccccatctcaggagagctgtgcccccacccccaccccccagtgccacagggactgtgggtgctgatgtacccccggcttcaggtagggctggggtggtgggcagcggggcccaggcctgggagtgaatcaggaggccaggagggccctgtgccctctggtggggtttgggggtttcctaacatcactgctgcaggcaactggcctgtccccttccctttacctctttggggtccactgagacaggagggagtcaagatgaggttcttgtttccccagactactatgatgccgagagcctcctatgaggacagaccccggccctgggaactgcaccagcttcctgctctggatacagccccggagccgcctcctgcacctctcttgtcgactccccggtgcccatggctggcagtccttctcactccctcaacctcagccaggccc

SEQ ID NO: 1886997 - DNA, 4001 bp, Homo sapiens
ggcaaaattacacttatcctttctgagtctcagtttcctcatctgtaaagtaggagtaatgcccatttgccatgtggttggaaacaataaatgaaatatcagtatagtcttccaagcacagttcctggcacgcaacagatactcaagaaatatcgattacttcttcctgccacctcttccctcaactaatgccagtttagtgaagactttactccaggcaaatctatactcataccaactcttatgtagatccattacaatcacactcatatgaaaaccttacatcactattttgtttcaagatagcagcccaccaggtgcatagaatctaagcctgtcttgatcccatcacacttgatcaatttcagcccaacgactcatcattaaacaattcaaaaatcccaaatcctccagctcaggggctctcaggctttgtggcatgtttaaatcaccagaggagcttttaaaaaatgccactgcatccaataccaattaaatcatactctctgggggtgggactcaggttccaatcatttaaaacattctccaggtgagtccaatatacagccagggcccagcgctctagctcttactcagacaactagcagagtctgcgtgtgtgaatttgcaatgcttaagctgtttcagttgagtaattgggccaactctaaaaaggtcatcaggcatctgtaggtacttcacggagcccaggaaggagctgtggcctggggagggggagtgggcacagagaagaaattgaaagtgggggaaggtggtccatgctctaatagaagacaggagacagcccccttgtcctttggaattccagcatggcctgagaatagggtctatataccctgggtactcaattaatgctttcaaatggtctcaggctttccagctcctccccccaggcatcaagcattctgcatgcacacttcgggttgaaaatagctccagtccttgccttgctccctggcagactagattataggattaactcttcacctcccagctgggctatgggaatcctcttgcctcttttccttaggtatgaacgatcaataatatagattttctcactttcttcttccatctttggaagctgttcttaggcagttacctttgttttgctggcagatccagaaggagaaactaaggcctgcgtggccctggggaggggtcgtgctccctgatgactgccctgtggttatgtgacatccgctgatctgcttgctggggagctactctgtccttcctcctttctggtagggaaagtaaaggtgcagcaaaggggctccagggcccccaaagtcaggatttcaaatttgctttctgctactgtgcagtccccttcactcataaacatgcaaatcacccaggtaattgagccacctgaagtccaagtgagcctaatttgtctaacgaattcaggctgcacagcaaattacctgaaactcaagtgaaagtgggcttttcagactggagagagcctgcccgagcctttgtttccaaacggttgctgcattttcctcatggtgcctggctggaacaaaagggaccacaaacaccaagggaggctgggggagctgcttttgtcggtcgctgaaatagccgccacgttgctagctgaggctagttttgaaagccacttggcactggggcttcctgcagaacccatgctgcgatgagggagccctggagccttatttttgcaggaatgtggggcctgagctgactagggtgtgccttcgggtcatagttcttggaaggtgcagggctgactggggaaaatggtgcacaggggaaactgagtccagcacacactggcacacttctcttcatgactcgatggcttttaaaatcatagctgttcaggcaggagtgtggagcctgcataggtgcctggggaaggagttggaggaactttttctgccttctctagctgagcctggcgatgtccaagcaggagtggtgagggatggctgcagagtcagatctccccactccattcccaccccacccctaccctgggttttcattatgtatcagggatgatggcacaaaaacaagatctttgttcctcccctcctcctgggcacctgctgctgtcatcctacccacctgaaggctcacaggccaccaccagtgacatcacagggccgtcgccacggaaacgggcagtgaggtcagacagcaggggcttgatggcttcaggcagggaaggaggggagccaagaccgagggggccagggtttcaggaatggagcttgctagggattagagcagacacagcgagaaggaaaatgtagccagtgagcttccctgaatcaggagagggccaggttcccgctcgaaggccctatcaattagtcactcactgcatgaaccacacccgcccagcgccagcctccaaaacctgattgccattcgggggctggttctacttgtaatttgctggctcaaaggtcggaatggattcctaaggaaaacggatttcctggtagccattccttggggactgagctcctgaaatcaattggcccaaatttcagcacaaatcaagcctttaaattcccattgagggtgggagtggctcactagggggatggagaaaaaagaacagccagaggctggggagagctggcagagaggccaggatctgtatgtccagagggtcaggggccagcaggtggggaagagggggagggacagggggagccgctggcgccctaggaggcaaggagagagggcactctataaatcaccagcgcctttttaaaaatggagtttaacctcccctagctttgcttttgattttattagcggtttcatttccttgggtaataattcattatctcattcccagcctggggaacggtgccggcccagaagtggcatttaccttcctcaccttaaagtgatgcttttttagctctgtcatcttcagatcactctcagccctggccctgttatccggctgcagctccacgtggccccccccaagacctcacagctcctaggcactggctgaccatgtgaatgaagggtggcccagctgacctggccgcccttccctcccctcgccagtgctccagcgtctgcttctccgacgctatttgcaccagaactgtctttggggccccagcttctctctgttgtgaagcgagacagctggcaggctgcggtgagatagagccgttctgctggagccgagataactgctcctgggagggaacccagtggaggattgaagggtccacatgtgtcagcttaactggaggatctgaaaaagctatttcaatctcgtccccaagtgggaaattggcagatgcccttctgtggaatgaaagtttcctcttcctctccatcctctctgccaaggaagaaagcttgattaacgagggtgtgacaatgtttttcacaaggaataagtcctcccaaatccattctggagtcacagaaaagatcccctcctgatgggaagtatggcaggctggagatgaggatgcagtgctctccccatcactggccagcatccgttcctgcggtgccccctgtccatcatccccccgtcccacccctaccatgttgcagatgctgggcactaggtgtatccatgaacaaagccatcgttgacccttcctcctggaactgacagtccagtggcctgttcctgctctctggtaaatgacctggagcgtgtgtggagtgcgaggagcaagcggcatctcctttggtggtctagttctctaacggctgaatgaacggccggtgtttatcctctaatgagttttccatctcttcttctcctcacaggaggtcagcgtcattacaatcactttgttctacacacgggtacaggtgtcccacagtggagctcaagtcgcatgttagaatctcctggtgcccaagcctggaccattatatcggaatctctggggtggaacccagtgtcagtgtggaaggcccccaggggattcccacatgcccacagccct

SEQ ID NO: 1886998 - DNA, 4001 bp, Homo sapiens
aggtcggatcccttgagcccaggagttcaagaccagcctgggcaatataggaagaccccccccatatctataaaaaaatacaaatacgaatattagccaggcatggtggtacacgcctgtaatatcagctacttgggagggtgaggtgggaggatggcttgagaccaggagacagaggttgtggtagttgagatcatgccactgccccccagcctgggtgacagagcgagactctctcaaaaaaaaaaaaagtaaaaagcaatccagctccaatactgatgtacttgtaagagtttatgccaaacttggtatctatttaaaaatcagctcatacgggaataagatttccagtcaaaatggactactttcatactaaaattataaggtctaaaacagttctcggccgggcgcggtggctcacgcctgtaatcccagcactttgggaggccgaagcgggtggatcacgaggtcaggagatcaagaccatcctggctaacacggtgaaaccccgtctctactaaaaatacaaaaaaattagccaggcgtggtggcgggagcctgtagtcccagctactccggagggtgacgcaggagaatggcgtgaacccgggaggcggagcttgcagtgagccgagatcgcgccactgcactccaggctgggggacagagcgagaccccgtctcaaaaaaaaataaaaaataaaataaaataaaacagttctcattttatagacactaatcgagttccacattctataccatgtttctttttagcatgttcttcccctgtaactaactccattatttagcttctaatcttcatattgtctcataaagcaaatgtttttctctgaattaggagtatgacttatctcaattttaaactatagtacaaaaagaaaaaaaaactttaagaaaaacataaaaacgaagcctctttgaggagcctttcatgttcaaagtacttaatttttcaaataactcatcagctttattatgcgtattatattcattttatacttatgaaaatatgatttccctagtaccacaaaataagttaatcttggaagtggaattttaattgtgacatttgcccgggtgtggtggctcacatctgtaatcccagcactttgggaggcatgcagatcacctgagatcaggagttcaagaccagcctggccaacatagcaaaaccctgtctctactaaaaatacaaaaattagctaggtatgatggtggacacctgtaatctcagccactcaggaggctgaggcagggagaactgcttgaactcacgaggcagagatagcagtgagcttagatgatgccactgcactccagcctgggcatcagagcaagactctgtctcaaaaaaaataaaaataaaaataaatttaaaagtaaaataaattgtgacatttatttcacaatactgttaggttatactattcaatatttcccataaacattttaccctttttctttttctttttttgagtcagggtctcactctgtcgcacaggctggagtgcagcggcgcagtcatggctcactgcagcctcggccacctgggctcaatagatcctcccacctcagcctcccaaatagctgggactacaggcacgcaccactatgcctagctaatatttttgtttgtttgtttgtttttgtttcgccatgtggcccaggctggtctcaaactcatgggctcagggatctgctcgcctcagcctcccaaagtgctgggattataggcgtgagccacttcacccagctgaatttacccatttctaaagtaacaaacactgaagtcttaacctgaaaatgtctctctctctctctctcacacacacacacacacacaccccacatatgcacatgcagacagcaaattaaaatggaaaacagctcttaccttcatctccttctggtgcatatgaagctgtaataatatcaatatcagcacaattcatcacaatctgattagtcgcctgcctcacctaaggggaaaaggaaaatcaacagtgtcagaaatagcctagattaatagtatatacaacttggccaggtgtgttggcacacacctgtaatcccagcactttgggaggctaagcaaagaggatcgcttgagcccaggagtttgagaccagcctggaaaacatggcgaaaccccatctctacaaaaaatacaaaaattggccaggagttgtgatgtgtgcctatagtcccagctactcgggaggttgaagtgggaggactgcttgagcccaggaggttgaggctgcaataaactgtgattgtgcagctgcactccatcctgggcaactgagcaagactctgtgtctctcaaataataataataatgatgttcgtaagacttgaactaatatcacagtcaattttttaaaatccagacttcgctaaaacctagactgagaatttatgcatcaatggtacaaataaatgaagttttaataatccaaagcaactcatattttccaaattatattaaaaacaataatggatgtttaagtatttcacatcacttacatctaaccaatgagccaaataaaataatgttttctacttaaactttgattttaaactattaaagggctgggcacagtggctcatgcctgtaatcccaacactttgggaggctgaggcaggaggattacttgaggtcaaaaattcaagaccagcttgggcaacacagtgagacaaaaaaaaattttaaattaggagggtgtgatggtacccacctatagtcctaactacaggagaggctgaaggaggaggatcccttaagcccaggaggtcaagcaaggctgcagtgagctatgattacatcactgacctccggcctgaacaacagagtgagactctgtctcaaaaaataaaaataggctgggggcatcggctcacacctgtaatcttggcaccttgggaggccgaggcaggcggatcacttgaggtcaggagtttgagatcagcctggccaacatggtgtaaccccatctctactaaaaattagccaggtctggtggcacacacctgtaatcccagctactcacgatgcaggggcaggagaatcacttgaacccaggaggtgagcttgcaatgggccgagatcgcaccattgcactgcagcctgggcgacagagtgagcctacgtctcaaaaaaaaaaaaaagaatacaaaaatcagccaggcaaggtggcataggcctgtaattccagctactcagggggctgaggcacgacaattgcttaaacccgggaggcagagattgcagtgggctgaaatcctgccactacactccagcctggtaacagagtgatactctatctcaaaataaataaataaatacgtttaatttcataaaaatcttaattaggaaacatttcttacaacatattgcaataattatatattttaacctgcacatcaaactcaccatgaggccttctgtgaggatagaggaagaaggctgatactataaattatgtcaaaactttatacaataactcttaccaccgagtgtggtggctcacacctgtaatcctagcacttttggagggtcaggcaggcagatcacttgaggccaggaattcaagaccagcctggctgacatagagagtagagagaccccatctccactaaaaatacaaaaattaaggccgggcacggtggctcacgcctgtaatcccagcactttgggaggccgaggcaggcggatcatgaggtcaggagatcgagaccatcctggctaacatggtgaaaccccgtctctgctaaaaatacaaaaaattagccgggcatggtggcaggtgcctgtagtcccagctactcgggaggctgaggcaggagaatgatgtgaacctgggagacggagcttgcagtgagcggagattgtgccaccacgctccagcctgagcaacagagcaagactctgtctcaaaaataaataaataaataaataaacaaacaaactagcatctt

SEQ ID NO: 1886999 - DNA, 4001 bp, Homo sapiens
tgtgacagctatagttatctatcacagataagtataaagtatagataactatacttttaaattctgtacttttagacatatttttaatctgagtaccgtaccctcttggttttcaaagacaactaccaacattcaattcattcgagcacaagtcttcacttcatttcattactatatacaccatgttctttaaggtgggagcctactgatttcccccgaccccagactgcagtaggaaaagaaatgaaacaaaatatatttactaacattctatttacagataactatcaaacagttcccatttttattacaggcttcctgttacatagtatcataaatgcctattgtgcaggatgtttgtcgggcatctatactgatggtctccaaaatcaaacaatacttcagataatgctgcgggaggagggaggggagtatgattcaccaaaaactgcagtgaagagtaatggaatattttcaccggtggtatgttataactaatagcttctttctttccttttttttttttttttttttgagacggagtctcactctgtcgcccaggctggaatgcaggaatgcagtggcgcgatctcgactctgcaacctctgccccccgggttcaagtgattctcctgccttagcctcccgagtagctgagattacaggggcccgccaccacgccccgataatttttgtatttttagtagagacgggggtttcaccatgttggtcaggctggtctcgaactcctgacctcaagtgcgcccgcctcagcctccctaagtgctgggattacaggcatgagccactgcgcccagccagcttcttgggagaggaaggtactgctaagcaaccatcacggtagcaataaatccaccagcttcgaaggccgcaaagctaggaagataggtggaaaagcggagatggggtcctcccacagcttctctagaggttaggagagaacaaagtcactgctgcactgtcacttgagggaaagggggagggggcggatcatcttggaaacccagcccctgggctggagcaggcggggagaagtcagagaggctgcctaggattaacattctcgttctcaccctctcccgcccttctagaagctcccctcctcgctccaacgcggcggccagagtcccaaatgaccactccctccaatctatcacccgagaggtgtagagagaaaccaaagaaagaactgagtcaggtggttaggcagagcggggactcccatgacctctccgtcctcccccaacaccctccagcctcccccggaacactatcaagcccagaagggtccggggcgggggggaaagccccacacaggtgtgctcgccggggaggggcgcaatggccgggccgccggctccccagagctcccgcagcgcggcctcagcccgagccccagcctcagctccggccacggtccctgccccggccccagccccagccccagccccagccccagccccagccccaacagagaaaggcagagcacgccgaacccggcgccctgcggccgcccagccccgactcgaggcccgcccgccctcccggccgggccctgagtccagcccgcgggcgcggcctaactgctcgccccgcagcttgccccggggcccgagggtcgctgtacctgggcggcggcctccagcttgccctcgaaggtgaagtccagcaagtcgggcttgaggcaaaggctgcagttgatgggggagacatcggcaggcagccgctcgaagggcctcttctccggcatcgcggcgaggcccaggctgtggaggcggcggcgagaggagcggctgaagacgagaaggaggaggggaggaggcggagggccgaggaagagcaggcggcgagcgagggagggggcggcagctgccagccacatccaccgagcgcgggcgaccgccggaggagagcgaccgggggagcctggggggcgggggagagacccagccggagcgctaggggttgggaaggaggcggtgcgggcggactggcgggcgagctgcctacggggaagggggcggaggggagggaaggggaggagggccagcaaggagggatggagagggggaagtggtggcggcggctgcgtgcgcggccccgccggccgggcgcgcccccgtggagtgcgcgcgcacgccggggcagagggcggagcggcgaggacgagggcgcggccggcggggcgggagggcgtagggttgcccgcgcgagcgcagggcgggaggcgggcgctgcacctgtcggcgccgctcaggactgggggcggccttccaactggaaggagccgggaagggcttgatcagaggaaggaaaggcataaggggccctcgggaaactgaagcctacgcagttggtcagttcagccagggtcgcatgcataaaataccagttacaagcaaaaccccaaactggattctgcctccaggtcagcgaaaagccctgacttgagcctctctggcctcagttcctgttagtagcaaattcaaaggatgatttgaaagttttgttataaaacctttaatagccgggcgcggtgtctcacgcctgtaatcccagcacttcgggaggccgaggcgggcggatcacgaggtcaggagatcgagaccatcctggctaacatggtgaaaccccgtcgctactaaaagtacaaaaaattagccgggcgtggtggcgggcgcctgtagtcccagctactcaggaggctgaggcaggagaatggcgtgaacccgggaggcggagcttgcagtgagccgaaatcgcgccactgcactccagtctgggcgacagagcaagactccgtctcaaaaaaaaaaaaaaaaaaaaacctttaataatctaggttacttcaaccaatgagatctggacttttgagggagtgatttcaaaaactatatttttgtttccatgatttaatgtttaaaatgggatgtttcgggcggtcgcggtggctcacgcctgtaatcccagcactttgggaggccgaggcgggcggatcacaaggttaggagttcaacaccagcctggccaatatggtgaaaccccgtctctactaaaaatacaaaaaaaaaaaatagccgggcttggtggcgggcgcctgttgtcccagctattcgggaggctgaggtaggagaatcgcttgaacccgggaggtggaggttgcagtgagccgagattgcgccactgcactccagcctgggcgacagagtgagactctgtctcaaaaaaaaaaaaataaataaataataaaataaaatgggatgtttcaccttttccccattttcatctttgtttctttttaaactaaaagatccttcagcaatcatggcctctttaatggtgaactatctgtggctctctcagttctgtagataccttgcaaattgaggaggtatatatataaatgcatatatatatatatatatatatatatatatatatatataatgtaactgaaattatctttaaaaaggggggccagggccaggtacggtggctcacacctgtaatcccagcactttgggaggctgaggcaggtggatcacgaggtcaggagttcgagaccagcctggccaatatggtgaaaccctatctctactaaaaatacaaaaattagcctggcatagtgtcatgtgcctgtagtcccagctactagggaggctgaggcaggagaatcgcttgaacccgggaggcggaggttgcagcgagccaagatcacgccactacactccagcctgggctacaacgagactctgtctcaaaaaaaaaaaaaacagtgggcccaggtgtggtgacgtgtgcctatgatcccagctactcgggaggctgagacgggaggatcacttgagcccaggaggtggatggaggctgcagtgagctgtaatggtgccactgcactccagatgacagagtgaggccctgtctctaaaaaaataaaaatgaaataacaatttaaaaaatgttatttaaagtgtcaaagg

SEQ ID NO: 1887000 - DNA, 4001 bp, Homo sapiens
tgaaaccccgtctctgctaaaaaaaaaaaatatatatatatatatatatatatatatattttagctggcatggtggcacacgcctgtagtcccagctactcgggaggctgaggcaggaaaatcacttgaatctgagaggcagaggttgcagtgagccaagatcacaccactgcactccagcctaggtgacagcaagaccctgtctcaaataaataaataaataaataaaataatcggaggctcttgatgaagactaaatgaggtgatatatgtatagcagagagatgttcaggaagaatccagaaggttcaagctcaggagggatctgagtgttctgtaaatgccagctctctctctcccctactttctaagtgtcttactaccagtgttttttgtttaatcctctatctttgtatctaatcttcccttgtagcaactgattaagtaatgaagcatgagaacagatttgctcctaacaggaggaaaaccagccccgtcccttgttgacttgagccctcccaggctgacacttttcctcttggtgtgggtggcctaagcccggtcctggagggctgggttttaactactattaaatatcagggagaaactaatgaagccacaattgattaatcaagctggatcccatctccctgtgaaagtgccccattagagattcagggtctctttgaggggatttacagcggctgcaaatatcagtggcaattatatgcatctcatctttcttatcaagcagccaccttctcctctccctccctcaagtgccccaaggcttaccaatcacaagcaccacaggtcacagcatcctccaccagactcggtgtgtcccatgggctgggtagtggtgagggagcatctctccccagcatgaaaggaaaatcccagaagaagtaaggaagccagagcttcctgagagctggagagtggaatccaagtgggatcttcaagatcacctgaagctgattctttctaactgtgaaactatccagaagttattttaaagaggtatgctctgacctactgcttcttgaagaacaggatcagaaatcctctcatttcaaatgctccatatctgtattagtcaaggttccccaggcagacagaaccagtaggatatatgaaaagaaaggtattagggggcattggcccttgtgattacagaggtggagaagtcccatgataggccatccacaagctggagaatcagagaagcccgtagcatgcctcagtccaagtccagaagcctcagaatcagggaggccaacagcacagaccttcgttggaggctgaaggcctgagggccccgggaggccattggtacaagtcctagaatccaaaagccaaagaccctgtagtctgatgtccaaggagaaaaggcatcctgctccagaaaggtgggagagagaatcctccttcttctgcctgtttgtccccagcctggccttgagctgattggacagtgcacactcacactgagaacgggtctccttctcagcccgctggctcacatgtgagtctcctctggaaacactctcacagacacacccaggaatgatggacgccaccagccactgaggcattcctcaacccagtcaagctgataccctaaaattaaccatcacagtctcagatcttaagaatgcccaaggacatctattccggctggccagtatgctaaagttgattggtgccattgggaagagctgatgagatgcactagagatgacgcagctttagagttaggaatcggtgtccagatttctgcctcttcctgccttctgatgctgaacttgcctctctgatcctcagtatctaaacctctaatgccatgggaagatggagatcatagctcctaatgttaaccaaggagacagcatctgttgagcttttgggttttcctatgagtacttcttccaggaaagcccatcaaaccttcctctacaaaggtttattcctccagtgagctctgcaagggcagagagtgcctcgtgcccctcactatccctagcagccagctgggtgcaggacccagcaagtgctcagtaagcatctgcaaagcaatgacagcatgcctggaatctactgagagaagaaatcaaatggccattgttcacagttggccaggtctgccataacaaagtaccacaggctgggtggcttaaacaacagaatttattttctcacagattgggaggctagaactctgagagttggtttctttggtggcctctctctttggcttgctgtgtgtccacatgatcatctctctgcctgtgtgttttctgtgtcctaatctcttgtaaacacaccagtcatattggttaggacccaccacatgagctcattttatcttaatgacatttttagtggccctatctccaaatacattcacattccaaggtaccagggattagaacatcaatatgaattttagggggacacagtcactgcctacatccccatccttctgctttgcccttgtagcttcgcttcctgggttctccatgcaaggccaagggtggagacgccacacctggatacagccacctcagaacccaccattcagaaaggcctctgcaagtgacttggatccctgacaattactcccttgtgcctctgaccacgtgtccttgttcctagaagcaagcatggggtagctgataggacctcttgtagattccgctatgtcctcttctccatgggcaaactctttaccttcttgaaggcctgtgctctcacccttcaccccctcagccccaccttggtccaccactgcagggtcagaccctcctggacccaacaccagcctgaagtccacagaccccggcagagacacacccctttggtgtcaggctcccactgccctgactactggtttgtccctggcccctgagattcatctgctctctttatctcctgtccgttcacctgcactcctctgcactgggataaattttgaagagctaactagtatgttttccccaccatccattttttcctagtcagccctccctaccacagcttctcttacatccatcccccgtgcccgccacatcttcatctgtcccagcagaaggggaggaagaaaatctgctttctgctgatcacaccttcttcccaaatctttctactttataactgcttctgtggctctggaacttaatgggtaataatttgccacctcttttctctgttctgcccaatgctggtctcctcgctggtctcctccctcttggggagaatcaaagggcctggataaacagggcgtgtgcagaaaccgcactgatgagtttcttacccaccaccctccctgccacacacacatctgagggccttggtttctgatcccacctcactcccttggcccctgtcatgggctaaatgtttgtgtttcccaaaaattcatatattgaaatcctaacccccaaggggataatggaggtggggcctttgggagtaattaggtcataagggtggagctgtcatgaatgggattagtgcctcataaaagagaccccagagagctctctagctctttctgccatgtgaggataagaagtcagcagtctgcaacccagaagagggccctaaccagaaagttgttgtggccctgatctgacttccagcctccagaactataagaagtcaatgtctgttgtttacaagccactctgtcttgacttttgttacaggagcccaaattaactaagataaccctatctgagactgggcacagtggctcacgcctgtaatcccagcactttgggaggctgaggaaggcagatctacaaggtcaggagtttgagaccagcctggccaacatggtgaaaccccatctctactaaaaatacaaaaattagccaggcacggtggtacacgcctgtaatcccagctactcaggaggctgagtcaggataattgcttgaacctgggaagcagaggctacagtgagccaagattgtgacactgcactccagcctggg

SEQ ID NO: 1887001 - DNA, 4001 bp, Homo sapiens
cgagcggagggaacatccagcagcgggcctacggaggcgtgtctcttcgtttgggcatcccggactcagtcctggcacatggtgggcatcagtgttcatggtaatgacatcaggcacagcgaaagaaatcagaggctcccaaggttcagcggtcatctgtccatcccctccctttgggctaaagaacaaaccgagaccctgagagaggaagggaactgcccctagatcatcacacagctggtggcagatgaaagaacggttctgagcatctctttttcccactcgggctgcccctccttgaaaagttcctaaagttcaaaatgtcagggtcgcccagagtgttctgaggatgtaagcgtgtttttaaaacgtgctttattttcgatttccctgattaacacaaccggattctgaagagagaaaaaaaacaacctcaccataaccggacgcctttctgaaacaaacccatcaatgttggaagcacccaaacaaacccatctgaaatgttggaagcaccctcaaagggaagcagacgcctgagtttcacatccaccctctcatctgaccccaggctcctgggagactggcaaggctgttgagccggcggcaagcccgcaatcccccgttccgtgcccagatgcgcttcggaatacagaacagctgggacttggaaagagactatggggcacacacctgctgtaggtcacataacctcccagcagggcttggggcagcagccggtcatcgagctcatttgcatttctgcagcaaaacatgaatattcacacaagtttgacaaataaagaccatcaacagcctcacatcagttcaagcgcaattttgccaccaattggattacgaaaaacttctgggcttccaggcagctttggagcttgggaatcgcagatgagggactaggggcttgcaccgctcccgtttcgcggttggggagagggagctcattccaagtcttcagacagaggtgggcatcgtgcccgacgctgagcggagcaggtctcctcgcgccccggctccgtgcgggcgcggtccccagcgcgccacccctgttccccgctctcctcccgcggcgggccgtgcacatcctggatggcctcgtagacggtctctgagtcgctgcgcgccaggggccgcgggcacatccaggaacccgccacactgcagccttgaagctgccgctccttccgaggtggccggcgggaggcgagacggcggcgcgcgccaggtagtccagggactgcgcaggccgcaagtacaggcaggcgggcaggccgggcgccaggctgctgcgctgggtcgcggcgccgcgttgcgaagggccgcacagggagctggcgcggcctcggggctccgcgggggtgctgtcggggcccgctgccgccgccgcgctcacaagccggtagtcgtaggtgagcggctcgggggccgaggggactgttggggggacctggcggcgcggcagtggcaggttgtctcgtccgggcgttcccgttcgcggggaggtcatttgcccagcgcaggcagctcgcgcacgtactgcgcgggcaggtagaaggggtggccgccaggctcgcgccgcacgtgccaccagtgctccgtgctgcgccgcagcagccagtagcgctcattgggccagatggccacgcggcgccagtccttgcgggtatactcgaaggggtgctccaccaccaggtagacatccccctccacatacgccggcatcgtggccgcggcgtttttctgcaggcaacaaggaggagggccgtggaggtcaagaccaccgagcctggaatagccccgcactcggggacagacttgggttcgagtcccgatgctgcattcgccgttcgccttcgggcctgagtttttccatttctaaaatggggacttgaataaaatcacatgtaaggcttccattcttacactcagtgctggaattacgacaacctcttcattccgtggggttgattctaagatttcagcctcgcttcagtcctgcggtggggagattgtgggtagtcttggtccaaatcgactgcgagggaaactttggttttaaaacgaggggtgattgcccgctctgaggtcgacaccacgcttactcaggtgactgagccttagttttccatcagtcaagtgggaagagcagcccattgccagccgctccccgggccctgtcccgcctggacgcctcccgcccgcagagaatccgcagagtcccgtagcaccgcctccctccaggagcctgcgccccggcccctgggtcagggttgggatgcgggctctgcagacgccccggagaacagctttacctgcgggctgtccctgcccggtttagtccaagggcctcggtgtgagggcctccgctgtcaaggcgggggaaccggttctcttggtttctctctccttccccagaggcttcaacgcagacgtgagccccagccgggcccgccccgccccctgctctccggctctcacaccgcaccccccccgaaaaaggctgcccacctgccctgggaccccccggatgcctccacgagagtggcccctggagaatgcactctgagacagtgactatccgtgcggagtcccagagcaggggcccccaaagctctccggagtggtcacaagccccgctcccgccccggctccagtgtgtcagggatgggggagagcctaactaaatctgcctgcacccctccaccaaagccacgagtcggtggtcttctccggaagtgcatggcccctccaagctcccacactgaccacatctcctcctgcctcctaaggtgacccggaccaggggccaggagaccgccgcttgccgaggctgagggactgaaggagcagggtccaaccaggccccccgtagggctccttcgccactttctcaagcgttcctcgacgaggaaaaagtgtaaactgagtcactaagcacactgggtcccggaggcggggtcatcgagctgcccagagctggaccaacaaaccccaaggaggacactgccccggcgccccttccccatggaccccgcagcgcactcacgtcggctgggcgggcctcagggagcccaagggccggggggggccgagccggcaggttaggccccgaccatcgccctgggcgtggcttccaggggcgaagccggagaggctgcacggaaccggagctggcaacgggagctaagagggacagggacactcaggagtgctgtcaccgatacccaaagcagctgtgtctgggcggggcgaggaggggccagaaggcctctgctggggaccttgggggcatggggaagacaaggcccgaagcagaaggccggggcctggagccgggagggctgcgtctgaaggggtgctggctgatcgctagcagaacccaaggagggtggggccgcccctgcccggccttcccccttctcccctcacctggggatttgctgtccctgcgtccctgcgtccctcccgcacgcggctctgggaatgctgggctggggctggttgtcttgtccgggcgttcccgctcgcggggagatcatttgcaccctgaatcccccactgcgagcacttccaaccggactgcagaccgccagctccgggcccgcctccctcaccagggcctttccccgcacagcccggccgggcttggaaaaactccgagcgggattcccagcgcagggacgcccaccaggcgcggtgtctcgggctggataagaaggggacccggccacggctccttccccgacctgggggcacacagagaaggagagagattggtggggggggcggggtgccgggaggatccctggagcgcaggagcgcaccagtcgccaggaggtctcctgcgtccaccgcccaggcgacgcaagatacagaggcgtcaacgcctgggtgggcgttgggggcctccctgctgccctccagcccaatggagggcagcccttcgcctaccttctccttcgcgtgggatgcggcccgcgcag

SEQ ID NO: 1887002 - DNA, 4001 bp, Homo sapiens
aaagtccttgggaggtggctgggctcagcctgagctcagggttcttcggtgggtgttgggacggggcagggcgggcacttgcaggtggcacaggcttcatcaaggcaggacatgggcttcatcaaggcaggagccagagcacccgagccctggcaggggaggtatggcccaggatggggcagggccgtgtgctcctggaacggacatccttctctgccagagacctgctccccaagccctgtccctcccaatccccaggcagcccactctgccctccatagatgaatctaatcccatatattacaataaactgcatttgcctctccccattgccccaccctcccctaccctgagccagcggcccccacttcctcatcccctggcggtggcaggtgcccctcctcaagcagtgccacatcctgtcagcagccagctgtcctggcactggcctgagggccgggggacgcagagggcggggctgcgcggctactccaggtagatatcttctgtggggcaggtgtactccacaaactgcttgtgaaactgctggaatgctctccccacggactctgccagggctttggtggagtcttcagacacaaagacgtggcaggcaaaccggtggtcggcgaggtgcttggtgatgaacccaaagtacttgttgttctttggatgatatccgcggaaagagatgttttttaactggaaaaagtggctacatttattccccttggcctcctgggagtcatcggccttgacacctatcttcacaccccgcacgctgatctccaggacacagctggagggcgggttaaagtgcacggttagccggcgggtggtggcaatcttttgcatagcggcagagaggacgacatcgcccttgtgatagggaacctggactgagcccaggaacttcacccggaactggtccacccagtcactgtttttagccagggctgccatgtgctcgggctccttggtgacttcgatggcgtaataggcagtaaagaagccccgggcaccagtgcgcatgttgtaggcctcgtaccagtagtcttcagcctggagctccactagcagagggtcatccacttccagctcaggttcgtcttcgtgtcgaggcacaaacctgaatatggtccggtgggtctgctcctgctcctcccggttgatgatgcaggagaacagcccgaaggactcggcactggaggagcgggagcggccactcatgaagatgttcaggaacttcttggagaaatggacgtcgggttcgtcaggcgtggagtccttggagaggcaggcaggaggctggggccgggaggcctcctcatattcctctccgatggctgactcatagggcgaggagacggaggcacagttgtcatagacgatggccgagtcactctcgtcactgtagtctccgaagcacggccgcaggctcaccggctccagctgcgcgtgctcatctaccagcagcgtgggctgttggtggaggtgcctcgatctgtggtgggggcggggctgctctgggggggcagctcatcgctcaggcaaatgggttcatgcggtggtgtctgctcccctgtcttcaggggtgaggatgatcgagacacccgatcctgccaactgtactttttgcccagagaattattattcagtgtgtcctgagacaactgcacctgcggaaagaggttgagcgtggtgggccgcttgggccggtacgtgtccccgctgcccgggccctggctctggccttggctctggccctggccgcgggacgccggctcctggccggactcggccttgggcggccccgctcccggccgccgggccgcgcgctcctcgtcgtcgtcctcctcgtcgtcctcggccccgggagtgtcccccgtcgcgtcgatcaggtccatctgcagcatctcggcctgcaaccggctccccgcgccgccgccacccgcagagccctcccttttcttttcttttttcttttcttttcttctttctttctttattctcttcatgtcccttcctccctccttctttccctttcttccatccttccctccctccttccttcctccctccttttcttctttcttttttctttctttcttttttctttctttccttcatttccctccctccctccttctttccctttcttcgttccttcctccctccttttcttctttctttctttccttccttcttctttcttttcttcctctccctccctttcccttcttccctccttcttttccttccttccctccccttccttctttctctctctttttctctctcttttctttcactcttttcgccttccttccttttttccttccttccctccctccctcctctttctctctctcgcaaaaaaagagtaagcagacataatatcaatatattcatttacctcaaggactgagaataatgaatttagttcatgcaactatgattcttcttgtcatttattcaagaaactttgagattcattcccattatagctaaacactcttgacactgggaatataaagataaataactcacagtccccaccctcaaaggtttataatagagtaggagaagggaaacagtaaacaaaagtttgaagtgtgatatagtgaaatatatatatttggtctttgacctcatttcctcgtatacacttagaatctccaaagtgatatcttcttgtatgcaaacaaattgactggtagcttcaggatgggggctggcggcaaaagaccaaagcaggattagagggttgggacttttcttccccaccccccaacctcccaggaggtgagaggagctgaagattaagttcagggacagaaaaagctgcccttgaaaattcaaggccttgaaaatgcagaattaagtttgaatatgaaagggaataatagacccagtgctttgggaggctgaagcaggaggatcctttgaaaccaggagttcaagaccagcctgggcaaggtagggatgccctgtctctacaaaaaaaatagaaaaattagctgggcatggtggcatatgcctttaatcccagctacttgagaggctaaggtgggagaatcatctgagcccagggaggttgaggctgcagtgagccatgattgcaccattgcactccagcctgggtgacagacccagcactttgggaagccaaggcgggtagaacgcaaggtcaggagttcaagaccagcctggccaagatggtgaaaccccatctctactaaaaatacaaaaactagccaggcgtggtggcaggcgcctgtaatcccagctacttgggaggctgaggcagagaattgcttgaacccgggaggcagaggttgcagtgagccaagatcatgctgctgcactccagcctgggtgacagagtgagacttcgtctcaaaaaaaaaaaaaaaagaatagatttcctgtgaccaatttcgatattatttatttttagccaaacttattgacccagaatgaccagtttagataaatcgtggtcctgggatggaacacaaaaaagtggaattttattagaaaaggagaaggggagtggctattgaatattgatgttgtgttcaatatagtgagggttttttattttgttttttgagacagggtctcagggtcttgctctgtctcccaggctggagtgcagtgcactggcatgatcataacactgtagccttgaactcttcaggctcaagtgaccttcccacctcagcctcctgagtagccaggactacaggcatgcactgccacacctggctcatttttcaattttttgtagagatgcgatctcactatgttgacccggcttgtctcaaactcctgggctcaagcaatcctccgaccttagcctcccaatgcactgggattataggcaaaagccactacacctggcctgaacttttttattctaaggatttgcagagtttctgtttaagccattatcttcaaataatggttttaatttctttttaatccttatgtaaaat

SEQ ID NO: 1887003 - DNA, 4001 bp, Homo sapiens
cacttccatgtgttgccatttcctcactggaaagtccttgggaggtggctgggctcagcctgagctcagggctcttcggtgggtgttgggacaggggcagggcgggcacttgcaggtggcacaggcttcatcaaggcaggacatgggcttcatcaaggcaggagccagagcacccgagccctggcaggggaggtatggcccaggatggggcagggccgtgtgctcctggaacggacatccttctctgccagagacctgctccccaagccctgtccctcccaatccccaggcagcccactctgccctccatagatgaatctaatcccatatattacaataaactgcatttgcctctccccattgccccaccctcccctaccctgagccagcggcccccacttcctcatcccctggcggtggcaggtgcccctcctcaagcagtgccacatcctgtcagcagccagctgtcctggcactggcctgagggccgggggacgcagagggcggggctgcgcggctactccaggtagatattttctgtggggcaggtgtactccacaaactgcttgtgaaactgctggaatgctctccccacggactctgccagggctttggtggagtcttcagacacaaagacgtggcaggcaaaccggtggtcggcgaggtgcttggtgatgaacccaaagtacttgttgttctttggatgatatccgcggaaagagatgttttttaactggaaaaagtggctacatttattccccttggcctcctgggagtcatcggccttgatacctatcttcacaccccgcacgctgatctccaggacacagctggagggcgggttaaagtgcacggttagccggcgggtggtggcaatcttttgcatagcggcagagaggacgacatcgcccttgtgatagggaacctggactgagcccaggaacttcacccggaactggtccacccagtcactgtttttagccagggctgccatgtgctcgggctccttggtgacctcgatggcgtaataggcagtaaagatgccccgggcaccagtgcgcatgttgtaggcctcgtaccagtagtcttcagcctggagctccactagcagagggtcatccacttccagctcaggttcgtcttcgtgtcgaggcacaaacctgaatatggtccggtgggtctgctcctgctcctcccggttgatgatgcaggagaacagcccgaaggactcggcactggaggagcgggagcggccactcatgaagatgttcaggaacttcttggagaaatggacgtcgggttcgtcaggcgtggagtccttggagaggcaggcaggaggctggggccgggaggcctcctcatattcctctccgatggctgactcatagggcgaggagacggaggcacagttgtcgtagacgatggccgagtcactctcgtcactgtagtctctgaagcacggccgcaggctcaccagctccagcagcgtgggctgttggtggaggtgcctcgatctgtggtgggggcggggctgctctgggggggcagctcatcgctcaggcaaatgggttcatgcggtggtgtctgctcccctgtcttcaggggtgaggatgatcgagacacccgatcctgccaactgtactttttgcccagagaattattattcagtgtgtcctgagacaactgcacctgcggaaagaggttgagcgtggtgggccgcttgggccggtacgtgtccccgctgcccgggccctggctctggccttggctctggccctggccgcgggacgccggctcctggccggactcggccttgggcggccccgctcccggccgccgggccgcgcgctcctcgtcgtcgtcctcctcggccccgggagtgtcccccgtcgcgtcgatcaggtccatctgcagcatctcggcctgcaaccggctccccgcgccgccgccgcccgcagagccctcccttttcttttcttttttcttttcttttcttctttctttctttattctcttcatgtcccttcctccctccttctttccctttcttccatccttccctccctccttccttcctccctccttttcttttcttttttctttctttcttttttctttctttccttcatttccctccctccctccttctttccctttcttcgttccttcctccctccttttcttctttctttctttccttccttcttctttcttttcttcctctccctccctttcccttcttccctccttcttttccttccttccctccccttccttctttctctctctttttctctctcttttctttcactcttttcgccttccttccttttttccttccttccctccctccctcctctttctctctctcgcaaaaaaagagtaagcagacataatatcaatatattcatttacctcaaggactgagaataatgaatttagttcatgcaactatgattcttcttgtcatttattcaagaaactttgagattcattcccattatagctaaacactcttgacactgggaatataaagataaataactcacagtccccaccctcaaaggtttataatagagtaggagaagggaaacagtaaacaaaagtttgaagtgtgatatagtgaaatatatatatttggtctttgacctcatttcctcgtatacacttagaatctccaaagtgatatcttcttgtatgcaaacaaattgactggtagcttcaggatgggggctggcggcaaaagaccaaagcaggattagagggttgggacttttcttccccaccccccaacctcccaggaggtgagaggagctgaagattaagttcagggacagaaaaagctgcccttgaaaattcaaggccttgaaaatgcagaattaagtttgaatatgaaagggaataatagacccagtgctttgggaggctgaagcaggaggatcctttgaaaccaggagttgaagaccagcctgggcaaggtagggatgccctgtctctacaaaaaaaatagaaaaattagctgggcatggtggcatatgcctttaatcccagctacttgagaggctaaggtgggagaatcatctgagcccagggaggttgaggctgcagtgagccatgattgcaccattgcactccagcctgggtgacagacccagcactttgggaagccaaggcaggtagaacgcaaggtcaggagttcaagaccagcctggccaagatggtgaaaccccatctctactaaaaatacaaaaactagccaggcgtggtggcaggcacctgtaatcccagctacttgggaggctgaggcagagaattgcttgaacccgggaggcagaggttgcagtgagccaagatcatgctgctgcactccagcctgggcgacagagtgagactttgtctgaaaaaaaaaaaaaaaaaaaaaaaaaagaatagatttcctgtgaccaatttcgatattatttatttttagccaaacttattgatccagaatgaccagtttagataaatcgtggtcctgggatggaacacaaaaaagtggaattttattagaaaaggagaaggagagtggctattgaacattgatgttgtgttcaatatagtgagggttttttattttgttttttgagacagggtctcagggtcttgctctgtctcccaggctggagtgcagtgcagtggcatgatcataacactgtagccttgaactcttcaggctcaagtgaccttcccacctcagcctcctgagtagccaggactacaggcacgcactgccacacctggctcatttttcaattttttgtagagatgcgatctcattatgttgacccggcttgtctcaaactcctgggctcaagcaatcctccgaccttagcctcccaatgcattgggattacaggcacaagccactacacctggcctgaactttcttattctaaggatttgcagagtttctgtttaagccattatcttcaaataatggttttaatttctttttaatcttt

SEQ ID NO: 1887004 - DNA, 4001 bp, Homo sapiens
ttctttggtttaaggctgaatatttaacttctaaacaatgcccaagactttagattcatttttttctaactttactacatacagtgttcaaaatgatgacagacatcctccagaaattttacaaaatcctaaaacactatatttactactaatattatgaaaagattttcagtgtaagtcatctggtcaatactgagttgaccaaaaattcaattagaatatttcccttccaccagtgtttaaattcattagtacatttgtattacataaactaaagaaactagagaaaaatctttcccaaaaaaactggaaaagtagtcactcatctggtattttaagtagcaatgaaggtttttaactgtttacttatacctacaaaagcaaaaaatccaaagaatttgactgagactgaggatattacttttttaaaaatcctcaagacagattttaacaaactctccagatttgagtgtctacagaaggacttctaggggctccgagagttccctgaaattagaaacaaaatgatgtacaaattttcctggggtgacggcccatcatctttcggactctcaaagggattatatccccaccagaaagcaagtttaaaattgcttatttgagtgtctttaaagtatcctcattttaatatttattcaatttgaaactttgaaatattgaactacaaaatcatgtaaactgttccaagaaaaatatctaacaaatccctaaacttacacaaccattaattacaaacgtatctgaggacaaaagccagttacattttaatcctcaaagaattcctaaatattttaaagagatagctgcccttttcccccaactcagaatatagtggaatgaagcagcaagttaaaatcatattagtaagaaattaaactcccaactacttcattttctcacagaagctctcattttcatagggaaattcttctgtatcaatggcattagtgattcacagtatttaatgaatgcttttttgtcaatgaacctctgaagctatttccatattctgtgtaaaaaataaattataagccccaataatggatcattatccaagcaaaattccctatgaaaataccagtttaatgaagtaattgggactatcccttgggatttaatgtaattagacttttcaggtaatgctaaaatataaataacaaacttgacagaattgtcattacaaactgaatgtatataccctactacatttcgatgcgtgtcagtactccagcaggtattctagtacgctttcttaaacccagtgaaactcttgctgtgatacatagtctctgttttctcctgcagtagatcggcctgctcaattgctttaaggacatttttcttggatgtttcctgaacttcccctcccaaaagaaactcatccaaaataaaataagccttctcaaaattaaagatgatatctagttcacagacactgccgaaatacttgtcaagtaattccacataacgatgaattatttccagggtaattagttcattgtcctgatcctcaatagcacagcaaaaatacagactagcatatcttttgtaaacaatcttcagatctcgccactcaaggaagctgcacattttaggtttccgtgctaaaacggtctgaacaagttctcttgtgatctttttcttctctttgtccgatagtgggacataccatttttgcagtcgaagctttccctgacgactaaaaagcaacataaactgcatggcggccgcgggccgcgggcgcggcggagcttggccggtggcggcggagcttggccggcggcggcggcaaaggggaagcccctgtcgccgtgctgaggaagagaagccgtggtgctgtggggaagggccatgccatgtcatttctatttctcattccatgggtaataaaagcagaaccagccttctggtggtcacaaaacattttgacatgagaaaggctcatgatgagcaatctgggaatgtacatcccagagcatgcatgccctttgacccacagctaccatgatgtcatgtctagtaattagtcctaaggagatcatcagagatatgtaaagaaatttcattctaacagcatcctctgtagtgttatacatcaggggctggcaaaccatgtcgggaagaacacagtcatgcccattcatttacaaattgtgtatggcttctttccctgcaacagcagagttgagtgttgcaacagaaacctatggcctgcagagtttaaaatatctactctttggcctttttttttttttttcttttgtgacagagtcttgctctgtcgcccaggctggagtgcagtggtgcgatcttggctcactgcaacctctgcctcccgggttcacgccattctcctgcctcagcctcccgagtagctgggactacaggtgtccgccgccacactcaccacacccagctaattttttgtgtttttagtagagacagggtttcaccgtgttagccagcatggtctggatctcctgacctcgtgatctgcccgccttggcctcccaaaatgctgggattacaggcgtgagccactgcgcccggcctactctttggccttttatggaaaaaagttgctgactcctggtgaatatattaagaaaaagttggaaaaacctaaatcttcaagagtggagaattagaaagtaagacacgttgtatataagacagatagtgtgtgtgtgcatttatttgtaaatacattgtttggaagtaatgttgtcaacatatgttgcaggtcttaaaaattgttcaatatatagtgttaatcaacaaacaggcaaattataaaatgtagacagaatgtgattgtgcattttgtgcatacaccaacagaagagggtgctaagaagcctgtggaccaacatgctaagtgtggctcttttgatggtggtattatgggattttaaaaatcctcttggttttgtatagattctgaccttcctgtaatgagtgtgaataaatatgtgtttctttataaatgtaaaaataactttatcttcccagttctcataattgaaaatgttggaacaaatggtcctgggacagatctttcctttgagaagggcagaggaggggattcagctgggtttctgttgcatttctagtaacacacagttgtgaaaggccagtgttggccattccccaggacagactggggtagaggaggtcaggatttaattacttgagggaccagggaatggacgtggccacagtccttcctgactcgctgttttcccttccacagtccctgtcttctcctcactgatgcacatagatgcctgaccagaggagagatttagttttcatccgaggattatttgttatgttgcagttctgaaattcccataatgtttaaactagaacacaagtgatttcattatctctaatgtgtacggcttgatagaaatatattccattatgtatcaccttaaatccagataaaacataaggaatttctattccatgtttgtatgatcagtgctaataatataaaaagtctaaaaaatagctatttcctatattacagtatgaaataaatatgctgaatgatttgttttggggggtggaaaggtgtaagactgaggagggtgcctgtggggaacagtgataggaatcctttcttaagggttgggttttacatatgtcttttaaaatagatgatatcattaataaattatctgtgggcatcatgaaaaaagtggataatgtacaacttttatgagcttgacagttggtgaaacgcttttctgtttaaaattttatttgaccctccccaaaagaaatgtttattcatgagtattagggtagttccagtagtaatgcctcaaaagaaccaggaggtatagtgttgtctaaaatgtggactcaggagccagactgcctggctgtgcaactagccttgtcacttcctagatatgtggcaagttaattaactcctcagtgttcttatctgtagaatggggataatcata

SEQ ID NO: 1887005 - DNA, 4001 bp, Homo sapiens
atggcttacccttctcccagtccctcagggggaaggccctcccccagctcaggcacctcaaatgcccctctaacctgaagctgcactgaaccatcaggtgcccttgctttccgtttcctcccaaattttaacagcagtttaaagaagaaaagtaagcctctttgggcagtgagaggctaaggtgaagggaatgacactgaccctgggctaggatggggcctggggcgagtgagtgtcgggggcggcggggagcatttccggccctcctccccctgctttaaacctcaagttcccttcgcctcgccccgccctcccccccccacacacacacaaacacagagtctgtcgcccaggctggcgtgcactggcttcatgttgactcactgtaggctccacctcccgggttcaagcgattcttctgcctcagcctcccgagtagctaggattacaggcacacaccaccacgcctggataatttttgtatttttagtagagacgggatttcaccatgttggccaggctggtcttggacttctgacctcgtgatccacctgtctctgcctcccaaagtgctgggactacaggcgtgagccaccgccgagccaagttccctttttttgtttgtttttgacgctggtcatcagtttcctttgcttctggatgccttctgcaccttgctgttggggcatcctcaatgcccatctgcagctcagcccacaggcccgtcctgggcagggtgccggggcctcaccatgcccaatggcagcaagccctgctcctagtacccccggggcttcccgtttcttgcatcaaacagcccctttggagaatctgatgacaggtgtggaagctttcccgagaggcagccactttagagggtctgacgctccccactagagagtcggcccacagtgcagacaaaacgcagatcttcctctagagagaacagaaggctggagaggagacgcggagccggtccgtggagtccgccagcctgggaaacagctggtcgctggggaagctgcagcctccctgctcccctgccaggcgtcgggcgagagctgttctgttccctgacaagcgcgtgggccgccagtgctattcctgccacagtgtgggaaggcgctgggctaagggctgtgcttcccggagctgcttctagcctgatttccggccaagccacgcagtccctggtgcccgggaaggcgccggcctcgccgccgctccaaagcgagtggccgtctctcgccggctgtgcctccggcctgctgtgcggctgcagggagggagcagctctgcggcccaagctctgtcacctcagctctctgggccgcggctcccacgtgagaaatgaggtgcgcttgttggagagggggcccccgttgctgcccacagaattccgccccagaaacgcttgagtacgtggagcctcgggggacgggtgctccgggaaccacgcataccggcctccccagcccgtcgcagggttgcagaggcgccgagggctgggggggctgccggggctgccgggccctcgtgcaggctcctccccgcagcctcgcggccgggcctggagaccgcgtgcccggacgccgccgccagcctcgtgggccgcaaaggggcgggggcggcccctggcggcgggaggactcggccgcccgagggaccccgggccaggctccggggtcgccccggctgggtctctgcggccccacagctctgggcggggatgggggcgccggcgcctacgcgcgaggccaaccgggggaaaccgaggcagtgaatggcccaggccccgcccggttatcccggagccaggccgggagcgcccagtgtcccgcgaccgcagccgccgcagcctgaactcgtcccctcccagtaggatgcggagcgcggcccttccatcctgtccctgccaccgttgcttccccacgccgggccgccgtcgggatgggcagacggcgcggccggtacccgaggcctgcgagcgcgaggcccgcggggcgctgcggagccgggagcgcggagccggggcgggggacagacaaaggcggggacggcggcgaggggaagacaaagcgcggaggggggtcggcggcggcgccggggccccgaaggcggctccgggcgcggcggagccaatgggcgggcgcggggcgggggccggcgggggcggtgcagcgataaggcggtggcggcggcggtggctcggggaccactggtagcggcagcagctcgcgcccgcgccctcctcgtacccgtgcgcccccggagaccgatcccgccccgcggcccaggccgggcctggtgagagccgcggggggaggggccgcgtccggctccggaaccgggagaggcgccgaggggtgtggggtgagggccgcccgtggggtcccggcgagtctgcgagccgctctcgcccggggcgcacaggctcgagtcctcgtttcagggccggcccccggctgggcggagccgagacccgctggcggggctcgcggcgtcggggtctggggtccggtcctcgcggggccaggtcgggggccgaggggcggggcgggcggggacctcgggcgctgtccaggggctgcgcagcctaggcctggacgcccgggcgcggcgcagggcagcgagggccggggtcaggtcggggcagcggcttctcatcgcggccccgccggccccgacctcccctcaccccaagcggtcccagcccgcgggacgcacacggcggctgcgcgggagcccccggcccctccgctcccgctaactttgttcttccgagggacggtgccactcgggaccccggcccctggggagcaggggtgggggaggtgggtgaggggcggaagtggcaagaccaagagcaacaggaaatgacttagggaaagtcccaaccgcaatccccccagcccctgcctgtcaacaccccccaccctgcaggctggggccgggctggcggggccctcccgactgacttccccttgcagaacccagcgggtgccgcttctccacccgaggcttccacctccaacgagccatgttccaggctgcaggagccgcccaggccaccccctctcatgtaagtgcccggctgggtgggagggccccccggacaggagcctggcctggggtgaaggggagaggcatcagagtttgccggccccctttgtgccctgcggcgcgcccctgggccttgggctgatggctgcagccctgatccagggcctcccggagctgcccctgccctgaccgcccctctccctcaggacgccaaaggcggcggcagcagcacggtgcagcgctccaaggtaggggcctggggccgggtgtgcgggaggaggggtgtgagggagcgggatgagcactggggcagcacctggctgagcttcccgcacagtccttcagcctgcgggcccaggtgaaggagacctgcgccgcctgccagaagaccgtgtaccccatggagcggctggtggccgacaagctcattttccacaactcttgcttctgctgcaagcactgtcacaccaagctcaggtgcgcccctgccctgcccgcccccgcctcgcctgccaacccagccccgacctgacctgacctgacgccgttgtttggcttctgcagcctgggcagctacgccgcgctgcacggggagttctactgcaaaccccacttccagcagctgtttaagagcaaaggcaactacgacgaggggtttggccgcaagcagcacaaggagctctgggcccacaaggaggtggaccccggcaccaagacggcctgaggcctctgtaaccttccaccccctctgcggaaggcctggagccggcagggggaaggtgggaaggaggtcgagctgggcttgcgtgggggccaggtgggaaggggatgaggcttgctcaggcgtaggggaccagggcagggctctgctccaggactccttccttcttccttctcccgcagccggtgagggtttggaaaccaggattggggtctgc

SEQ ID NO: 1887006 - DNA, 4001 bp, Homo sapiens; identical to SEQ ID NO: 1244291

SEQ ID NO: 1887007 - DNA, 4001 bp, Homo sapiens
ggaggaggagctgtagtcatcagggctgtagacggttcaacctttgtaatggattctggagtgatggtaagccccagatccaaaggttgaactgtgactctgggtgatgttggatgctgagcttgatcctggcctcgtgttggcatggacgtctcataatacacaggaggttgagctacaacctccttacgtagctctggaggctgagttggggtcttctgcatggttggaaaaggttcaacctccatagtggattctggagttaaggtaagttccagatccaaaggttgaactgtgacttgagtcaggttcgaatggagagtctgaacctggtctggatgtggaagtgtcactttagggtgcttgggaggaatcttcttcaggggtgtagaatgttcaacctctgtagtgggttctggagtgatggtaagtcccaggtccaaaggttgagctgtaacgctgggtgacattggatgctgagcttgatcctgacctggtgttggaactgttaccccttgatatgctggaggttggggtacaacttccttaggaggctaagttggggtctcctgaatggttggagaaagttcaacctctgtcatggattctggagtgatggtaagccccaggcccaaaggctgaactgtgacactggacagtgttgaatgctgagcttgatcctgacctggtgttggaattgtcacctcataatgagctggaggttgagctgcaacctctgtaggtgtctctggaagctgagttgagttcttcatggttggaggaaaaaaacatggttgcggagttgtggtaagttccaggtgcaaaggttgaactatgacctgttaggtttgtgtgctgagcctgaacctggtcaggaggtggaagcatcacctcagggtgttttggaggagctgtagtcttccttggggttgtagaatactcagcctccatagtggattttggagtgacggtaagtcccaggtctaaaggttgaaatgtgacactgggtgatactggaatctgggcttggtcctggcctgctattggaattgtcatctcatgcactggaggttgagctgcaacctccttaggtgactctggatgctgagctgggaccagctgctggcttgaaggttctacctccatagggggctctggagtctgaactgtggcctcctgctggattggagaaggttctgcctccatagggggctctggagtctgagctggaaccccctgctgagttaagagatggttccacttcctgagggagctctggaggtgaagatggggccatctgctgggtccgagagggttctatgaccacaggggcctctgaggactgagcagggcctgcctgctgaactggagaggattctacctctttaggtggctctaaaagctgagttggggtctgctgtaggactggagatggtttgaccttctcaggtggctctgatggctgagctggtatctcctgctgtggtggaggactgacctcttcagtggactttggaggctgacctgaggcttgctgctgggttgcagatggttcaacctccttagggggctctggtggctcagctgggaactcttgctggactggagaaggttctacctccttagggggatctggagtctgaggttgggcctcttgctgggctggagaagactcagcctcctcaggggtctgtggatgctcagctgcagcttcctgctgggttggagaggggttctcattattaacaggttctggagattgaactgaagtctcctgttgacctgctaaaggtccagcatcttctgatgactctggacgcagaggtgcaccaccatgctgggtggcagaaggttctacatcacttcctggccctgagacctgagctgtagcctcctggtggattggagaacttcccacctctgcagtaggctctgttgctatagtgagctgcatgtctggaggcctaatagtgacattgggcaaatctgaatgctgagcttgacagtgacctggaggtgaaactgtcacttcatgatgttctggaggctgagctggggccttctgctgggctggagaagattcagccttcccagaagaaatagaaggctgagctggctgctcctgctcaccgggggaacgttcaggttccacaggaggacctggaggctcagtcggggcctcctcctggctcgcagaaggttccactcctctggaggctgagctggggcctcctgctgggctttggaagattcagtctccttggtaggctctgaagttatggtaacctccacatccacaggtttaactgtaacgttggacaagtcaaaaggaacttcatcctcacctggagggtgaatggtcacctcatgattcagtggagtttgagctccactctccatagaagactctggaagttgagttggagcctcttgctgggcctcagaatgttcaacctcccaggaaacacagaaggctgagctggctgctcctgctcactgggggaaggtgcacactccataggaggacctggaggctcagctggggcctcctcctgggttgcagaagcttccacctcctctggaggctgggttgggatctcctgctgggatggagaagattctgcctccttggtaggttctgaaattatggtaatctccacatccgcaggtttcactgtaacgctgtaatgctgggcaagttataatgagcttgatcctcacctggagggtgaactgtcacctcatgctttgatggagtttgagctgcactctctgtagaggactctggaggctgagctggggccttctgctgggtctcagaaggttcaacccccccaccccccacaggaaactcagaaggctgagctggctgctcctgctcactgggggaaagttcagcctccacaagaggacctggaggctcagctggggtcccttgctggttgcagagggtttcgtctcctcagggcgctctggtgtctgagctggggcctctaattgggttgaggaagagcccacctctttggcgcgctctggaggctgagcagaggcctgttcctggcttgacataagttccttctggctctggagttagcgcaagctccacatccacaggtttgactgtgacactgcgcaagtgtgagtgctgagcttcactccaacttttcaatggaacatttacctcatgatgtatcaatggcagagctacaatctcttcagaggcaggtagttgctgtgctggggcctcctgctctgttgaagaagagtggaccccctcaaggcagagctggggcctcctgctgggttgaagaaggttctgcctcttcagtgagctgtggaagctgctctggggcttcttcctggaatgaagaggactagatctcttcaagggtctctggattttgagtttcaggctctacatggaattgagaaagtccaactctctcagggggccctggaggctcatctgagttcatctggagttctggaggcaggctgctgcgatacactgtatccatacttgaatctaaatactcatcctgcaaagtttgtttctgacactgaggttttgatacaaataggtgtggagttccacacaacaaccttagcaagcttcagatacttagctagatctttgttcaggttcttgggcgaaacagtaaacttggttgcttttgaattctatcttatttattttattttgttttttaatttattttatatttatttatttatttttttttttttgagatggaatctcgctttgtcacccaggctggagtgcagtggcacgatctcggctcactgcaacctccacctcccgggttcaagcgattctcctgcctcagcctcccgagtaactgcaggcgcgtgccaccaagtcctgctaattttttgtatttttagtagagacggagtttcaccgtgttatccaggatggtctcttatctcctgacctcgtgatccgcccgcctcagcctcccaaagtactgggattatgt

SEQ ID NO: 1887008 - DNA, 4001 bp, Homo sapiens
ggcctgtttgcgagcatcagtctactcagataacttttctttctgaactttggactctttttgaccttgggtgttctgtgggtcatgcggagcgagttttgtgaaagcggtatttttttctggaatgtgaaattggtttagaagccttcatatttgtaactctagcctttgcactttctaaaatggaaatagtgtgtgttgtctttcaatctgtctctcatctgtggtagggcttttgcagggctggaggtagaaggcgcgcccttggagaagggtgtcagcacagagactgctgccttatgctcttggctgaacgaaggcttggtgtagatggcgtttcccgctaacttctcaggcccctgctgtgtgtgaggctgttccagctcccttggggctggactcccgagccttttttcttcggcagcgttctccacagatgcctgggcaccctgttccctcctgatgctctgccttcccacctctttgaagtgccttttctggatgctcattgggcccatgaggactctattcactttttgccggttttggcctacagtttgaatctttgccaggctgtttcctgtggttggcagtttaatgaacggtagtaacattgattccacatctaggtttactgctgagaaatatggcaaatgtaacttagtgcactgataacatcactctcgtcattggtgtctagctgctcactcccaaagcctgacaagttgatgccactgctgtctgagggctcctccggctcaacagtcagctcagtgcttgtgtaattcttccgggcttgtaacatcttcatgaatgctccttctggattccctacagattcttcttcagctgtcaaaaaagagactgctttgctcgtgaaagatgatgggatgggatgcatcagtccatagctgtacaccccagtcacgcagagtaggagtcagcaaacatttgagtgccattcagagaggagacacacacacccaatcctaaacctatgaaatggcaacaacaaaaggagaaaatatatcttttgaaaacacggccatctacttggaacattccatagtgtgacatagagtaactctgcttaggattatttcattgatccccagggtccaattgcccagtgctcagtcaaagcccaaggtggaagacaagtgcttccctgatgagctgatgagctggcctctctgcagactgctccataccctgtgctgtcctgcctcagatgcagagagagcacaaggctcccgctctcctcgtcctcggtgcgcctgtgttcttgctaccatcacagctgaatgcaatgaaaggcggtcctctgagaggagcagggtggagatgctaaagtggaggccccctcccattgctgatagatcctcatctggcatgcgctccaccctccccattctctgctcccacatatcgtagccccatcacagaagatgcgacatggaaaaaagcactgtgtccaccctagttcttaaatttgggcagggatttggggtgtatgttaagagtttttcaaatttgccagattgtatgcctatgttgttaaatacacagtgaatctctggtatgatagcagtttctggataaacattacttgaggtcctaaaatgcagaagggaaaaagcaacttttgtcagatgcctactttgctttcatttcatctctaatattttggatggggaatcagccaaggcttctgactgcaggaaggtcaagtgtgccagtgtgcagctgggtttcttttccagaattaaaagcattttgggtggtggtgagggtcagaggaagaagtaaagattgtgagaaagtggaagaagcatgggcttggggagaacccagaattggggccagaagacctggcactaggctacagcacttagcacctctgatcttgtttttcttcatctgtaaaaggaggttaacaaagcttttctgcccacttcttggggagaagggaataatataattggtaaaaaaaaaaaaaagttttgaaaaataagcaacactgactttatgtaaccaagcattattaattctccaccccatatcactggtagatacctgtattcaagctatctggacatgaaagcagtcacattttagaagtcatgaagttgatgctaataaacctaatctacagaaacactcttgaaagcccttgagcgtttgttctgtgaacagaaaggtttgagattcagagcaagttcagagttggatggtctaagaatggaaaagacctccattctattagaagagtcaggtagcaatttctggttatggaaccagaagctctcaggcttcaaataaaacagcatcacttgtactctcataaaactgtaaaaacagaaaaaccgaaaccgtatctacatctgtcctataaggcagagagtacttgagacctcatgaatttaaaaccaccttacaaactacattgcactatatgaagaaattatcactgtgggcaaagcatcaagcagagagcacagtacacagtgtgtggatgttaatgttattctctagccttcccattcctttgtcttggtcctttgtgcatatggaacagttctattattaaattttgtaatagtaactgagaacctgactctcagcaagggagtagttcagaaattgagggagtttaactctgaatgagtaaataaaaataaagcaattatgtcattagcttaaaattttatcatcattaaaaataaaaagtttaaaaacaaatacttaatgtaacaatttatcaccgcgcaatttggactcacgacaatgtatggtgtttgtcagacatgcactgttgcaatgcagcttgactgtcttgcagacagcctcaatgctgtttttaagttggcagaggcagcaggccatatggctaggtaagatcctatagatgaaaacagagagcaataaattagcggtaaagcggttacttgagtaggtaaaggaggcagccaacgctaccacaggtgtgggaaaaaggtgtcattgaagcctatggactggacagttgggtaggaaccagaaggccaataggaaggagggcaaaggtgcccaactgaagggtaagcatggcagtgagtatggtatgcctagaataaagatggttgggattagaattgggtgacagtgattagtagtttaattcagaagtatctcttcccaactcaaaagtctcactttgggctgaaagtacagaggaagaaggtagacttttaagaagtctgaataagcccccaacttctggagtccctttctcaattcctgttgggagtgggaaatattataaattactctgggcattaaaaatagcttagtttaacctcgattgtggagttaaaaaataacaaagattgcattggtcaaatctggacaatttgagcattcaaaagaataacaacaataagttacaacatatttaatataaagaagaatccacgaagagtgatatagaaaaagaaagagggggagttcttcttcaatgaaataatgccagctagtaaatgtagaaggaatgacagaatttttaaaagtgtcactttgcaaccatcagtgtaatacaaattcattcagacaaggattatcactgatgcacatttgggtgaaaagacatttgagaacaggatcttcactgaactcaaagtaacaacccacagattatttattaattaccaagcggaaaattattattttttatttttattttgtcacccaggctgaaatacagtggcaaaattatacctcattgcagcctcaacccccctgggctcaagggatcctccaaattcagtcccccgagtagctgggagtataggcttgcaccaccatgcccagctaattttttttttttttttgtacttttgtattttcagtagtgacagggtttccccatgttgctcaggctggtgtagaactcctgggctcaagcaatcctcccacctcagccttccaaagtgctgggattacaagtgggagccactgtaccc

SEQ ID NO: 1887009 - DNA, 4001 bp, Homo sapiens
catcggggctgtagaagggcagagcttgatcttggcttggtgttggaatgggtatctgataataatacacaggcggttgagctacaaactccttaggtagctctggaggccgagttggggtcttctgcatggttggagaaggctcaacctccatagaggattcaacctccatagagttaaggtaagtttcagacccaaaggttgaactgtgacttgaatcaggtttgaatgtagagtctgaacctggtgtggatgtggaagtgtcatctcagggtgctttggaggaactgtagtctttttcaggggtgtagaatgttcaacctctgtagtgggttctggagttatggtaagtccaccaggtccagaggttgaactgtaacgctaggtgacattggatgctgagcttgatcctgacccggtgttggaacactcacctcttgatatactggaggttggggtacaaattccttaggaggctgagttggggtctcctgcatggttggagaaagttcaatttctgtagtggattctggagtgatgataaaccccaggtccaaaggttgaagtgtgacactggccagtgttgaaagctgagcttgatcctgaccttgtgttggaattgtcacctcataacgaggtggaagttgagctacaacctccgtaggtggttctggaagttgatttgagttctccatggttggaggaaatatattctctgcagtaggttgtggagttgtggtaagtttcagatccaaagtttaaactgtgacctcagttaggtttgtgtgctgagcctgcacatggtctggagttgcaagagtcacttcagggtgttttggaggaactgcagtttttctcagggttgtcgaatgctcagcctcctttgtggatactggagttatagtaagccctaggtctaaaggttgaaatgtgacactgggtgacactggatactgagcctggtcctgccttgctgttgaaattatcatctcataatgcattggatgttgagctgcaacccgcttaggtggctctggaagctgacctgggaccatctgctggcttgaaagttctatattcttggggggctctgaagcctgaactgtggcctcctgctggtttggagaaggctctgcctccatagggggtatggagtctgagctggaaagttttgctgagttagagagggttccacttcctgagggagctctggaggcaaagatgggctatctgctggactggagagggttctaccacaatagagggctctgaagactgagcagggactgcctgctggactggagagcattctacctttttaagtggctctaaaagctgagttggggcctgctgtaggactggagatagttcaaccttctcaggtggctctgatggctgagctggtatctcctgctttggtggaggattgacctcttttgtggacttcagaggatgacctgaggcttcctgctgggttgcagatggttcaacctccttagcaggctctgttggctcagctggaaactcttgctggactggagaaggttctacctccttagggggatttggagtctgagctgtagcctcttgctgggctgaagattcactctcttcaggagactccagaggtagggaaggggaatcaggctgggctagagaaaagtcagcctgctcactggaaataggagggttgtcctgctggactggagaaggttcaacctctatagtgactgctgtaggtatggtaaactctatatccacatttttaactgtgattttaggcaaagttgaattatttctgaatattgaagacagatcttcaggtgaaaaattccatctcatcattcaatggacttacaatgtctgaggagagctgagctggagaccaagttgtgggcttttgagcaagtggagaaagttcatcattttcaggggtagttaactgctgaatgataatctcttgtgcatctttcaaatggttaaacttctcaggggacattaaggactgagcttgatggtgagctggaggtgaaactgttacctcataatgttttcaaggctgagctggaatctcctgctgggctggagaaaattcaacctcccaggagactcagaaggctgagctggctgctcatgctcaccgggaaaaggatcagtctccacaggagaacatggaggctcagttggggccttctcttgggttgtggaagtttccacctcctctggaggctaggttggggcctcctgctggactggagaagattcattatccttggctctcaagttatgctaatctctacatccacaggcttaactgtaatgcttggcaaggtataatgagctccatcctcaccctgacgttaaattgtcacccatgattcggtggagtttgagctgcactctccatagaagactctggaggctgaactggggtcttctgctgggtctgagaaggttcaacctccccaggaaactcagaaggctgagctggctgctgctgcttactggaggaaggttcagctgccacaggaggacctggaggctcagccggagtcccttggtgggttgctgcagatttaatctcctcagggtgctctggtatctgagctggggcctctaattgggttgaggaagagtccacctccttgggtttctctggaggctgagctgtgggtcgttctactcaatttcgaccatacctgtaaccatgcctttgcctagaccgtactcctatttttttcttatttaacaaattatagctaatttttaagccccaggtaaagtgttagtttactgatgcagcttcccctgacctccataattcaaggatcacagattctggtgaattctagcactgatggtctgcattatgttttagtactttattatttacacctccatttttatgcttattctttttcttctatcattttcatgttccagagacagtgtcatacttgtccctgggttggacacaaaacgggtgctacatatagaaagtcagggacaaagatgagttctgaacataactaaagagctaagtaatcatgttaacagccaccactcttacatatactaggcactgatgcaagtattacaggtattcactcacctaaatttcacaacaatcctatgaaatggtaactagaataatccccagtttaaagatgaggaaattgagtcacagagaaaaataacttgttcagggtaaccaagctaacaaatgacagacctgggttcaaacccagtaacctggcttcagaatcaactcttaaccacctagagcactatcactgagatggagagacagactgctgtaaagaggatgaagtgcaaataggaggacagcagcagtgaagcaaatgatgtgatggggctaaagaaaaatggataagaaaaggattaagagcaatcacaagtaaaagaccagggaaggggcctaacagtaaaggagaatgaggagaaggaagaaatgacaggcaaaggcagaagcagaaagtcagttgtccatgtggtttggtgagataaagaaggcccaggaaggcctccaggaaaaagctgctatatcaggcaggacacagagaacaattgaggaaaggtgattcttacaagatggtgaagatgccattgtaggtgctaggctctggcacaggcacttggcggagcctctgctttgggctgatgtcaatacatgacagcgtctcatctccgcaggtacagagatcacatatgttggtgcttgtggaggccttctgttcctcttgtgcagttaaagccttattttgggtgtaactttcagactgaaccaatgaatcctgagtaggttctagttgaaaggtggacctctgacttcagtcaggttttgaagctgagtctgaacctggtctggacgtgaagctgcagtcttgtccagggctgtagaatgttcaatgtctgtatggggtctagagttatggcaagccccaggtctggaggctgagttgaggtctcctctgtggttg

SEQ ID NO: 1887010 - DNA, 4001 bp, Homo sapiens
tgactggccatgtcttctctgccactgtgcagcctgctgaatggcagcctccttgcccattacatcattccaggcttcgctttcatgggtcaccttctccctcccaacacaatgccagaatccaccccaggaggatagggaccgggaaccaaactgtggcaccatgagtggagaccctggaggcagacatgggtgtaggcacagagtggaaacatgctaggcctggccagtgggtgacaagcacagaggatggggacattcaagggcagacacgggctgcaggcacaggagagaagacctgggctacaatcacaggggatccagacaaaaagggagctcgctggctacagctgcatggcagagaggcacaccagggacagacacgggtaaaggtgcaggatagaggagtaggtgaaggttggcgtgggcagggggcacagagataaagatacccgaaggtagatgtggctgtaggctgaagggtggagtcacaagagtcctaatgtgggctgcatggacaagggctggagacacaggaagacaggcatgggaagcaggcacactcaatgacacgcctctgctgcagtaacaacagacggagatactcaacgaaatagactggctgcacgtacaaacactggggataggagttttgggcatagtctcccgggagaaatgatccagaaaaaggacagaaatgggctgaaggcacaggggaaggagacacacgagtgcagacatggcccaaaaagcatggatgaaaacactgactgtggacacggattagggggacagagaatgtagcaaacataagctggcatgggcagaagctcaggggacagacggacaaaaacatcagaatgggctgcaaacacagggattgaggcactggaggactgctactgcctgaaggctaaggagatggcaacattcaaggcaagcaatgtgctgcaagcacacaggatggagactcacacggctggcacgggctgcaggaccaagaaatggagacttctgacagggggcataaagtgcaggcagaggacagaccaggtgacaatacacaagggcagacgtgggcttcagtcattacgggatggtgatactggagagaagatacaggcttcaggcacaaggatggagacacacgcgtggctgacactaagtacgtaagtatttaagtacgtaagtacgtaagtacataactacatgtacataagtacatgaaaaacccaccacaatccaaaaatgatggctatgaatatgtgaattaagccaggtaacacgatacaaaatcaatctataaaatcaattagcttcttatttaccagcaagaaagaaatgtgaaatataattaaggtacaatgaccagactaagaaacaactatctgcactacaaatgaccccataaaggattaatttatagaatacctttttaaattcttcaaatcaacgtaagaatacaaatgacccaacagaaaagccagcactgaaaatgaagacaaagacgcaaaggccaataaatattcacaaaacgtcacttcactaacatttccagttccagatgacaggaggccctcagggactcaggaggcaggagcacggggaggtgacagcgccagcagcaggagggcaggcctctgccttggcacgagcggggccacagctcctggcgggctgcgggggccgggaagcccgagcagcctggcgctcctggcccctgcacacgcttccctccctccaccccgttcctccctctctctgtgccttgggccccgtgggatgcgctcacatccagactcaccaggcccgagacgttgggagaatggagaagcgcttgcgagccaaaagtcctccaggagcacctgaaggaagcttcgcctgcacctgggacacccttccctgatgctggcctcaaggcaggcgcgccgcacacgcttccggtccatgacgaccacagctcagaagagcacgcgaacccagcctccacaaagagaaaatggcggaatgggccttcgcctcccttttataacggctgtactcaaccgctgtatcttggaagctttgttttgattgggtgagaaggaacttttttcgacaactcttattggataatagtctcctgctctgactggataatcttaactaatcagagttggagacttatccaatctgtgttgtagtacagagtctgctctcatcctatcagaaagaggcttccagggtatgtcatttgaatacagacattataaaagggaggcaaagatctgcacctgccgtggaggttgggctcatgtgctcctctgcattggagttagccaaggagcgtgtgcagaacacttgcctcataggccagccgtagagaaggatgtcccaggtgcaggcgaagttttgttcatgtgttcctggaggatttttcccgtggcaagcgcttctccatcctccagcatctcaggcctggtgagtctggatgtgaccgcttcctatggggaccccaggcacagaaagatgcaaaggagggtggatggaaggggaacatgggcagggcccagagagcatcagattgtccgtttcaccaggcacccctgctccggtgcaagggagaggccggccaggcccctactcagtgcccctcctgggctctggccctggcacctagacccatcccaccattctccgcagctccactgccccgcaggcaggagctgccggcgtggaacctgcgggctgcagtgagcagtggaggcagtagccgctgctccctggattaccgggatgtttttctttggcttttttctttttctattttattttagattcagaaggtacacgtgcttgtttgttatatgtatatcacatgcacaatgggggggttgagcttctagcatacccatcacccaaatattggaggttgtacccagtaggtacgttttcaactttcccccccaaattttgagtccccagagtgtattctctccatcttcatgtccatgtgtacccattgttctcacttaatacatgagaacatgcaatatttggctgtttctgcattaattcgcttaggataatgaccttcagctgcatctgtgttgctgcaaaggacttgattttgttcttttttatgactgcctagtactttgtggtgtatatgtaccacattttctttatttaatgaaccgctggtggatacttaccttggttccatgaccttgctgttgtaagttatgctgcgataaacatgggagtgcagtgcctttttatataatgatttctttccctttgggtagatacccagtagtgggattgctgggtcgaaaggtagttgtacttttagttctttgagatacctccctactttttccatagaagttgaactaattgacacctaccgccgcttgctgggggttgaggacgcccagtgagtgtgcacccgggtacctgctggggcggcctggggacccgcttcacccagggagaagttggtgtctgagcaccagcgaagttcaggaggtgtgaatgtgggaacctgtgggggtttgcaggaggtgaaactgaccatgcaggctggagtctgactgaggagccttgaatgccaagttaaagcgtctggactagatcacgtaggcaatggggagccatggagggatttggagctgaagaggggaatgaacatcaagatattttagaacattcactctggctgcagagggagaaatggatcagaggggtcagggtggggccagagagatgcgtcagggggctggagtagggagtctggccagagaagtcctgcggggtggagggggggtggggcagcaggggaaggaaggtggtgcacgcagaagagaggttatagctcaaaacagcaggactggatgcctggatctcagggtaagcgtggctcacagtcaggactcagtaagtgtcgggtgaacacatatgaaggagtgggcattgatggccctgggtttctggttccgacgactgtgtgagtggtgata

SEQ ID NO: 1887011 - DNA, 4001 bp, Homo sapiens
ttacaaatttaagtccatcctaacaaaagccccttaagacctaattagaggtaatttttctaagtttttgtaaattattgaggactacaaatcttaattagcttctcagtaggttgtaattttttttttttttttgagatggagtctcgctgttgcccaggctggagtgcagtggcacgatttcgactcactacaacctccgcctcccgggttcaagcgattctcctggctcagcccccaaagtagctgggattacaagtacacgccaccacacccggctaatttttgtatttttggtagagatggggtttcaccatgtcggccagccaggctggtcttgaactcctgacctcaggtgatccacccaccttagcctcccaaagtgctgggattacaggccactgtgcccagcctcaggggagttgtaatctccatttcagtcatatcaatttaaacttcacaaagctaagattacttttccttttcacatctgaggaaaactacatctcagcagacaggtaatttgcccgagactaaacagccaagaggtaaatagagtagcccctctttctaggtaatccaccctggctccactgccaccggaaactaaaatcagtatctctgggataggctacactgttacaaggtattaggttaaccaaatccaattgccaatattcgacctgacagctaggcgtggtcagccactagcctccccatagagcaaggcttacctcatggcaggctcctggctccaatactcagctgccaaacatgatgctgattcttcacgaatttgcaacctaggtgaatatagcaattaggtcaccgttcaaacaagtttactcctgggaaccagcaagtggtgaagacttgactgcaatcagacaggagtagtcttcgtcagttatcgcttctgacggcacttcctattagtgatttcatcagagcagtcaagcacctcacaaccctccagtactgttccaaccgcagatctagaccctacctgaaacttaagctaaccctgctactggagacatttcttaacgaaggagtttgtttctgcattatcagtttgctttaaatgcagttctaggttaggactgtggctgaagcagccatctccagtttctatttaagttccaccctatgcaatgacatgataacgttaccctaaagtgtataaaacacctaaacgtagaaaactgtcaaaacgccaatttccgtgcattcaagtgacaaaactacgttccatgttaaaccctacaccagagagcctctcacctcgtggctaccccgtcttcagcactctgcagtgggtacgcaatcttaaagagggagtaaggacaggaattcagggcagggctctggcagttacggtcaactaagttgtagaggtttcagcgactgcggtcagatagacattagacgtcgtcagttatcgcttctgacggcacttcctattacaagtatcatcaggacagtcgaataagtcttccagtaatactgttacaatcttaccgacgtacaccgccctcggggtaccccaaactgcaagccgaccccaacttacccagttctctcgggtttgcacacccccactgtgggccggggaaccgggtcccggccttcgcagactccaggctctggcagatgtggccctaccacaaaagagtgatccatgagcctcagccacggcagccggattcggccccgcgctgccctgccaggctgtccaataccgggccgcagcgcccgccgcgaaagccacgcgggcgcaggagccggggagccacgccatctcaacagctgccctccgccctctagacaggcttcccgggaacatctccccagagaccacagaagctcgagctctttatttgctcttgccccccagctactactcccagattcctagagagcctacctccataacaacgggaatgaaaaggtcacaccttatgtgcgccaggcccttaaggagtcggaatatcccaatcctcacaaaaggagggggacgctggcaaagactcatgggaactttccgccaagtaacgatttagaccggcgcgctacccaggactccccctcctgttgagtctatggtctcttccacagccccgggaattctgggtcacaacacgcgcggggagttccagggcgcctgcgcgagggctggatcgcgcgtttgggccccacctccgccactccttagctgggtggtcttgggccaattactcattctctttaagcttccgattggtcctctagtaaacggagacaccagcgccccagaagatcacgtgagatgacacacgtgaaagcctgtagagctgtggcacaaggcagccattcatcctagtagctcctcctgaatctattgagcgttgccaaatactctccccacagctatttcaccacatccacggggcttctcaaacccctgcgcactggtcaccctcattactcctttagcacgacctttagggaacgagctgacgtcttatctagatccacgtccatcctctgctcgcctctggggtaaagctctgcccacctcctttcctctcctcattccttggggcctcctccacctatgcccctgcctcaccttccatggaaaactctctctactgtggctttcctttcagcctatgaacatgctcagctctctccttgaaaaagaatccatgcaaccacgttttgcacacacacgttataccaagggaaagaaattcattttgactgcaaaaaactgggaagacaatcataagaccttttgagctggcctcagaaataagtgtagggtttttgttgttgttgttgttgttgctcgtttttgtgtttttttgagacggaatttcgctcctgttgcccaggctggactgcaatggcgcgatctccgctcaccgcaacctctgcctcccgggttcaagcgattcttctgcctcagcctcccgagtagctgggattacaggcatgcgccaccacgcccggctaattttgtatttttagtagagacggggtttctccatgttggtcaggctggtttcgaactcctgaactcaggtgatccgcccgcctgggcctcccagagtgctgggattacaggcgcccggcaagtgtagggttttattttattattatactttaagttctagggtacatgtgcacaacgtgcaggtttgttacatatgtatacatgtgccatgttggtatgctgcacccattaactcatcatttacattaggtatatctcctaatgctatccctccccccacccccaagtgtagggttttaatggaggaggggggcttccagcaagagccaggtcaagggatcaagcacgaggtctctcggcctgcatgaatttggggagagtgctaaggagggaggggcaacagaggtggaggggaggaggtgtctggaactgcttgggcaaaaccgtgggggtctcgggatgtcagctagggcattctgtgggtactggggagcctctcaggccttcagagcacaaagaggacatgtttgtcttatgtcttaggaaggccctctggctgccctgcagagaatggcttgggaggggtgggaattgagcaagaagctcggtaggaagagaaagcaagagaggtggctttaatgggttttcccaggtacctgcccaaaagcagggtgggtgtggaaagcaaagggtgtcgtggtggagagagaggagaggtggctgtttgcccatgtccatcaccatatatctgccacaacaatgggcacagcacctcagccagctgcctgtacccaggaagaggacagtccccagacttggggatgtgggggtgagggtggggacacagcaactgagggtctctgtgcccaggcaagggcaggagcaacctagtcccatacacagacctgtgcacacagagacatgcagacattgccagctctaagggtcccagcaactctgcccaaataatgtttccagaagagttagttagtgaaaatat

SEQ ID NO: 1887012 - DNA, 4001 bp, Homo sapiens
gcgggaggaggcatccagctgtgacgggaagtgagctcctggaggtgcagagaagtccaaacagggagccaggcctcaaggccgcacttaaagccggtcgtggagatgagtgtgcggagtgagagggatgcttggaaacctgtgggcctctctcgcagtatccctctcagtacagtagcctttcgcggttctggtggcctcatggtttggcccaagcatggctgcaccactgtgtccagggacaagtgtcctgggctctccgtggggagctggccaggagccgctggggaggtgaggagatcttcgtgcagagccagtgccagccctcactgaccacggaacaccttcagctctctaggaggacagggagacaggtcctaggggtttggcttgggctgtttccacgtggcacctcccctccctcgatactctttctacaagccaccgtatgctactctgcaggtgcctgggaccccacccaccccaagaagattctggggtgaggggcagcaaaggagcctgggcagctccctgagtgtcctccccagcccgtcctgcccatctctatgacagtgcccagggaggggaggactgaggctccttcccaggagaagacagcaccgcagtgaggacgattcataaatccgttccaaattcgcgcggaggtgcaaatgagagcgggctcgaccctgtgaggaggagttggggtgtgggagtgagtggggacagcctggtgagcgtctgcccgcggggtgggggctgccagccccagggccaatcacccctggctcctgacggcaccgtggctccagctcccgctgtgtggcacggagggcgggtcctgaggagactcgggggcccgccaggtccccgctgtgtggacctagccctcaccgcccagcaatgcacgacttcaccctcccgcggagcaggatgcccagcggctcagggcgccctcccctcgccagcccagtgtggtgtggtaggatgaggacgcgagcagggaggagaggcaggagacggagctgcactcctggcctcagggccccgtgtgctgttttgtacactaaggttgaggcctcggaagccacgccaggaccatatcatgcccctagagcctgtgagactcgggctgtgtccagagcagggggagcaggtccccgacgactaaggacaccaccgtaagaaccacacgcagccccacagcgcacacggcgacaacgtgctgtggggctcggaggagttcctggggtctggcagggacaggcggagggacgcttctgagccttacacctcacggcttcgggactttggggccggcctgttcatggacggagcccaggaggaccccacagcccgtccccgccccttcctccccgctcacctgctggcggggcggccacccttcccctcccaggattcacagctgcgaagggaagagggtggaggagaaagtccagacacgggatcccccgtttatcttcctcccgagtcctcgccccctaccgctgggcatctccaacaagcagcgaagtctcccccgggcggagctctgggtacacgtggcgcaggaagggcctgggcagctcggggtctgctgcgcgggcggggatcgcccctcgctgctgggagctgccaggccgtccccgccccgcgccgctccgggacccccgagttggaatcgcggggccccggcggcgccgtcctgacgcaagagcgcctctgcctggcagggcccaggccggcactcgagggggcgcacgcagagcctgccctaggctgagcactcgagctggaaaacgccgccggcgtccgcgagcttggacaggggccctggacggcgggcgcaggagccaggcgaggcaggctccggctgcaggacgccgggggctgggggtggagacctggcgctttggccgtgcgcccaggcccgcccgtgagaccccgccaggcgctagagcagccagtgttgccagggacgacggcgcgcgggttgcgcatgcgcagtttgccctcccgccgccgcgccttcccctttaagcgccggccggccgcgtcgccgcttcatgaatggagcccacgtgaccaaacatcatgtgacgtctgtggagcggcggcggcggcggcggatcccgagcctggtccggcccggccttcccagtgcgctcggcccggcccgcgcaggcggcgagtcctccgagccccgggcccggacccctcgcgccggtccctgccccgcgcggcctcggagcgcgcgcggccccgccccgccccggcctcggcccgccgggcccgcagtgtggtgagtgcggctgcggcggcgggcccgggcggtgggggcggcgcggcgggggcggcgggggccgagggggcgcgcaggcagggctcctcccggagctaggcgggcggttgggggcccggcggcgggggccgctggtttcgggtctgccgcgcaccctgctggcggcccgtgcctcgatttccccagcggtcaggagccagctcctcctgcccctggcgcccgggtactggaggtgggccgcgggcggcggcggacccgcggagccgggcgagtgcggagcggactcggagacccgggcgtcctggagggaggggcactggacggcgggaggaaagggtggggtcgagcgaggcgcccgggggtccgcgccagggcccggcggcccggcccgcagctgctgattcatccggtggccgcgtcagctctccccggcgcgggggtccgcggcgagcccgggaggaggggcggcgatgggggtgctgcggggaagaccctgcccctggctggggctcgggttccgtcagtcgcgtgccagagcccggagggagacttgctgagtcatcagcgtgaggtcactcggtgctcaagctgataccggaggggattcgagcgaggggcctcggggactaaaaggccgccagcgggaggtgggagggagccgtggggatgtgggagggggccaggcccggcgccttggggtgcctgtttaagtgagcgccgagcgatccagttgaaggcaggggtgcttgaagaggaagtgggggtggctcgctgcaggtgttctcccggggtcaaaggtgaagccccgggcggtccaccccttcccaggcggctcttttccggcagctggtcctggtcccaagtctggagcagttttccaaactgggaaatagttccctgagtgagggaggggaggagcttcggtgggccgagctagccaaaggggaagtcggctttccctgggactggcctggttggacagcccctggccagagatcgaggtcctgggagaaagaggggtgtgtgtaccaagccctgggtgacagtgggctgggcagggaggaagcaggggcagctctaccaggaaacggcaaaggggaggaagcagcccagcctctctccccagttggccctggagtctgggttgagactgtaggtggtgggagcttcagggtgcctagccttggggtgcagcagatgggctggtgtggatggcacagggtggcagaacgcagcacccagccaccctaaagttgtcgctacctgaagtggggtctcagcgttgtgtgaagttagcaaagggagtggccctgttgggtgtctggcctggcagcccaggacgcttagaaagtggcagcttgggagtgatgtggccagagccacctttccttgggtatgtggagattcacgaaggttgacttcctttgcccaggagttcatttcatggctgggttaggctactttgtggtttgccctcagggatgccccccgccccccgccacacacacacacacacacacacacacacacaggtccattctcagtgagcaccccccacacatacacacagaacacaggtccactctcagtgagccccggggcttatagattccagatgtttcaatgttttagctgaccgttggcctggagtttgatgccctgggaaaattttggggtcctggagggacatttatgtaca

SEQ ID NO: 1887013 - DNA, 4001 bp, Homo sapiens
ctcctttagttcactgcactatgccagctctggataagattagtttagggctggactgggcatggtggctcacacctgtaatcccagcactttgggaggccaaggtggacagatcgcttgaactcaggaattcaagaccagcctggacaacacggtgaaaccctgcctctacaaaaaatttaaaaaaatttagccgggcatggtggtgcacacttgtagtcgtagcttcttgggaggctgaggtaggaggatcacctgagccccgggaggtcaggactgcagtgagccatgatcatgccactgcactccagcctgggcaatagagtgggactgtcttaaaaaaaaaaaaagatcggggtatagccctctcttgaatgtctatttcagtatattacccaatccctgctcccctctattttaatcatgggcagccctccgtaatctttccaaacactttatatcttcagagtgttcttacattatctagattgatccttgttactgtgtaagtaagtagatctggcattaatcctattttatagataaatatccaccaggaggtttatatatttgcccaaattacatagttacaaagttaagttagaactcgtatttttaaacttctattctctagccttttccactacattatgacacaagaccctgcagaaagtcgtctggaaaatatcagaccatctcttacttgtcccatccaatcttacatcgaattatatgcacccttaaaaagttatttggagttttaaaactattagcccaaattacctgaaataaactcctggcttgttcccctaatgtttataaaaaattgattgaaaatattcattttaaaaacgaagttcttgaatttatttaaattactgtcttgcagtgagttggccaagaggaccgcatttccttgttaatatatatgtagacccatgagataaatgggaaaagtgtgattacaatggcaatagccaattgaattcttccaccaactggattcctataaagacacaaaaattattataaataaaaatcatggattgctttggaaacaagtataaagactgaattgataaaacacataattacattttagtatgttctcatctcagttgttttattgaaatataacattgatttatagaaattatttatatatatgctaaatataaatccttgtttatatgtgttacaaataccttgtcccatttgatgtcttttgaggaagagaagtcattgattaatttgacaatgttaaagttgatcttttcctaatgatttttgtgctgtttaagaatttccctcaccaaggttttgaaggtattctctagaagttttgttttgctttttttaaattttatcacatatttattaaagataatcatttatagtttataaaaatatactgccctgacacaaaatgttcttgataatggtaattaaaaactactcccacccccccatgtccacatcaatattcagtttagattggtttaatcttgaagtgtaatccagtaagactgaagaccaaacacttcagggtcctggacaggataataaaatactcataagccttctggatccttggattgactgacatcaataagggaaccaatttttgatgttgtaaaagaaatgtgttcatctccaataatgatttcaagctcctgccggccctctcggttgggaggaggccataacgcatcatcctctttggtaatttcactgtcatcaattatactcttcagttcctccatcatacttttatgtacataagcctcttttctgatcatgacatcattcttgtaattgctgtgttggcttatcttaatttcccgtccggtcagaactcaaactccagaaactcgtggctgaacttgcccttgtgccccacgtagtagcgcagataaaagtcactcttcatggcttgcaaaagacaactgagactgaacttctaaaagaaagctgcaccaccgcggtctgcacccaacactctgttttgcttttttataatagacctgtgatccccttggaattgatttttatgaaagttggaaagtaggggttgtttcacttttttccaaatggacattgaatttatcctagcctatttattgaaaagactgccttctcagctaccctgaagtaccatctttgccataagtcaaaaccctacatatgtatagatccgtttctaaattctattgttctatcattttatttattcatccttttgtcattatatgtttagccctccaattatttaggtcttcttcaatttctcccataatgtgttatagttttatgtgtagagattttgcatatctctgctagatttattcctacggagtggattttttgaatgtttttataaatgttaactttttgttttatcactttctgttacttcctgacagaaaagcagttaactcttgtatcctgatccagtgatcatacaaaattcacttattctagtaattttttagattcttttttattttctacacatgtattcatatcacccacaaatcatgaaaattttatttcttcttgtccaatcattgggcattttatttctttctcttgccttattttaccggctgggacaatagctgggacaatagctagcatggcattgagtacaagtggcaatatggccagcctcatctcattcctgatctcagagggaaagttttcaactgttcaccattaagtctcaggcttcagtgtagatatcttctatcaggttaagttccctcctacgcccattttctaagagcttttaacataaatggatgctgaattttatgaaatgctatttctgtatggctctagaagatagtttattctcttatttcattccattaatgtggtggaaaacattggttggtttttgtaatgtgaaactaactttgcattcctagaataaacccaacttggtagttgggttatatattgcaggatttgatttgctaatgtgttgtttaggagttttccatctgtggtcatgagtgagactgccatgtaatttcatttttttgtcatgttcttgtcaagttttggttacctgtcctcataaaattagttggaaagtgtttcttctttttctgttctctggaagtatttattgaaagttggtattatttttttccttaaatattatgtagacatctccagctatgccatctaggtctagagttttcctttaggaaaaatttaaattatgaactcgatttttttttttctttgagacggagtttctttcattcttgtcacccaggctggagtacagtgtgatgtcggctcatcgcaacctctgcctccagggttcaagcgattctcctgcctcagcctcccgagtagccaggattacaggtgcccgccaccatgcccagctaattttttgtatttttagtagagatggggtttcaccatgttagccagggtggtcttgaactcctgacctcaggtgatccgcccacctcagcctcccaaactgctgggattacaggtgtgagccacggcgcccggccctatgaactcaatttctttaatagttatgggactgttctgagtatttattcttatgtaaatgttggtaaactgtattttttcaagaaatttgtctaatttgtattttcaaatttattggtgtaaagttcttcatcatatccacttatgatttttacaatagttattatagtagtattctcttttttattcctgatatttgttatttgtacttccttgtgctcttttttcctttttgtcttgtcagggcttatcaatgttataaatcattttagagaatcaatatttgaccttgttaattctctatttttatgttgattttttatttcactgacttctgcttttatgtttattttcttgtttctttggggtttaacttgctgttcttttcctaacttcttgaaatgaaaaattcctaacttcctggaagcttaaaaaaaaaatgtacttatgtctatatgttt

SEQ ID NO: 1887014 - DNA, 4001 bp, Homo sapiens
ccagactgccagatgtgaccttggacatgagttttgaatgtttttcaaacatgagttttggacatgaggactggatgggcacataacatgtaccaacacacaacagccactgctactctttatattaaaagttataggccaggtgtggaggttgatgtctgtaatcccaacagtttgggaggccaaggcgggaggattacttgagcccaggactttgagaccagcctgagtaacatggcgaaaccccatctctacaacaaattaaacaataagccaggcgtggtggcacgtacctgtgatcccagctactcagaaggctgaggcgagaggatcgtttgagccttgggaggttgaggctgcagtgagccgagatctcgccactgcactccagcctgggcaaagagtgagactctgtctcaaaaataaataaataaataaataaaaatttaaaacacccaggagggagttggaatgagccaagtcgtcagttccacctgagttagagtgggcagctctcagggttcttgtgtgggtggttcgtcttgccacctgtcccctctaccctcagccttccaggatatcttcaaactcttcagctccagcccaacaggcaccgtggacatgcacagcatgaaagttgccctgggcaatgtgggtatccagctgagtccacaggagacgttcgaggctctgcggcaggcagacttggatggtgggtgccccaaccctgtcttcttgtcccctcccacctccaggcattcttttaaagaatgcctccccttcccacaaaatcctggcctggtcctattttaaagttccctcttccaggaagcctgccctgaccaacacacctatctcatggcctgtaaacgttgctgctgtgttcatcctaatcctgatttgggaacccccaaggcatgggccgtttctcccccattgaaactggggtctgcccttggctagaggcaggactagattctctaacacctggaactgccagcaggcatgtgcaaggcaggccttctgcagggggcaggcacccacagcaccccctctcctctctccccaggtgatggaatcgtaagcttcattgacttcctgggtgtcttcgatgacaaccaccgcttggctcagtgcatgggtgaggggcaaggctggtggaggaggggtgggcctggcttagggggtgccccctcctcaccctccttcaccttttttgcccccaagccgggtgaggaacagccagctctgtacccccagggactgcagaccctgttcttggaaatgctgttcaagctgctgggccggggctttgtgccctccaagttggcacggggggtgatgaggtgggcacaaccataccagctcctgggcccacaatgggaggagcaaaccctgccccccgcagggacccctgatattcctgccctagagacgggagccctgaattctgagtctgtttcctgggccccaagtcgccccaggacaaagacaaagcagcggcttccggccctgctttggcttccgcacctgtgagacagagagggctgggagtgtctgaggcggccgccccgcctctcttctccaagctactacttcaagaagcagcgggctctgcggctcagcccaggctgcgggggttggggggcgctcccacgcggggctcgccttctgccacgcggcgcgcatcagcgacctctccaactaggagctggcgcgctcgctgcacaaactgcacgaagtaggtgcgtccccgacggggcggggggcgccgggacccgcgggagggacctctcccggccacttacaacccccgccctcgcctccgacccccaggacccgttctgaggaccgtctcctcctccacctcctcccaggcacccgccccaggtgcgcgcagcccgtactctcagattcctaacctggaggggttggcgctcccggaacgcaggacacgaagcccagccccgggccccggcttccgcctgatccagccctactagcccggccgccccaagatcccgcccagcccggggcgtgtctcggcctaggtgagagccggcgggcgggggagggacacgcagtgaggggcgggacaagtgcccggaggacagacagatggggcgacactggctggtggaggggaggggcaggcgaggagcgggggcaggcccggaagaaatggggacccggcaggcggtgacggaggcggcacgcgcggagatgtaaggcgaggtcacttatggcgtcactaagtactgggtagggcgaaaggaaaaggggccagatgcccgggtgggaggcaggactggcgcaaatggggcggggcagccggaaggagaactgctgcggggctggcccggcgtgtctaaccccagctgcccgctcgccccctccggcctcccgcagggatactgggccagccacgaaagcctccgccccctcgaagcgggctccctcgccgccaactctagtgaagaagcagcccttctccccggcgcccgctggtttgcagaggcctgctatgaagagcttgtgcaagtaaagcgtttgctgagcggaaacaggctgcgggtggctgcggcaggcatggagccgacgcggatcttttgcaaacatctttattaatctcatataaaaataaggtccatggacggtcctcggggctggggcttgcgggggcgaggtgcactttataagttacaggccaggctcctgctgaggctaagtatggctatttggagggggctttagggtgggtgctgcaagcagcatttgggggaaggggcgggcgatgctgccctctgtggccaagaggaggatgcaccagcccgtttgaggcgggccacagcggaggaggggctgcccggccagccgagctgaggaccaccttccttgagcctcagcctgtccacggccccacacccctgcagaatccacctgcagaaatagcggctacagcgagaggtcggaggtgacctgcagtggggggcccgggggacgccgacgggcactgcggcggcctgtgtctgcgcggatgtagggctggttccgcagatctggcagccgaaggagacacatttaccattcaggagtccgcccagagctgggagcatggctccagggcacaaagcttagcctcctaaggactcagattgtgtgcacatggcaggggtaccgtttatgtttgccagacccctccaccccacaaatcacatcccagccatccactggcccaggagaaggcagcatgcctcagttctcccaagggtcccaggggctgtgggcagcgtggtatcagaggccaggtcatctgggtacctgaggggctagaggggcatctcttctcccaggctggcctcacagaggagccgggatgtccgcttgccggtgcgggccgtgaagggcaccgtcttgatcactgagtgggggtggggcaggtgaaggggagtagagaaaggaaaaaggaaagaaaaacagaaaaggtagcaagaagcagtgtggcagccagtcccccagaggatagcgcattgggtcagaagaaagcatagaaggacagactgaggataagaccaaggcctggccaagcccttacctgtgatgatgtcttcaatggccccatcacggtcgctctcataaatgagtggctccttctgctgcctccgtttcagctcagagatgaggtccatctgtggccgccgggcctttggcggtgactagggggaatttatagctccagctccaggatgcctccccatcaccaaaaccctggaatatctgcctggtcccccacagcaaggacagctggcttgagcagaaagaaccctttcccatcccaggctcctggggcagggtcagtctgtaacagtgagggtgtgggggtggcaccagagggtgatgagatgccatgcatccctgcagcccagtaccaagcccaggagcagttgcctaccttgggtgctgggggctcccctttgcccggggtatcagcgcctgcctcc

SEQ ID NO: 1887015 - DNA, 4001 bp, Homo sapiens
aaagaatgcctgaccctgggaaggctccctggtagaatacaccacacttttcaggttgttgcaacacaggtcctgagttgacctctggttcagccaaggaccaaagaaggtgtgtaagtgaagtggttctcagtccccagacatgtgcccctttgctgctggctaccactcttccccagagcagcaggccccgagccccttcaggcccagcactgccccagactcgctggcactcagttccctcatctgtaaaggtgaagggtgatgcaggatatgcctgacaggaacagtctgtggatggacatgatcagtgctaaggaaagcagcagagagagacgctccggcgccccagccccactatcagtgtccagcgtgctggttccccagagcacagctcagcatcacactgacactcaccctgccctgcccctggccagagggtactgccgacggcactttgcactctgatgacctcaaagcactttcatggctgccctctggcagggcagggcagggcagtgacactgtaggagcatagcaagccaggagatggggtgaagggacacagtcttgagctgtccacatgcatgtgactcctcaaacctcttccagatttctctaagaatagcacccccttccccattgccccagcttagcctcttctcccaggggagctactcaggactcacgtagcattaaatcagctgtgaatcgtcagggggtgtctgctagcctcaacctcctggggcaggggacgccgagactccgtgggagaagctcattcccacatcttgccaagacagcctttgtccagctgtccacattgagtcagactgctcccggggagagagccccggcccccagcacataaagaactgcagccttggtactgcagagtctgggttgtagagaactctttgtaagcaataaagtttggggtgatgacaaatgtttccaggccatcggtgtcctctctcttgcctgccggcctgctgaacctcacgaccctaacagctgcctctctttgccttcttgctgagatcttttcaagtcccccttgttttggacaaggactgtttcagcccttgagtggggctgctttcccaccactcctcccagtggctgcttctagtcccaacgctgggctagtcattcagaccagttaggcaagataccttgcccggtggcatcagggaagtccctcgccaaaatatgccaggctgaggggtggaggaggaggacaacaaagcctgcatgctttgtgccactgcccaagttaggcagccccctaccaccagaagggaaatagggatgggttctgggccctgaccatccagggatgccggatgcacaccacaggccctccaccctcccctcctgtccttgaggcctggactcttaaccctttccgctgcctcctgagccctgcatggggccagggatgcctttgtgggctgagttccttggtcatggagctggggcacacggggtgctgagttccttggtcatggagctggggcacacggggtgctgagttccttggtcatggagctggggcacacggggtgccttatcgaatctggctccacactccctgtgtgcacaagtgtgtgtgcgcgcggcttgggttggtttagccggttcttggaagggccctgggaccacgaaaagggcggcagccctgagccgctggcgtgcagagcgggtgcaagtcctgtccagcacagccaggcttacctgccgcctgcctctcgctctaggcccgctgcggaagcgcgagccccacccccgaggtcttcggagaggaaggagttctggcttcgggcccgcagccttcggaggacgcctcactcgggccgtcccccgtccgcccgcccgaaacctaaatgcggctccctgcctgtggggtcgcggcggggacgtcacagaggcggcgacatcacaggcaccggcgcctctaatatttccagcgcccaccagtccctcagccaaagagcacactggaggcggagaggcagcatccaccagcccgctccccgcctccaggacagagcctcggtctgcatgggggtgacaggtgggagcggccgagcgcccgggggcgagggttggggcaggcggggaaagcgaaagtgagagggggaggggcgcgaagggggcggtcaggaatccgcccagggcccgttcccctgctcccaaacccccggcacctgaaaggcaggtcgacccgccgccaaagcccacccggtgcccctgactacggctcccagcctcagcccctgcgcggtgcacacccatgtgctctcacggacacgcatgcgcgccttggagtagggactgcagagtcagtggttcttgaaggggttctgagaccacagaaggagcaatggccttgtgcacaggaaacgactcatgaattatcctgaactgcagatccaaaaaatcacatccagttgtccctccttgatgcttgaggctttgcagggaggagcggcagtcttcagcacatttttacggagcgcttcgttgatgccttgtactcttctctgaaccaatgagcaaagatgtttgcccccagtgccctgtgtctccccttcccataggggcgtcagatcccccactgaaatggtggctttcttttggggatcctctctcccagaagggcatgggccagcattaaaaacggtcaaaaattaggtgggcatgatggctcaacgcctgcaatcccaacacttcgggaggcagaggtgggaggatcacatgaggccaggagttcaagatcagcctaggcaacatagcgagactttgtcctctacaggaaatgtttaaaattagacaggtgtggcggcatgagcctgtagtcccagctacttgggaggctgagctgggaggctcactggagcccaggagttgcagtgagctatgatgctgccactccagcctgggccacagagcaagaccctgtcaaaaaaaaaaaaaaaaaaaccagaggtcgggtgcagtggctcacgcctgtaaggtaaaacgtagattagacagccaggtctgtcatggagaggattacactgattatttgaattgggctttcaggcatgagtaggactttgccagaagaaggctttccaggtataagaaatagcatttgcaaaggcactgggtgcagaaaggcctgcggtactctgggggtagcttcggcttagggtgagggacaggaagctggatgccaagagatgaaaaatgaaggtagagatcagaccaagaggccacatggagtctgggggtaaccggagacaagtgagatgtagcaggctcactctgaggtcattgaaaatccaggttggagggggacatagttgcagtggtcccactggaagactaaagagatttaagacagtgcagtgagtagcatcccagagtttggagccagccagacctgcctttgggtcgtgtgctgctcttaatagctgcatgacctcatacacgtttcctcatctgtgagaggagagccgtggccaactgggcatagggtaggtatgaagactgaatgtgcaaagcactcagcaccaagtgccaaagggtaggaagtcatgggtgtgtgctggctctggtactgggagatgaggacagcatcaggggtaggagggcagtagctgcggagggaggaggagtcacaaatgacccaggtttctcatttgggtgaaaggatgaaggatgaatagggcgaggagagtggggtatggagagatgacagactagaaagggagacaggggtcagacaggcagaaccgtggcagccacacttaagagtctggacatacaagatatgaatttgaggtaagaaattaggccaggcatggtggctcacgcctgtaatcccaacactctgggaggccaagatgggaagatcgcttgagctcaggagtttgagaccagcctgggcaacatactgagacctcatctccttttttttttttttttgagacagagtcttgctctgtcac

SEQ ID NO: 1887016 - DNA, 4001 bp, Homo sapiens
agcttcaagacaacttcccatctccctaggaggagatggctgccctaaacccccctacatagaaatcatcccactgcttgggcttaaacttgatgttggggaaatgaaaaatccaagctaaggccgaagcctggggcctgggcgaccagcagaatgaggaccactggtcagtttcaggctgaggtgcgtcttccaggggacaatctctagctggcccttaaacattcagacttcaagctctatttacagcataaaggtgtttcaaaagacgtgatacaaataactgcaaatgctctgcgatgtgttaagcactgtttgaaattcgtctaatttaagatttttttttctgacgtaacggttagattcacgtttctttttttttaagtacagttctactgtattgtaactgagttagcttgctttaagccgatttgttaaggaaaggattcaccttggtcagtaacaaaaaaggtgggaaaaaagcaaggagaaaggaagcagcctgggggaaagagaccttagccaggggggcggtttcgggactacgaagggtcggggcggacggactcgagggccggccacgtggaaggccgctcaggacttctgtaggagaggacaccgccccaggctgactgaaagtaaagggcagcggacccagcggcggagccactggccttgccccgaccccgcatggcccgaaggaggacacccacccccgcaacgacacaaagactccaactacaggaggtggagaaagcgcgtgcgccacggaacgcgcgtgcgcgctgcggtcagcgccgcggcctgaggcgtagcgggagggggaccgcgaaagggcagcgccgagaggaacgagccgggagacgccggacggccgagcggcagggcgctcgcgcgcgcccactagtggccggaggagaaggctcccgcggaggccgcgctgcccgccccctcccctggggaggctcgcgttcccgctgctcgcgcctgcgccgcccgccggcctcaggaacgcgccctcttcgccggcgcgcgccctcgcagtcaccgccacccaccagctccggcaccaacagcagcgccgctgccaccgcccaccttctgccgccgccaccacagccaccttctcctcctccgctgtcctctcccgtcctcgcctctgtcgactatcaggtaagcgccgcggctccgaaatctgcctcgccgtccgcctctgtgcacccctgcgccgccgcccctcgccctccctctccgcagactggggcttcgtgcgccgggcatcggtcggggccaccgcagggcccctccctgcctcccctgctcgggggctggggccagggcggcctggaaagggacctgagcaagggatgcacgcacgcgtgagtgcgcgcgtgtgtgtgtgctggagggtcttcaccaccagattcgcgcagaccccaggtggaggctgtgccggcagggtggggcgcggcggcggtgacttgggggagggggctgcccttcactctcgactgcagccttttgccgcaatgggcgtgtgtgtgtgtgtgtgtgtgtgtgtgtgtgtgtgtgtgtgtggaggggtccgataacgacccccgaaaccgaatctgaaatccgctgtccctgccgctgttcgccatcagctctaagaaagacgtggatcgggttctagaaaagatgactccctgcacgcccctccctgcacctcccgagcagtgattccgacagggccttcactgcccctgattttaggcgggggccggccccctccccttttcctccttcagaaacccgtaggggacatttgggggctgggagaaatcgaggagatggggaggggtccacgcgctgtcactttagttgcccttccccctgcgcacgcctggcacagagacgcgagcagcgccgtgcctgagaacagtgcgcggatcccactgtgcacgctcgcaaaggcagggttcacctggcctggcgatgtggacggactcggcggccgctggtccccgttcgcgggcacgcacagccgcagccacgcacggatgggcgcggggctgcaggtgcatctcggggcggatttctttctcagcgctcggagcgcagggcgcccggcgtgtgcgctccctgccggaggcgcggggctggcgcgcagggctcgcccctcactgcggcagtgggtgtggaccctggtgggcgaggaagggggaggataggctgtgcctcctcccactcccgcccccagcccccctttttttccccctcggaacgcgaggtgccatcttttttcggcgtgtcacgtctttacggtgccatgccaaaccgggtggccgggcttcataggacagggcggggcctggcattaaagggagggggacaatcagcgctgaaatcttggcgttttgctgctgcgggcgtgagcactgggggcgttcgcccagcaccttcttcgggggctctttgctttgtctgtagaggttacgtgatctgcgctcccagccctggtttctggcttttattctgagggtgttcagtcaacctcccccctacgcccatgcgcctctctttcctttttcgctcctcatttccgagcccattgttggatctcgaggcttgctgggttcgatgaactcgagtcaaccccccgacccccggcacgcatggaacgggcgtgaccgcgcgcagcctcgtctcggagtctgccggcgccgggaagcttctgaagggatgggattcgagtctccgtgcgcgctgcgggcggcggcagagggatctcgcccctccctacaccccaagtgtcctgagggccacgccacaccaggttgcccagcgagggacgctggctacccatccggggatgggtggggagccctggcggggcctctccggctttacgccctgttgcttcgcctggccggagaatgtgaggaaggggcataaggttactggtgcttcggccacacccatctttctgagcccactggactgggcgcagaggggggattgccatggaaaccacaggtgtccggagaggggatcttggggctggcctcaccccttccctgcggagattggggaccctggggtagggggagccgcgcccagtcggcctcctggaggacacgggaggaagccccgaacccccgcgcctgaggctgtttctgattggcccctggaggccgcagacacgcagataggcggccctgggtgtatttttattaatattatgtccgtactgattaatattatttatcttaaataaatttcacccgtgtccaagttcaccgcgcccccaaaaccgagtctggggcggcagggggaactcctggccaacgaatccatgcctcgccctcctgtgatgaacctggtacgcacggttttctggttaattctatcgctgaaaactggtgcggggggcgcacttctgagacggaagagcatctaggagctgaatcctccacgcgggtcgcccaggttgatctgaatttctggggaatggcttggctgcccgcccgggaccaggccgaccctccttgacggtggcgtagagggctggagcctgggtactgcgaggctcctcgcatggctgggcccgccgcgaggggttgcagagcggctcagggatcgattcaagcatcgtctctcctccctcgcccccagacagagctgggcgcggggttccccttccagatggagcgagggtctcggggtggccccggaaaaggggagcccgcggccacggctacgtattgccatctcgcgagcagagatgtcacctcctgcctttggaggaaagggagcccggtggggatgagcgcatttagcccaatgctgggaacaaagcgcactccgcgcttctgcgatttcgctccattttgaaatgtgttggcgctttggtggggccgctgcggtgggcaaggccgggggcgctgttaatggaggaacctcagggggacggtccttcgtaggaaactctatcctggctctgcgcgcgctttaaggaa

SEQ ID NO: 1887017 - DNA, 4001 bp, Homo sapiens
gctaggcagtcgctgtcggagcccccatcatcccttccagcctggaccattctgagacggaggtttggagttacaggtgtgtgagcgccagagggtgagaggggtcactcgctcggaatgtaagagctcccgcctgctgggaatggggaggagtcgtcgatggccccaggatccgtgcccagacatttccagaggcgcaccggctggttcagcaccccaccgtcatccgcgcaaaagctgcatccctcgaggtcctggagggaagccatttccttaaagcgcgcgcagagccaggatagagtttcctacgaaggaccgtccccctgaggttcctccattaacagcgcccccggccttgcccaccgcagcggccccaccaaagcgccaacacatttcaaaatggagcgaaatcgcagaagcgcggagtgcgctttgttcccagcattgggctaaatgcgctcatccccaccgggctccctttcctccaaaggcaggaggtgacatctctgctcgcgagatggcaatacgtagccgtggccgcgggctccccttttccggggccaccccgagaccctcgctccatctggaaggggaaccccgcgcccagctctgtctgggggcgagggaggagagacgatgcttgaatcgatccctgagccgctctgcaacccctcgcggcgggcccagccatgcgaggagcctcgcagtacccaggctccagccctctacgccaccgtcaaggagggtcggcctggtcccgggcgggcagccaagccattccccagaaattcagatcaacctgggcgacccgcgtggaggattcagctcctagatgctcttccgtctcagaagtgcgccccccgcaccagttttcagcgatagaattaaccagaaaaccgtgcgtaccaggttcatcacaggagggcgaggcatggattcgttggccaggagttccccctgccgccccagactcggttttgggggcgcggtgaacttggacacgggtgaaatttatttaagataaataatattaatcagtacggacataatattaataaaaatacacccagggccgcctatctgcgtgtctgcggcctccaggggccaatcagaaacagcctcaggcgcgggggttcggggcttcctcccgtgtcctccaggaggccgactgggcgcggctccccctaccccagggtccccaatctccgcagggaaggggtgaggccagccccaagatcccctctccggacacctgtggtttccatggcaatcccccctctgcgcccagtccagtgggctcagaaagatgggtgtggccgaagcaccagtaaccttatgccccttcctcacattctccggccaggcgaagcaacagggcgtaaagccggagaggccccgccagggctccccacccatccccggatgggtagccagcgtccctcgctgggcaacctggtgtggcgtggccctcaggacacttggggtgtagggaggggcgagatccctctgccgccgcccgcagcgcgcacggagactcgaatcccatcccttcagaagcttcccggcgccggcagactccgagacgaggctgcgcgcggtcacgcccgttccatgcgtgccgggggtcggggggttgactcgagttcatcgaacccagcaagcctcgagatccaacaatgggctcggaaatgaggagcgaaaaaggaaagagaggcgcatgggcgtaggggggaggttgactgaacaccctcagaataaaagccagaaaccagggctgggagcgcagatcacgtaacctctacagacaaagcaaagagcccccgaagaaggtgctgggcgaacgcccccagtgctcacgcccgcagcagcaaaacgccaagatttcagcgctgattgtccccctccctttaatgccaggccccgccctgtcctatgaagcccggccacccggtttggcatggcaccgtaaagacgtgacacgccgaaaaaagatggcacctcgcgttccgagggggaaaaaaaggggggctgggggcgggagtgggaggaggcacagcctatcctcccccttcctcgcccaccagggtccacacccactgccgcagtgaggggcgagccctgcgcgccagccccgcgcctccggcagggagcgcacacgccgggcgccctgcgctccgagcgctgagaaagaaatccgccccgagatgcacctgcagccccgcgcccatccgtgcgtggctgcggctgtgcgtgcccgcgaacggggaccagcggccgccgagtccgtccacatcgccaggccaggtgaaccctgcctttgcgagcgtgcacagtgggatccgcgcactgttctcaggcacggcgctgctcgcgtctctgtgccaggcgtgcgcagggggaagggcaactaaagtgacagcgcgtggacccctccccatctcctcgatttctcccagcccccaaatgtcccctacgggtttctgaaggaggaaaaggggagggggccggcccccgcctaaaatcaggggcagtgaaggccctgtcggaatcactgctcgggaggtgcagggaggggcgtgcagggagtcatcttttctagaacccgatccacgtctttcttagagctgatggcgaacagcggcagggacagcggatttcagattcggtttcgggggtcgttatcggacccctccacacacacacacacacacacacacacacacacacacacacacgcccattgcggcaaaaggctgcagtcgagagtgaagggcagccccctcccccaagtcaccgccgccgcgccccaccctgccggcacagcctccacctggggtctgcgcgaatctggtggtgaagaccctccagcacacacacacgcgcgcactcacgcgtgcgtgcatcccttgctcaggtccctttccaggccgccctggccccagcccccgagcaggggaggcagggaggggccctgcggtggccccgaccgatgcccggcgcacgaagccccagtctgcggagagggagggcgaggggcggcggcgcaggggtgcacagaggcggacggcgaggcagatttcggagccgcggcgcttacctgatagtcgacagaggcgaggacgggagaggacagcggaggaggagaaggtggctgtggtggcggcggcagaaggtgggcggtggcagcggcgctgctgttggtgccggagctggtgggtggcggtgactgcgagggcgcgcgccggcgaagagggcgcgttcctgaggccggcgggcggcgcaggcgcgagcagcgggaacgcgagcctccccaggggagggggcgggcagcgcggcctccgcgggagccttctcctccggccactagtgggcgcgcgcgagcgccctgccgctcggccgtccggcgtctcccggctcgttcctctcggcgctgccctttcgcggtccccctcccgctacgcctcaggccgcggcgctgaccgcagcgcgcacgcgcgttccgtggcgcacgcgctttctccacctcctgtagttggagtctttgtgtcgttgcgggggtgggtgtcctccttcgggccatgcggggtcggggcaaggccagtggctccgccgctgggtccgctgccctttactttcagtcagcctggggcggtgtcctctcctacagaagtcctgagcggccttccacgtggccggccctcgagtccgtccgccccgacccttcgtagtcccgaaaccgcccccctggctaaggtctctttcccccaggctgcttcctttctccttgcttttttcccaccttttttgttactgaccaaggtgaatcctttccttaacaaatcggcttaaagcaagctaactcagttacaatacagtagaactgtacttaaaaaaaaagaaacgtgaatctaaccgttacgtcagaaaaaaaaatcttaaattagacgaatttcaaacagtgcttaacacatcgcagagcatttgcagttatttgtatcacg

SEQ ID NO: 1887018 - DNA, 4001 bp, Homo sapiens; identical to SEQ ID NO: 1244324

SEQ ID NO: 1887019 - DNA, 4001 bp, Homo sapiens
ctgagagtaaaaagtgtaattatatttcaattgtaaatgtataccaagttttcttagctttctattctccaataacctctagaaactattcttttttttttttttttttttgagatggagtctcactctgtcaccttagaaactattctaagcatgcctggtttctgtaacttaaatatggcataaaaacctgtttcctttgaattcacttgatagcagtagtcaaacactaataatgcttgctaatttcctctcactttcttaagaaagcccctatatttagcctctgcctccatgtcgcatgtggtggttaggtgacagcataagtacactagtggctttagcactaaactcgaggcctgggtcacttctcccctgaagaagaaaggtttaaaaattcctaaatcacaatgtagaactaagttacaccctacctcagaactgcagatattaaaataccatctctttattaagtgtctctacaataaggatatttgctaagatcaagatgtacaattttttgggttctgttttgttttggtaaatattgcccacgtctttttagtttgcttcaaacatttactaaaaataaaaaattttaaatctttgcctacttaaaaataaaaaaaatactcaaaacaaatttaagctgaagatatatactgtataaagtgcttcatctacctaattctctgaagtcttttttttttctgtgttttaagactttatcattaaaaaaagaagaaattagagaagggaggtgggggggacaggagggtgaaagaatctctccaaaatgtcggatccgggcgaccctccttccctgactgcccagccaccctgtcccttctctgtcctcgcggcgaggccctagctgccatcttctggggaccaaggcccaggagcccagctcgggtcccaggcagaggtgaaggcagaagcggggctcagagcctggaggccttgccggtgtccttgagagccccttgggtgggcactcaggcccccatgtcccagcagggccctagggaggtaggcgttgagcggagaggcctttggaggtgggatcctgaagccagaggaccaggcgggaaccagagccaggtgtgaggctgggggtcacagccggaggctgggtctctcccgcatcagcctctatagataatgccattctccttccgagttcaaactcatccccactgatgctggagcccggaaggccacgtgtggctctgtctcggtatagcccccgatgggctggccctctgggctgaaggctgcaccctgccctgtgcggttggattgatcgatcataggttgcacgatgcgtctccgggcattaatgaaccagttgttgacttgcaggatggtaagccccgtgtcctgcgccagctgtttcttctgctcctccgaggggtacgggtgtgagaggtgctggaacaaccaggctcgcatgatgttggtggccaccttggggaagatccccctcttcttgtttcgccgtggctcctggtccaagtcctcatcttctccaccagaactgggagaggccacgctggtgtccagcccgactccttggtcactggagttgtccccactctgggaggccagccccccgctggatggacctggggtccccaaatgtacagacccgctatcctcatggtctcgaatccatatattattctggtctgggaggctggggcaggaggctgggtagtcctcgaagtcctccctgcagccgccatcccgatcctcgatgaccaggtcgatgggcatctttcccttctccagctctagcaggtggaaccgcagcacttggattgcctggatcatcagattgtccagttctgggttggaggagaagaagggcctctcagagcgaacctgcttggcgaaggcagtgttgtcctcgttgaaggaatcagaggagcagacgtcgccgccgcgggggtgtccccagcccagctccggccccatcacggggagagcatgtagccagttcacatttctcaaagaccagggccaagacggggaagagcgggtgtccatagatctcatccttgtccctcttcaggccgtcgctgtccaagcctgggggtaggggctggggaggccggtgagggccatagggccctggtgccgcgggcactgcctctgggaagccagccagggctgcggggccatccgcgatgcctgggtagtgcggcagctcatcgtacctttgggccatgggctgaggccggcggcacctccagggtccctccagagcctggccgcggggtagggcgcagcccccgacggcccgtgatgtcgacgccagggggtgggcaggaggccagacgcgcgccccccaacccccgccgccgtcagccgcaggcgccgggccgggtgggggctccgcgcatggatcccggcccccgcccccagcgggggtcacggccgggagcgcattaccgccgggacggggcagcaggcgcgggcggggcgcccgaggccccctcccctgggcgcccccgtccctcccccggctctgcggggaatcgagccgtccccagacggacagacctgggaccgcggggggcggggggcggcccggggcggcgggggtccggcggcggctcgggggtgctggcggccgcgctccgccttcccggtctcttcctctctgtggtcacatccggaagttccaccctctgaagtcttaagaaaggtcaatgatgtgtgtgtgtgtgtgtgtgtgtgtgtgtgtgtgtgtacacacacacaatttaagcctttaaaaatggcaattttttagatgatttatgggttttttccccctttactactacaatttaagcctttaaaaaatggcaattttttagatgcttgaggtagtttgggggatccctagctcttaatcgtggcactctgttgagtttgtgaaatggatcttcaaagaggttgtcaataataaacaaatttttgaaacgagtcagattactaattattgatgaataaaaaatgagtacttttaggccaggtgcaggggctcacgcctgtaatcccagcactttgggaggccgaggccgaggcagatcacgaggtcaggaaatcgagaccatcctggctaacactgtgaaaccccgtctctactaaaaatacaaaaacattagccaggcatggtggtgggcgcctgtagtcccagttactctggaggctgaggcaggagaatggtgtgaacccgggaggcagagcttgcagtgagcagagaccttgccacttcactccagcctgggcaacagtgcaagactccgactcaaaaaaaaaaaaaaaaagagtacttttaatctgccaagttaaagctctagaattccttttctccagtaataactggcagcatcaccaccaatggaagggacctaaggaatattttgtacattgatatacacgaggctgctcctcattttttttgtcagattacaaaagctgggctcatatagttagggcctatggacctctttttaaattattttagcagaagtagatggtctagaccttgctcctctaatcttttatattaactgtccctaagctactttgatgactattctaatcaaaatcagtatagctgtgctcgctaagcatatcactgcttattatttaaataccttctgttttctatgtagcaaaacaaaaagttttataaatttcagataagctttctgtttttcttcagtgcaaacatcctgaaacagcacaaaatcattcagctaatctgaggataaagtcagtttatgtagtgcttaaagtagaatcccagatattctggaatggaaatagctcatgtgaaacttcagttcatttttgtccttaaggacaaatgatcatcttcagagagtgaagactttttaaaatctgaattcacagataaaataattttagctttactttataggtactgctgaagttgtagcaggaactactagtccttcactgatgcatgtagctgccttgcc

SEQ ID NO: 1887020 - DNA, 4001 bp, Homo sapiens; identical to SEQ ID NO: 1244331

SEQ ID NO: 1887021 - DNA, 4001 bp, Homo sapiens
tatactttgtttaatgtgggccacagcattaacgtgtcagcttattttgtataacgcagaatggaaagggggaccgaggtggtagagggagtttctgccgctgtacagtctaaggcatatttttgtataacaaacaataattacacaatatttggctaacttaattcccaaactgaggtcattacaatttaagaatatctaccaacacttaagtaaaatcacaaagagaaactttaaaagttacagatttaatttttggtcattcaaactttaaattaacatcccaagcctaaatgtaaagggcaggttctttctccatcttagcatatgtgaaattctcctgaaccacagcccggtgtttcccaaacactatggggtacccatggaacaggaagtaacacccagtttcaccagcctgcttgatgagcctctttgtgaggttctcattggtgtctgctaagtttgggaggcctgcttcaagagggctgcataatgaactggaaaagtcaacccagaagagtcatcatcgcagactaaaaccaactggagttccagtgtggatggacagtgcgtactagcacgtttgatttttgcagggttaaggaggtagaaaggctgccactctggccattggcagcgccagctctgtacaccacctcggtgggttccatctcaccatgacccctcctgatccggctgatggtgtctccttttgccaagtggaaggaagagcaatcaaactccgagatgtcatgcaaatctgccaggccctgggttactggttaggccactagcaggctgtgtatcaaccgattaaacccattaacgactcacagacacagccacgacctcgttctctaacagattacgatgctgatcctcagactcaaccattcgtccccatcgttttttgttcttaatgccttcaaaatgtctccccactctcatattctctagtttttgaggacttgttttaactaggtttctgaattacaactctccctggttaattactatttatactcttctccaattggttgcctgactgcagggacagagcggaggtacaatggagcacacctctggcacggagcaaagcttggcagagaggagagaactccaacgagggcgaagggtgcactctgggtaccagattttaggtaatgcgctctgggtcagcagtctcctcctggcgtggtctgtttaaagttaaaaaggacgccttcaaaataattgtgacgtccatacctttgcccagacatccattcgtttttcttaagtaatcaacatttttaaagtaaacagatggcatttaaaagatttttttcccccttggaaaatatccaccaactctgcggccgcgccaggagctgctggtgcagtccaggaacgcagtgtttggggccagttgcggcatttacagtgggctcctccggcagcccgatccgccgggtcaccgccccgggccctgtgccccctggacccgggagtcctgcttgtcagttcagggagatggctcgggaggacgaagaacctcccgcctcccgcggcccagccaagcccttgcggccgcccgggtccagccgccatgcgtggccgctcgcagcgcagcccccgggcgcaagtcggcagccgaacctcccgggctgcgctgtccgctgcaggcgcgcggcgagggtttccacgcgacttcgttcttcattcagcgttttttagtcaatcaaaaagaacgtggcaggtggagggcagccgcctaagagactgcgtgagccttcctgtggggatttccatagcttgccccaggtgcttcaaaaccgcctgacattaagggttcagtccttttcctgccagttcctcccaacccggcccaagtgtgtctgatctcagaaaatcctaggctgcctcggggctctggcgggttccacctggaagggcgctagttatagcctgccgcctggccctggaatcaccatcccaggaggagggggagtggtggtggtagaagtcataacaatacaatcggtgacaatagctaacgattagagaggccctcacgtgcctgcgaggcaccttaccgtaccagcgcattcactcttcccatccctgcccagaacctgcattattcccactgcacagatgagagcaccaaggttcacgcgactagccaggacgtgaatccaggcgtcggactccagagaccccattcttatccaccagtgtcccgagaatgggtcacagcccgggaacggtgggaaagatgactgtcacggttggctaaacctcgagacttgggcaactcctgacaataataaaaaaccattaaggacaaaggggaaggggtaggacgaggctgggaagggagccgttttaatccgcggggtcagccctcttttattctccaacccacccaggtcccgacagtggggtgggcacagggagaggggttcagttatcttctcctcttttgttttcccaagtcttgagcgtctgtgaagctaattgggcctggaggggtgtctgaatgtcgtgctggctggggttacgggtggagaccccaacgaaaatgtgggggtcgttacctgggcccctagtcgaagacagttatcggaggccgaaatctagacctcctgcccactcgcgccttacccgaagctcgggcaacccaacagctcaccccaaagaccagcagctgcggaaagcagtgggcagaggtagtgattgtgaccccggggccactgtccctttggaacctgacccgcaacccgactcgagaacagaatttccggaagccgcgacctcgaagcaaccctcatttctcaatcaatgggccccgaatattctttgctccggacgtgtaaaagccccgcggagacacgcgtccttgctttccctatcccagcaccgagggcagggaggcggaaacgggcggcggtgcccggaggcccggacgccttcaaagcctcgcgccgctccagccggttgcagtgcgcgcctttgcccgacagggaccagcacagctccacgctccgcgcgccgcccgcccgccaggcggaggcgccgggccacccgcccggctcaccctcccgagcccaggcggctcgcgagcgaggcgggtctgacacccttggggttccggtaaccaggcggactgtaacaaaaagttaacagactctgcggcctcgccgggacgccgcggcccccaccccctctccccatctgggaagcagaagctgctctagaagttccttgagggcggagaccgaccaaaggggctcagaacattcccagcgtctcgggctccgggaggaaaaaatttaaaacgagtcataaaatacgattcgagtcggatacccccatggttagagggtggctcgctttgctgagggcggtctcagtcgctgcccttcttctttgcggcgaggtcgcctgatgaattcaagggcaccagtgctccgcgagaactttctgtgggttgtgacgagaaccaagcggagcgcaaccctcaccgcacccggacaggatgcgctgcgcaatctgccgtagtttccctgccctaccccgggtggtccgaagctgtaaccctgccaattccctatcatacgccatgtctcccttagctcagggtctgaatcgacgatggagaccctgcccctggcagggaaactcaccggtaccaagcgaggcccttgtcgtagctgcgatcgaagaaatggggctcggcgcccacggcgcgcacgtcggggtgcacgcgcagaaactccagcagcgcccgcgtgccgcccttcttcacgccgatgatgatggcctgcggcagctgcttgctcccagacccactgaaaaagctggagatggggcttggggagtccggcacctcgggactctgctcctccgggctcgcagcgccctcggccatctccttgcctgaagccagtggggtggctggcggcgcccggaacggcagcctggggggcgtcccgtccggagctgtggccagggctggc

SEQ ID NO: 1887022 - DNA, 4001 bp, Homo sapiens
gggaggtctgtctgttgtgcttcagctttttgacacctctctgggtcagcaggcctccggggaagcagctagaatggtcgctgtctggctgggtgcaggtgggctgacaggtttggatattccaggccgcattccggtggctgtggagatagccctgagggacagcctttgcagtttgtttcttccagtgccgtgtgcaggcctccagccttctggggctcccttgccccgggttcaaagtcagtcctcggtgaccacccactgcctaggaggcaggcccttcccacctggggggcctctgagggcaggggctgtaaaagcagctaccagaagagtccactttccccagcaactgcagggactgagtcagagaccaagaccttttaaaaggaggttttcacccaaagaagttccctcccctgccgcagtctccaagctgatcgcctggctcctgcagttctccggctccctgtcctgttctggaacttgcttgcttccccttccactggccttagtccctgatctcacagggtcctgttccttctgcacagaggcctcccccagcacccccctctttgactcccgatcatccttcagctcatgtcactgtcctttgggaaacaaccctgacgcccaccttccatcccctctccctacagcagggactctgacatttcacaaggcctgcaatcgctgtttgcaggatacaagtccacctcacctcgcctactaggctgtagacgccatgcaggcgggaacgtgtgttttatccattactgtatcctctagaacagagaacgtgctcaagaaaatttgttgaaagacaccccaatgagagaagaatggctgtttccagccttccgggcccctcagctttgggctcctgcagggccccagaaccgtgggatcacggccacgaggagaggccccgaggccaggacttcctctaatggacacagggcctttgagcaccgggtgactggggccccactccccagcagccatatgtgtttgcgagcgttttcagtcggtccgcatccacccggtcccttcagccagaaccctaggagccccgccccgtcctcccggggctcctttctcacccgcgtccctgccgcggtggatacgcacccctcaggctggctgcccagcgcggtttccacgcccaatctgccgcgaccccatcactccaccgcacctacccctgactcctgcttgtcctgcagcctgggctcctccctccgctggccaagtcacgccaagcagtttgcggttacaggacgggtgggggcctctgcatatgtgcagagtacggagggcccagggacgcgaggctccccgatgggcaacctcccctgcctttgcttttccccagagccccctcctggcctgcgttcggcatcttctcgggtcgtcatcgccctctgcggtgcctgcgctcggggtgagggtttttgtcggcttttgttacatcaccgatgtaacagtgcctggacgtagtaggtgctcaataaatatgttgttgaatgcgcttcagtctccccgaatgcttgtcccttccgggcgctctcatcgctctcctaccttccccgctacacagctcgaaggtcccctcctccgggaagctcaccctgtcccacttgccaggaagaatcaagcaaattttctgagtgagacaccttgtcctcactcaggcgtcctgcaggcggcttcagcgagttgttggggcagatgcgccgggagctcccgagggcagggacggcgtcttatttctctttttaagtccacagggcttgcacaatagatgcccaaaaaatgagagtgaatttagaatgagtgaccgagtggctgaagattgcctccttcctttcccagtctgtcggttacttaccctgtgacaagcccttgggacgggcagtcgcccctctctggcctatgactgctggctgcccccactgacaccttatacccttgatctgatcataaataagaagcagcccggggacctcgagactgaaactgatttagagacttctgggagcttttttcacttccctcctcccatccggccaggacagatccccgcccagaaaggggctgttgactgcagcgggctgcgcgcccagaactgggactgggatcgcggcggggcggggcgggcgcgggcccagggagaggcggggccgggggcggggcgggcacggggccccggccgggaggtgagcgcagctgtcgttcagcttgtgggtagcactcgggccgagccatgcaggcggcgcgcgtggactacatcgctccctggtgggtcgtgtggctgcacagcgtcccgcacgtcggcctgcgcctgcagcccgtgaacagcaccttcagccccggcgacgagagttaccaggaggtaagtttacgccgccccagaccgcagccacgcgcgccccaagtccccgcactaccccctctcccctcgagagcctgcactttcccacgtgcctctcagaccccttctctccccgcgcagccctttcccgtctcccctctccccttttcccccaccctcccaggcccgtggcccgcgtcccctcctgtctgggaacctgggggccgggaaaactgaagagatcagagtgaagcgagcgtggggaaggggaggaagggcgcaagaccgcctgcggggtgaggggctgaacgctgagcgggcagggcggcgcgggggaggggtaaggacaggggcattcgtctcggggtaatcctggcgcgcgaggtgcggggatgctgaggggtgccccgaagttttcgaccgtctgagattccaagatggggcgctctctttccggggctgagtggcctaggaaagtttggcagaaactgagtagagtctcccgagtcggtcttcgcagcacccctcctccccagccccggcctgcagggtgggagtctcagctggaaggctgcagggcttggggaagcggtgtgggtcacttcccctctagcgcagagaacccacagctgcttgcgcttgttccagggaaggaaggtggcctccgtcagcccatctcacactgttgtcctgaggacccccttgcattgacagtcagcttctctgtgtcccctggtcctagactggcccattcctgttcccccacgcccctctctctacctcacacctttaagccctgaatttctggcctagggcagtcactcccggcttccccgccctttccctactctgctgacccttggcaggattctgcaccccacaaacagggccagggctccccagacctccctgcccagacaaacaaagctgcagaatctcccagcccgtctcaggtctggtcacgcctgctctggccccgggagcccacctgtatcagttccttgtgttgggtcaaagattctggggccagtggaccaggatgaggtccatttattcagagccaggcgcccatctcaggactttggcccccggcggcctctccctgtgtcaagttctccagatatgggacagatcagggcaaagcagggcctcttggagggaatcctgatccagtgtgaggtgcccaagcgccagtgacagggagtctaataataacccctgacgacccggctgccatcaggcccaggcagatggtgcctgccctaccagagggaggggagcatcaggaccccttcctggggttcagtgggcactcaggagcaagacggcagtcggtggacccacccccctcccccagagcccagcctgtgggagtctgtgttccctgagaatgtggctgcctggggatagctccagggaatcttcctctcccagagaatgcatgaaaagaggcggatatgatttcagaaacagccgtgtgtgtgtgtgtgtgtgtgtgtgtgtgtgtgtccccatcccaaaccctgtgccccacatcccacacccggggtctccagccatagttttctcctctccactggaggaaatctaaacttttcattgggtcaagaagacccctaggtggggg

SEQ ID NO: 1887023 - DNA, 4001 bp, Homo sapiens; identical to SEQ ID NO: 1244339

SEQ ID NO: 1887024 - DNA, 4001 bp, Homo sapiens
gctacctgctgagaaaaatagtatgaaatgtcacacaaaggactggggtgcagcaggaggactctgaaagagtcatacgtgtaaaccagcaggtcttagaatgccctaatatactatatgaagtttcagagtaaacaaatggttaatgacacatcttttgtaacacgtgaatcagctactgatttgcaagagtgggacacaccctagtacctatgactctaaagtacctgtttgaaaagtggacctagatgtttgaattgccaacccatcctaagaccggaacataattttacaactatgtaagttgccataatttaaagttaaaaagatcactgcctttcattataatggaagttaatttgagaacttcattaaaacattcacaccgataatcaaagaacagtagagatacaaagtaagatatagccaatcaatcctaggaagcaaacacaagaggcaagagaaatggcaggtaaaggaagtgaagaatagcaaattcaaaaactacaatattcccaattctaaagaaaaatgaataaaatgaggctggtaatgaaaaaataacacatcttaccttaagaggcatccaagtagcattcatagtgtcaggatataaagacaatactcagaaatgagcaagaagtcttagaaattccctcggttaccaagtataagcaggtaggaaaatcttttgtttcgagaaggtatctgaaagagaggattttcatttagactaaaaaataatcaagacaatgcaaatagtttaagctacctgggcagggattttgaagtactatttgcctcatcgcactaaaaaagtatagaaaatacagtcccctttagaaaagggcaaatgtgtgtctccatatatatgtgtgtagaaacatactttacataaaaagagaaataaatatgtaacacgtattttagataatgtaaaattgcttatcaaacaattagccaaaatcccagagagaataaagtaattttccagggtacttcataaacactaaacgtgatttgttaattaaccgtctaaaaaagacccttgccacatttaattatatttagtaaagtaaaacttctctaatcatcccgactgtcccaagattatgcttaagtttcagagtcaattccacatgaaaagtaaaacctattcttgactgaagtactagaaacaaataaaggacccttcttccccagagatcgttaaaagcagaccgagcaacttaattttgagggtgggaggaaggtaaatttgcctggaggcaggaggatggactaaatgacctctggtaggatcctcgttcaagtcctgggcctgtatacaattccagcttaaccagttactgcttcgcttaaaatggaggcttgcccgcgtagggacaaaaataacagcacccacttcttaaaaataaatgtcgaaaagtacccctttttaaataaaaataaaaaataaacacctctggagtggatgtgttcttgctatgcgtttgtcactgaggcttcgaagacttggcatcactttccttaccgctcaccggattttgggggaggagcggggggcgacagtttgactcttgacccaagtctcaggcggacttcagagccccacaggggcccccaactccagagccagagggagcggagaggcgagagcccgagatcgcacctccccccaccgcggaccccagtcccaaacccacccctcacctccccgcagtggggcgcctccttctgccccattcccattgttagggagggcagagcgcggggtgggctcagggcaggggcgcccgcggccgctgcccggctcgcttcaggaggggcgccccgcgggatgcggcttcccttcctctccgcgtcggtccgtcccacctcggctcggcctggcgccccgagctccgctccgcgcccccggccgcggccccggcccgccccccgggcagccaggccctcaggccactcggccggcagcccgcgtcccaggcctacgagtgggcgctgggcgggcgtccccgtgccccacacacgcgtcccctctcccccagccccgccgcttccagggccctcggcggcgcccgctccccgggccccgcggccccccgcctcccagccaggccgctccctcgagctcgtcgggtcagggacacctcctctacctcaccatcaccctggcccactcgtgcccccacccccaggggcaccagtgccaaaggcagctcccccagccccggacctacctgcacggttcaaccaagcctagaagtgggggcggggaatcttccgccctcctctggcgctcattggcccttcaggggcacatcgtgagcgccattggctgagcaatggtgtccgtcagagcgatggggcgggacagaaggggaagagggatgcaggtgccttggcgtctctgtctctgtgcatctcgttgtctctgtctctgtctcagcccttggaaacgagaggcttttggctgagaggactagaagggggcctgaggtgggaggaataggaataggaatcctgacagagcgtcacgccagttggcaactctgaaccccctacctaagtcccctttaggttctcttctccatcacccccaacccctgcccctcacccctcgagattctttcatccaggaagcgacgtgatgaaaactccaggccggaaggccatagggagagatgttatatatgtatataaaatatacacatataaatgtttatatataaactcaaccagatatcagttcactagggcctggaaaggaaagggcacacatctcacagacagggaaggacttgagatagagccggtagaagaaggaatcaaaaatcactctaagagctggcaacagtggttacctcctgggagaggaactgagtgcctagggaaccagtgggcggaagacttacatatctcggcatatcatttgtatccattgatttttgcaccactcatcaagattccaatttaaagaaaaggatttaaatgtttaaataaggtcgcaaaaccaggggacagacaagataattgggcaggaaaattggcgcaacatgcagatttggggaggaatcttagcttttaatatgttcagttcccggtaacagggttttgtaaaacccagtgaaggtgtcccagaggcaactgaagttatggaacttgagaaagggtagacaatcaggactagagaagatgcagggtcctctgcctaaagatagtgatctatgacatgctaaaggataaactcccaaagaagggtaataagacacccacagtaaaaggtaggaggacgaaaaagaatgtcagtgaggtaaaagaaacaatattaaagaggcatgaaaattaagggaggaagggtctgtggaaaatagaataataaaactatgagagaggccgggcacggtggctcacacctgtaatcccagcactttgggaggccaaggtgggtggatcacctgaggtcaggagttcgagaccagcctgcgcagcatggtgaaacccgatctctaatagaaatgcaaaaaaaaaattagccaagcgtggtggcgcgcctctgtaatcccagctactggaaaggctgaggtgggagaattgcttgaaccgggaggcggaggctgcagtgagccaagatcgcgccactgcactccagcctgggcgacagagcgagaccctgtttcaaaaaaaaaaaaaaaaaaaaaaaactgtgagagcctcataggtcttacctctttacctctttaggctctggtaaccatgggacaataagaatgaaagccaaggccgggcacggtggctcacgcctgtaatcccagcattttgggaggccaaggtgggcggatcacaaggtcaggagatcaagaccatcctggccaacatggtgaaaccacgggcatggtggcgcatgcctgtaatcccagctactcgggaggctgaggcaggagaattgcttgaaccagggagtcagaggttccagtgagccgatatcacgccactgc

SEQ ID NO: 1887025 - DNA, 4001 bp, Homo sapiens
ctgggcgcagggaggcggcggggggctgctgctgaccgcctcgcagcgctggccgggctccgggaggagggccccggcgggtggcggcgcaggagcccgaggggacagaccgggcggtggcgggggcggcgggggtggtggcggaggcggcgggggcccagggtcccggcaggccgcgtagcgctgcacggtgcacgccgcgcgccgcccgaagcccgcctccggctggaagctgctctctcgcctctggccgccggcgtagtacccgggcgagtggtcgctgggtaggtaatcgctctgtgaatattcctcgcatggagggaacttggggtcgacatagtttgagttgatcaaaaaagaactcatagccattaatttctgggaattgcccacaaaatatactaaaatttattccgacccctgactcgttttcctgtttccgaaagccctcctacttactgtcaagtgaacaaagttaggcgcccacgtgatcctccgagccaatggccgccccgcctgcgattcccggataaggaaatctgctcacccggaccccactccagccaaagaggtttatttccccttcttcccttccccctccccacccacccacccaacaccaggatttacatagggctcctgcggggcgaccccctccttgcctcgctctctccgggatcagagagagagcgagagagagagcgcgcgcaggttgcgactggagggcctgttggggcgctaggcagagcgcaaaccctagatcccttaagaagttggggctcccggtgtagccctcctgttctgcctcacctctgcccagcattctgtaccttccaaaggccccagtctcctcccctcggcgggagggagcgctagcaccctgcgtctctatggggagttaggttactggcgggttgggggctccgtctcgaaaggggaacccatacgggggccagagcacagagcttggggcttttctctgcagctggatggggaagggtaggggtgagagaggaggcgtccagagctagagggcgggtgcgcagagggacttgtcagagatgaatggaaccgcgggcggatcgataggaaattcatgcactaattcggggagacttcgccttccaaatctcatttagctgcacggttagctagactgtgtccgtcagtccgtctgtcccccttctcctatccactcctccctttaacccacacggcccaagcctggagaaacgacttggtttcccacactatagacagagcgctggggtaaaaaaacctgcaacttttgagagcaaaattgattagcaatttgctaattccataaccacccgagcaatactaaccatgggtccgagacgttctaattgtcgccgcctccgcggcgaatagaaatctcacatccctttgatactggggatacagccatagaggtgacccacacagacaataacactccttggtaatcgagtatttccaggtcatcttgttctgaactgaaacggaaaggcggcctcagcatccgtttgttaaacaaatttcctttgccttcttcgcacactgaagacaagtcattttttttcgcaatttccaataaagcctccctgagcccagaatagaaaatgggtgcgtttgggacgagaagataaatttaaaacttcaacaacaataacattaacctcttaaagagatgtgaaaagggaccaaggctcccaggggcaggcgtggggagagttcaggtagatgatttctccatctctaaccagttgaaggaggaaaagatagaggaataaagaggaaggagtcttcgtgtggccagtcaccagactgtcctcattcagaaaaatactacatatacatatatatatatttttttcttctggaaaaataagagcggagtgtttatgtcaactacatattcccctagatacgaatttgtgaccacaaaattccttacacaaattcggatctacagggtatatacagaagacagacagatcttcttggcccagaaattttccagttctcctactttccgcgccttcttcgtttggggtgtggtttgagtgctttggttttatttcgttttgttctagttttgagctctgggaacagaaaaaggcagtgcgagtctgttcttgggattacaaggttttcaattctcctcttctattagaatttcaagtagccagttcgcaaagggacgagaaccttgcctccgccgccgccgcgcaactctcggtggcgcatgaattatgagatgtaaacattagctaagcacaaaaggaggaagggtcattctgaggctgccacgaagtcagattcaggcctttctgggtgccttcgcgcccctcccctccccccaggactttttttttttttttttttttagaaaaaacaaaaccccaatcggctcctccgtgcccctccaagcctttagtttgtgatcaaacgaatatctagatattttccaaagcgcctctcagcgaagggaggaggaagaggcggctgggtgtgaaggtggtgtaataaaagtccttttggaaaaattcagtggtaaaaagagagagaaacagctgtaaagaaaaatgctgggagaccaagcagatggggccccggatatttaatgacgggcaattccgtttacaacctgagaaaagatcaaaggcgtttcatttccgaatgaagggcaatgaggaaccataaaagatgcagccagatgatatagggcccctcccagcctctcacacatcctgggagccaggagagagggtctatcccggggaggtgtggggaggaaccccatttccccaccttcctagccccagacgggtcctttccttctaaacacatatgaactcgcctagccacctgcttgggttgctggtggtagggccaaaatgggcatctggggtttacgaaccaactttctgaagctcccagaagccgtgaatttactaagctgagagtctggggattgggctggagggaactgagactgtgaaagctgtgacagagtaagggaaaatgtgcatagaaaaagcctccaccccacccagactccctactcaactccctaggtctgagaaatacttgcatctttagtgaggaagtcaaaataatatcaatttcattaacaaatacaggaacaacacaaaaacaaccctctaactgcaacactccagagatctctgcctatgcccagtcctgggaccttgcaggtgggtaggaggagagttcccacctgcccacaactaggtccagagaccctctgattttcttttaatcttaaatctaggaattgccaatgttggcctctgggcctgatttctaacatcaacattctcccagacaggctgaactcacacatatttgggagaaaaaagcaaactatcacactatggttgtctttgccaagagagggtccaataggtaatctcagacccccatctgggcactcagggagactagagtctggcccagggcccacagacaaaatgcgctgctaggatccccaccagctccctagcgtcaaccagggacctttccaaatcttgtcataggccacttagggtctccaggacccactccaacggtccaggcccctcccccaccccatacctcctgtccttctcaactcgccagctctcggaaacccgtccaacccgtcggcatttcggaagtttgggagggccgctgggccggcggccgggcctctctgctgctctacacttcacaagggatgcggcccaggtgccccagcaccccaagagagaggaacaggcggcagagccaccgcgggtttgggtatccttgatcctggcgcccaagagcagagatttttctcctctgcgccctggaagtcaccacctgccaatcccaccaaggcgccgcacccccctcacccctccagccgcctgagatggagaacagggtttatgggcgactcccaggacgggtttcaccggagcgggaggctgcctctccccttcaccgcccag

SEQ ID NO: 1887026 - DNA, 4001 bp, Homo sapiens
cccaaagtaatgctgaaggggctctgcttccagaagggcctggacaacctcagaggtcagggtgttgagccagggggctcaccttcctctcctgccaaggggctgccagaaagctggaccccagccagcggcctcccacctctgagaggtttccagcccccatccttggactgtgggtaggggggcagagaggggagtgggcaggctgagggtctgccatcccccggggtacctcaccattccagctcccaataacagggttctgtccttgccaagggaggctggtggccagaagcatggctgaacgggtgattctacttaaccccaagcctctaaggagggtgccatgcccagttagttcaaggaacaatgtgttgcggtatagaaaaggccacacagctttgagtggcagaacctggttatgtcaaagctcccatcccacatgccatcctgctgcacggtctggtctcctggcagcttccacggcacaaggggtagggacagggagagccctggaggtggggccaggaaaggcccaagagcccccagctcctgtgggggaggggctaaacaggagagaaggcagccccaggcctaggctctctgaaaatgagactttattatacaaaactattctgtgtgcccccagctctggccaccaggctgcccctcaggccgatgggcagcggctgacttcgggaaggcagcccttcattatcagagactgtgcagcctgtggagccttcactgggggaagctctggggtgggctgggccccaacacaccctgtgtatcagaaggcccagtgtcatagcccagtttcctcatgtccttggtcaccacgttgaagaggagggtgacaaagccctgagaacggacacgggtcactggggacagaagggcagcatcagccaggctgggctggggcagagagagacccaggttgatctgggaatctcagcctcagcgttctcatctgtaaaatggggacaacagtgcctgacccaagcccctcactgggaggtaaaggggctgccgggacaggcagacatgacaaaccctctgtgctccaaccaggccctcatctgggaacatttgtgggctagctcctatgtgcctggcaggtccccggcattcaccccaaccctgggcccacccactcccaggctgtaacctgtatgggggatgggggtaagagaggggagggagctttaccttcccggccttcaccctgagccaccaccttggggtctgtgtactcgggccgccgccccatgaaccagctgggaacacagaagaacacaggtgagcagggccccacctgggcattcctggtcttggacgacactggatgtgggctctcctcggttcagaaaccagcactcttgttccaaccgcaccccacccccaccaggagtcaggccctaagcagagccttcccagtggctgggctccagcgtggggtgtcccttgccgaggtcacacagcctagccaggcctcatgtgctctgcagccacgctgcctccgctggccggttaggcttttccatctctggcttccatgggtttggttcactgggaatgagagctcaggaagattctggggtgggggtgctacctgaacccccagaaatcccagaaaagtgacagcagctgaggtgggggaggggaggggacagtgtgaccctccagcctccctggaagggggtcccaccccagagagtctgtggggtgggcagaagggccagaacggctcctcagccttacctcccactagtgtggggtccaggacatgtcacttcccatcttggcacccaccgcaggccctgccaggggcggcacacagccaccaggctgagcatgcgccctccccagccccagaccccagttgggccaggcgggaggccaggaggccgggggtgtcaggccccgccgccgacacacccacgcgagccggaaacaaccaggagcactattcccggccgggtgggtccagcagccgcgggcttcgccccgccgggactcgcggccgcgcctcctctgtaccacagctcccaaggtccccccacggacacacccggccccgagggtcgctggcaaccatgccgacccaaaagcccacgcaccgccctccccgcggcctctccgtctctgaggtgggcaccagcgctcacctggggcggctgcagaggggcccaggccagggaggggctctcagctgccgcagagttggcctgtggagaccacagccagggagcactgcccaccagcccccaaccccaaggagggagccagagagtgaaagccagcaggcgctccccaaggggaagggatgggcagccacaacccctgcgcctcagtttctcctttgggagagcaagactctcacagcacccacctcacaagaggctatgtatgaggactggggcctgggagcatccccactgtgcccagcagatcccatcccggagctcacatggagctcccgttcccactgaatttctttcctggggtccacccgggtggtctgcttagctggctggggttggggagacaagacaggctgttctgggagagcattccaggcaaggacctgaggcaaggaaggacccctcagactgcaggaactgaggtagatgggaagcaagtgggcagaggccatgaggtaggcagggcccgaccaccggcctggcagcattctggttgaagttcattctgacagagacaggttctagcaggggaggggtgcagccccagttgtgttttaggaacaccgtttttcttgctatgtgaagactagactggaggggtggcagcaggctgaatgacggcccctcaaagatagcagatcctagtcctgggaaaccgtgcacgtgaccttattgagaaacagggtcacgtgcactttgcacagatatgattaggctaaggatcttgaggcgactatccaggtggaccctaaaggccaggactcgagtgatgaggccacaagccaaggaaggctggggccaccagaaactgaaagggcaataaacagagtctcccctagagccttgggagggagcacagccctgtggtgccttttctgggcccagtgacctggattttgaactctggccttcagcatacatttctgctgttttcagctatcacatttgtgtgttttgttgcagcagccaccgtgggaaacgaatacagtggccaagagtgtttggggcaggccctaggccagcgctggaggatgtggggagaggctgggagaggggtggggatgaccgaggtgtcagcctgagcaaggagcctccatatctgggaagattctgccaatcaaactgccttcactaatcagaactttctccagtttttgtaatccaagcacatactgccttgcccagttgcgagcccctccacaggggctgtgaaaccctttcctcagcgagctgtcccctggaggcccaaagtcctccttggagctgtgggcggtggaacagggtgaataacccagcctggatggctgtgtgggtccccagtctcttaggctttcccaacccactgatgggcactgcctcgctgcctccctgacagcctgtggcatggggattgtcacctccaggtgatactggcccaggtcatctgggaaagaagtcctttgctacagggtggcctcccagaaggactcctaggggcagtaggcacacaaattctcaggctgaggccagcggagaccctgcccttcctcccctccacggctctcagagctcagtgaagcattctcggccctgggcgcgatgctgtccctccacccagcagggctctggcctggtctcacgcccagtactggccaggctcgcaggggctgcttgccggctgctgccctggaacccagggagtcctccatgttccacttgtgcctcactaatctgccggtgggcggcagaggcttgctgcccaactgcgctaatggtcctcgagtcagaaggccagggcccagctggccctct

SEQ ID NO: 1887027 - DNA, 4001 bp, Homo sapiens
gaaataaggcactggacaattccttggaagagcctcagaccaatttatgaggcacacaacccaagcccaagagatgtacactggctcagtttaccttaaatggaagatctcacccagtggcctcttctccttcctagtcaattgaaaaagagcttctctttccctctttaatttgtccttatcttctgaacagctcatgttaccaccataaataacttatggaacaggatgcttttaaaaaaaatgggcgtttaagtcttatcttggctgggcgtggtggctcacacctgtaatcccagcactttgggaggccaaggcaggcagatcactcgaggccaggagttcaagaccagcctggccaacatggtgaaaccccatctctactaaaaatacaaaaaattagccaggtgtggtggcttgagcctgtaatcccagctactagggaggttgaggcaggagaaccgctcgaactcaggaggcagaggttgcagtgagccaagattgtgccactgtactccagtctcgcagtctgggtgacagagcaagactctgtctcaaaaaaaaaaaaaagttatcttgaatagtggaacaagcatgatgatgatgatgatgatgatgatttttattttttcttgagatggagtctcgctctgtcatccagactggagtgcaatggcatgatcttggctcactgcaaccactgcctcccgggttcaagcgagtctcctgcctcagcttccctagtagctgggactacaggcacgcgccaccatgcctggctaatttttgtatttttagtagagatggggttttgccatgttggccaggctggtctcgaactcctgacctcaggcaatccacctgcctcggcctcccaaagtgctgggtgagccaccacgccctgccaacaagcattattattatttggaaagaatgttccctagtgagagacactggagccaagaagacagggtcacttttctgaaagctaggacttgtgacttgtcttatccaaatagaggcttcttacctctttttctcccacttataacaagtgaccataggccaagcacagtggctcacacctgtaattccagcactttggaaggccgaggcagatggatcacctgaggccaggagttcgagaccagcctggccaatatggcaaaatcccgtctctactaaaaatacaaaaattagctgggtgccgtggcacttgcctgtagtcccagttactcaggaggctgaggcaggagaatcgcttgaacccgggaggcagaggttgcagtgagccgagaccgcgccgctgcattccagggcaacagagagagactccgtctcaagaaaaacagaaacaaaaacaagtgaccacagtggtgctggtccacaaaagggtcttgcaatctgcagataaaaggaactaagccagggcaccacactatcacacggagggtgattcggcacctgccctgtcatgcctggtgcccaggccgaatggatttttggagtacacctgttgttgaacccctgccaagtactgatggccactaacccccaaatcacttttccccactgttgatgtttggaatgtcagacaggactgagcagcagccggcgtgtatttcaaacacagcagatggatttttatattagctcctatttcatgttcaggcagagcgaccgccacgctaaaaccacagcctcaatgctgccgagtttgcttctgtgagattaattctgtgaaattaattgggacaagattgaaaaggaaattaaaatgcagctgagtgaacaggcctttcaaacaccttttccctgctctattcaaacttgaattctgcggtggtcgccggcatcgtgggaagtaatttacgagtcgcaggctctcaggagccattggttacgtatgaggagacctgcaccagcgccacaatctggagccactgaagagcgctaaacaccctgctgtggcttgagctgcatcctggctccggggaggaagggaagtttagtccctcaccagaaaaagctgttcagaaatatctgagtccaaaaggaacacaggaacatccgctggatgcacagatctgcttcgttattaaaatctccctttaatatattttgagacccaaattggaactcagtgaattaagtgggcatgacactgcatggggccaaggaatgcatggatgtgatgcagggaggtcagtgggagtcctcctgctgactgtgccactggttactgtttcagagtttggatgtgtggctctggtctctccacaaaatgaagtttgaataatctgtcagggacgaaagctctcagaccaggaaaggcatggtggattttcatgtaggcctcttcactgggtatttttttttgtatccaagtgagcgacttttgtgctgtagatcatctctttttcaataatttattgaactcctagtatgtgcccaacactgatccaaaagtttattattagtaaaagggaaggaaatattcctacttcctacatgccaggcacttccttacacaaattctctaatgtaaacatcacaacaaatgtataaatataaaatttcccaatttttacaggtgaggaaactgaagattatcaggattaggagatttttgcccagggtcataaataacccgtctgttacaggcacttacttgcttccctgagaacaggacaggtgatgggcacttggttatctctggggagcatctttttttttttttttgagacggagtctcgctctgttgcccaagctggagcgcagtggcgtaatctcggctcactgcaacctctgccttccagggtcaagagattctcctgcctcagcctcctgagtagctgggattacaggtacctgccaccacacccagctaatttttgtattttagtagagacggggtttcaccatgttggccaggctggtcttgaactcctgacctcaggtgatctgcccgcctcggcctcccaaagtgctggggttacaggtgtaagccaccgtgcccggcctctttttttttttgagacagggtctcactctgttgcccaggctggagtgcagtggcactatctcagctcactgcaacctccgtctcccggttcaagcaattctcctgcctcagcctcccaagtagctgggactacaggcatgcaccagcatgcccagctagcttttgtatttttagtggagactgggtttcaccatgttggccaggctggtctcgaactcctgacctcgggtgatctgccagcctcggcctcccaaagtgttgggattacaggcatgagccaccacacctagccactggggagcatctttcttgcccagtcaatcatcttctctggataatttttttttttgaaaagggatagccggacatggtggctcacacctgtaatcccaacactttaggaggccgaggtgggtggatcacctgaggtcaggagttcgagaacagcctgaccaacatggcaaaaccttgactctaataaaaatacaaaattagctgggcatgggggtgcaagcctgtaatctcagctacttgggaggctgaggcaggagaattgcttgaacccgggaggtggaggttgcagtgagccaagatcatgctatcgcactccagcctgggcaacgagagcaaaactctgtctcaaaaaaaaaaaaaaaaaaaaatgcgataaatagctctctttctgtgatcattcttgcccaaaggcaagactaaaagattctcctctgggccggttgcgctggctcacgcctgtaatcctaacactttgggaggccgaggcgggcggatcacgaggtcaggagatccagaccattctggctaacacagtgaaaccccgtctctattaaaaatacaaaaagaaaaaaaaaaaaagaaaagaaattagccaggcatggtggcgggtgcctgtagtcccagctactcgggaggctgaggcaggagaatggcgtgaacccaggaggcggagcttgcagtg

SEQ ID NO: 1887028 - DNA, 4001 bp, Homo sapiens
ggcaggagggggtgctcggcccagagttggagccaccgcccctgcaggccaatggcccagcacccctgctaactgcccttccatctgtctcctcttgctgacccccacgcccccgaccagaggctcagttgttccatgaggggccagaggcagatcccagagccaagaggacccatctcagactccagaaagggcgcgatgagctgtaggcaccagcgcctcagcctggcctcagttcccccatccctccctggcgggcagcccaggctgagccccaccttggggcctgagggtctagaggcagggaaccaagggacagaggtgagggcactcaggccagctggccctgcccatccagaatcagcccccagcacctctcagccacccacatcccgagcagcccctcaccccgggctgtgcctggggtcccaccctcccatggcgcagcttcggggacaggaattccatcaccccctgccccacagtcctgtgggagaagcaattaagtgcccccacccctgccgggacaaggagcattcctggatgtctgggagcccagagccaaccggccacctttaccctgggcagcccacctgccaccgccatctgccccagcagccttggaccttcacctggtggccacaccacctccggagctcccagaactccttaagagcctggccccgtgcagcctagggctgggccactccctgccaggctgctattttgaaatgtagaggctgcacctgtataggggataccccacccccaagtccagggcacattcctgcgctgagagccaaagtctccaaagtcctgggcccagctgaaagcaattgctccaggcacacaatgacagccccaatccctgagcacttggtacagcctttctgtccttcctcacaacccccagtgccctggtggggaagctgaggctcagaggagtcaagggacttccagctggatgctggccagcacccgggctggtgagtccgaggacaggcaggtgcagtgggaggggaggcctgggctcctcaagtacgacgtgtgaccctggggacgcctcccttccctgggctgcaaagagaggggcaggtggctctgtcggtattcccgcaggccaggcccagcctgccctttcggagcacacagccactcagggatgggggacgcaggtgctgcgtgggcaacttcccctccccgggacccagaagaccaccccagaagccccctcttgggccctccaatcccagccccggcctggccccacccatctgggctttgtagaggggcccaggacacagatgctgtctctccctggggtcgggcccgggctccaggcattacctgctgcccgggggccagccgggtcctgccgatacagcgtgcaatcaggtagcacagggtcagcattgggggcctgcccagccccttccctcagcacagctccccaccagggagcccagcgcaggtccccaaatcccaggagggagcccagtgtggaggcaggacttcccaggggcacactggtgctggaatgttccgggcaccatgttcccaaggaggtgaggagggcgcaggaggaggagctatggccagcccttgtttggggccttgttcttacagtgccccaaggaggggccacttatacaatagccccactcgtcccacccaggccccacctccactcctgctcccgccaagaccttgaggctctggcctcgggatccccaggaaggcgcctgcgcggcctggcctggcccctggtgccagcgggtcaggggtacatcccagagcagggtgggggctctgggcaggagtgcagaccccacagcctggggccacagctttgccccccaggcacgcagctcctcactggttgatggggcctgtggccacttcagagggctctggaaggttgaatgggctggaaaatgtggcctttagaaaaggcaaaaaggccacatccagcaccgtcacctgccaggccagcgggacaggtgggcagagccagctccttggcccattctgcgtcatgacataccaggggcagggaggactctgggactgtctcccaaatgggggtggcgccagctgagtcatgggtcacttagtaggaaggcaccctgagatacagacagggtgctgtgcgcgctgcagaatgcctcctcccaccctcctccctccctgacttctcctggcgtaggaatctgacctctggcccaggggtggggctgacccccgtgggcgtgtgaaccaccagaggtccaggccagggtgtcatttgctcatcagcaggaatgggacccatggagactctgggagggggaggcgatgctggccggggttccttctgcctggccctccctgctgctcagagttacagctggaggtgggctgggggtttgcagggggaggagcagtgcttggcacctgtccttggccaggggccttggcctccagaggggcagcctagtgaggccaggcctcacccttggcggggctccctaaccagcaggctgggctctagcatcacacatcgtcccctccagaaggcagaagataccccgcgcaaggtgactccaactggcaagaaggtccctgtgccgggaagcttgtctgggcagcccggactcccctttgcagattgaattcggagggacgtgagagccccttgcagaggcagctcctccaccaggagtcgggcctctagggaggcaagccccctcccacaccagctccagagcccccgacgccccctgcaaggctgtcctcagcctccgtgagtgctcgggcccaaccccaggctggagtgggagcgtcagaccacgccccccacagagggcctcaaagtcgaggaagctggggcaggtccctgaggaggagctatggagtccctgggccagggtccacgtggtccccaggtggccccacagcaactacggccacccagcagccaccttgatggccccaggaaggagggaagctcagggtcaagtggacgctacaggccttgcctgcgggatcccacgacagctcccgcggcccccaggcctcaccttgaacccgataccgcccttcttacagcacaggcaggccagcatgaggacgatgacggcgaagagcccggagaaagacacagccaccacggcgagggaggatggccaggacagctcgctgagcggggcgccgtctgcgggagagcagtgtggtgagagtggccatggctgagggccggccaggcccctgcccctgctctgggctccacagccccacctggacttgctgcattccaggctgggcctcagcaccctgacctctcaccccagaccccacacctcacagtgtggcgaggaggtggccagagcctgcagtcctgcagccagccactggacaccaccctggcttcgccagggggacatagggttggcagagtgaccagagcctgcccagttcccaattctggggttcagatacccctgagaggtcagggtctcaggggctacagggggacccccatctccctcccagatcccagtcaccccaccttgcccctctggggctgggaagggaacatggactctgtcaaacacgggagaccatgttgctggctgctatctgctggccacacaccaggctctggacagcgggggctcaaggcccttccagcctctgaggtgcggggacctcactgtccctgagaaggtggtgctgcctctgccaggcagcagggctcccgtgtgccacctgctgcctcgaatccgtccccttgccaaacccactgccaggcccctctggtgctgcttctgtcctgggaaccatggggaaaccccgttctgcagctgctggtccatggagcccctcatcccagaggggaactgacagtacagcatccctcccaacttcggagtattgagctgagcccggcttccaaatcaggacacctgagctgagccaggctttgaggaagctcggtccatctgctgcccacaggatggcat

SEQ ID NO: 1887029 - DNA, 4001 bp, Homo sapiens
tgttggccaggctggtctcgaactcctgacctcaagtgatccatttgcctcggactcccaaagtgctgggattacaggtgtgagccaccgcgcccagcctttcctgttaattttctagcttgatgaaaaaatattcatttaaaaaaattgttaccaaaaatattaaaaagaccctaacacaaggttcacaatttataggattaattccaagtacttttaacatgtctctgatgtgtctgaaagttacaaatacttttccctttggggaagttggtggagaaggcttctgtgctcaggtccccaaacacgggtagagtgtcagactcaggaaccttctgaccctggcacagttgggactctctgaggtccgggctcctgatccctgaaaatgacctctcttcctgcttgtttctggagattctgggtacccacttccctacccagttacaactgacttggcaagtgggaaactacagttctctccctgcttcagctgtttgtttttttgagacggagtctcctctgtcgcccaggctggagtgcagtggctcgatcttggctcactgcaacctccgcctcctgggttcaagcaattcttctgcctcagcctcccgagtagctggaattacaggcacccacccaacacacccagctattttttgtatttttagtagagacggggtttcaccatgttggacaggctggtcttgaactcctgacctcaggtgatccatccgcctcagcctcccaaagggctgggactacagatgtgagccacagcgcctggcctgctaaccagcagtttgaaaacctcttttacagtccaatatttccttgggtatctaaatctcaccttccccacaccctttttgtctgctccaggtcccctggcctctgccacctctttctttccctcaagcagaggaggtcgctggaagaggaaccagaccccacacttcttgtgacctgcttgcctggggtttgcattgtctgccacccctcactcactggcgggttctcttgtcccagtttcagcttttcctagtgtttcttttctgtttgggactgaaaatatttatcaagtcaacagatatctttgtgttgttcttaacagtcaatagccatgttttcttaaagttctttaagtatgtatgttttcttgttttaaggagaatgttagacttatttttattattcttatagtcagcgcgggtatattagataggacaagcatggcgataagtgaacaaataaatgaatcaggtcaggtgcggtggctcacgcctgtcatcccagcactttgggaggccgactggggcagatcacctgaggtcaggagtttgagaccagcctggccaacatggcaaaaccccatctctactaaaaatacaaaaattagcagggcatgatggcacgcacctgtagtaccagctactcgggaggctgagccaggagagtcgtttcaacctgggaggcagaggttgcagtgagttgagatcgcaccactgcactccaacctgggcaataagagcaaaactctatctcaaaagaaataatcaatatgaggtttatgtttcttagtcattattcctgttcatggcctgactcagaggcctggggcagtcggaaagcaggaactcaagaagcctttcttggacatggcatcaatgcataaataataatacttataataataagtaattggtactgttcttagcattttacatatattaactcatttatcttggcaacaaccccacgttgaagattctattaatgtatccactttatcgatgaggagacaggcttagaaaggtaaagtagtttgctcagtatctgcaactacagtgcctggcaactagaagcaccccactgggtgctcgtcctggcgtttatggcttctcataagagaatcccaaaggggagaagatcagcctgcatttagcagtccacatctgcaggctgatcttcttctcttttggattctatctcttgctgctctgatgacaaactcttccagtagcccagtagccaggccatcccctcacttactatatccaccctatctctgcctcttgaagcctgacccatccttcagggccttgctctgatgtgacttttaccatgaagccatccctgatcccccaccaagatggaacgactctctcccgcctctctgttccccaggcaatttgttggaatctgggtggcagctagcaccacagtctgccatattatcactctttgttctgtgtgtgtgtgtgtgtgcacgcatgcctgcacgcacctggcttccgtgcaaagccataagtcttcatcgtgtttgtgtgtgtgtgtgtgtgtgtgtgtgtgtgtgtgcatgtgcctgaatgcacctggcttctgtactaagccatacgcttcctgagggcaaggctttgtctctgggaatctcttgcaaggaacaggcccacaatgaatgctgctgaaacagggagaatggattgagtcttactgggaatcaccagggcaagtaaatacacatattaaaaaataagtatgctggtccctcaaccccacatccttggctttcctggggactggagtttggaacaaggattcagcctttgacaaatgtctaggactctgtctgcaaggtggggccgcttggccagtggtggagccacactccccagggaccttgtggtcctctccactccggagcccctccccgccgaacccctcaactctggctgccccctgcactgaagcgctcaggaccctccacctcagcaaagctgaggatccagtcacacgggaatggggtgtatggggaaactggagccccccacccccttcaggcttcaggttctgccctgattatgcctccaatatgactcccagggaaggcaggggttgggggggggatgtggagactaaggaggacggggaagcgaggtagcagagaggagggcaaaggcagcagaaataaaggtgtgcgtggcgggaggtggcggggctcgacctcgggccgctctggacgcccggcagtgccaggcagggcccgggtctgggcggtggaggacaacttctgccagcagcccgccgcgagtcctgtccgcctcccgcgcgctgcggtgcccagccccgcgccagccctcccgggggagctggagcttggccgcgctgctcccccctggggccgctccggcgcccacaccccccacgcccaccgaccggcctcctcaccttcgggacctgggagtcaccggccggcggggccctgggtccgggccgggctgggtgggggcggcgctcttccccccacgctagctgcgcccggggatctgcagcgcccgccccggctgcggcgccatcagctgctgggaggctgcggggcagtcgggccggggctccggggggctcgggggcgccgaaggggggtcgggggcgggctcgaggcgtaaacacccagcaacgtgaccggaactggcgaacgagccggaggggtgcggggggcgggagagagaaagggggaggggagggacctgagacgggcggggaggggccgtgggcggggcggggggaggggaggccggcggcgcgcggtcggggggagggggaaccccgggagccccgagagccccgggaaccgggcctgaggcccccagcgggccgctgggctcgcggagctggctttggctggtagctggaagggcaaactggggaacccgccggtgccttggcgcgcaggggcgcggcgaaggatcagcaccgcggacagcgcccaggccgccaggccgcgatccgctccgcccctcccgccctggcgtaggaaggagaggcagcgcccgcagccgcgcaggcaaggcttggggcgaagcgcgatctgaccagtgggctgggaatccgtcccgtgtctaggcagcagcaaacctgccccagacctctcactagctgtgtggccttgggtgagtcacatcacctctctgggccgcagttgataagatgccctatttcta

SEQ ID NO: 1887030 - DNA, 4001 bp, Homo sapiens
aacacagaggtgttgttcctgggtaggggcataggggcattaaaagccccctttccagcttgcagcgagccgagaccgcgccactgcactccagcctgggcgacagagcgagactccgtctcaaaaaaaaaaaaacaaaagcctcccttccacctctgttgtggtttctgtatttctacaatgttttaaaataagtaaggctgactcagaaaggcttactagatattcagaaaaaagattttattcttctgctgaaatgtttgaaagtgaaattattttgtagagcattttccctttaaactgcaaagaagccccaaggtcattggtacttggaagtccagggagaaagagcgctgggttaatgatggagaaaagataggtgggcagactggggcgtagtcccttggtgtggacgccccagcgtgctcttatttcagtgctcaccctgttacgtgtgtctggggccactgactttctcctgcaagctgtggatctgaatttaactcaaatggggacatgggggcaggaaaagggacctgagagttctaaggggtggggatgggaaaactggtaaagaaggtggtttgtgggttttcagatgcacctagtagagggaagtgctggggggaccagcctcccgggccaggctggctggagctgccttaactttcccacctctgctcagcccaccagcttgtggacctgtggcagcgttgtgttgtgagaggcacgtgcagatttgggagtgctgcaaaccaaagtgttacctggacgagtaagcccagtgtgggagtgtgggtgtgtgggtctgcagtcacaggctctgtctttgcgatgggatgccatgggaaacgctaggattttacctggtttattaaattgctgagtggctaaaaagattcctatgggtggggctggcttatttctcttaaacgatgcccttctgagggtacatgtggtttttaggaacacaaaagattccaagtccctcatgacaaacacaattccggatctcttcctggaggccttgcaaggcggagtccaggctgctccctaggagggccctggtgactcgagcttgttggcgatcatctggctgaccttgtgcagggcctcctggaactgggggtactcgtcccgcacgcggtccaggatggtggcgatgagagccagtcgcttgtccaggcgctggcgctccagcactagggactgcttggagcggaacaggaacacgtagcgcccctccttcacagcctgcaggtgcttaaggcgtgtctgcagggccacgatctctgaaaggttctgggtaggaaaagagactccatatagggctatgcaaaccagaagaaagacacctgctggccccccacaaactcagattccaggaaatgccgaagaggaggcgagacctacgcctgaaaagggacggcgtgaaggtgttgcgcccctggatctcagggaagaggctgagaggcactgggtcggtgctttatgggtcacccatcatcaccatctaggaggcattcttttttttttttgagatggagtcttgctctgtcgcccaggctggagtgcagcggtgcgatctcggctcactgcaagctccgcctcccgggttcacgccattatcctgtctcagcctcctgagtagctgggactacagatgcccgtcaccaggcccggctaattttttgtattttttttttttttagtagagacagggtttcaccgtgttagccaggatggtctcgatctcctgacctcgtgatccgcctgcctcggcttcccaaagtgctgggattacaggtgtgagccactgtgacccgccggcattttttttttttttttttgaggctgtctcgctctgttacctaggctggagtgcaatggcacaatcttggcacactgcaacctctggctcccggcttcaagcgattcacctgcctcagcctcccaactagctggaattacaggcacccacccccaccaccacgcccgggtagctgagattacaggcgcccgccaccatgcctggctaatatttgtatttttagttgagatggggtttcgccatgttggccaggctggtctcgaactcctgacctcaagtgatccacctgctgcggcctcccaaagtgctgggattacaggcatgagccaccgtgcccggcttaggcaaccttcttgacacctgccgtgtgtcaggcccagtgccaggcacgttcccctcatcatctcagttggccaggccagaaccttggagccattctccacctccgtctctgctcacaccacagccaacccagcaggaatcccatcgggcgatgttggcataacgcatatgcagagcctgatggcttctcgccagccccacaggggccgccctgaagcactgcaaatagccccaggtgccccccgcatccatgcttcatccacatgcaatcttagagcgcgcgggagcccgctaaagcccaagtcacctctcagacccaacgccctcctctgtgtgcccacctccccaagagaaaagtccaaagtcatgattgtgctctccctaaggccgcacacagtctgggccgcccctctctgcctgggtcttacataccctaacctccccagcctgccccactggcctctagtagcccttgcgcagtctcaggcttctgccttgccgggctgtcctgtccacctggggtggttttgtgggctgtcccctccttcaggtctggactccaatgtctgctccgcagggccttcccgcatcaccctaactcaaaatgtcaatccctcagttcaccccaatgaccctgacgcttctttctctggtttatcttccttcaaagcatttaccaccacctaacacaccatttccctttttcttttcttttcttttcttttcttttcttttcttttcttttcttttctttttgagacaggatctccctctgtcacccaggctggagtgcagtggtacaaccttggctcactgcagtctcgacctcccaggctcaagcgatcctcccacctcagcctcctgagtagctggcaccacaggtgtgtaccaccatgcctagctacaacacactgtatcttttaaaattattttgctcatcatctgtcctcctgccccaggaggtaacctctaagagcacaggaatgtttgttttttgtgttctattttgtaaccctcgcacgctgaacatgagcccagcccataacagatactccatcaacatttgtcagtggaacaaatcacaaagccacaaacatgtgagcagccggtggtgctattactggcctgggatcaggagaggccgtgacctgatcaggagaggccgtgactcgcacagaggggacgcaggacctctgtgtgagtggcatgttccatggccgtcatccccagggacctcctgggacacgtttacctgtcgtttgagggccccaagccgggtgaggtcggcctcgagtgtgtcgaagtctgcctgaatcaccgacagcttttcctgcttctctaggagggagctgctcacatttctttgtgtttcttccagttccaggacggttttggtgcactcatcggtggcctaggagaatcacaggaccatgctgggcccctgcagcccggctacttggcggacagggaagagtcaggctgggaggacctgccaggcaccttccacacactccatccagggaggctcccaaagaggaatgggagggctggagaggcgaggcctgggagatgccaggcccagccagcccacactgcacactgctcctttaaggcaggtgtggcagagagatgggggcctgagtggttctggggctccccgtgcagtgggtctgtccccaggcaggagactggcacagttcagcagccgtgtgccaagggcagggctgaggctgtaagggccgagaggcaggctggggagcctgggagagaggagggtgggggcctctgctgagggaggagcgaggctggggccatctgtgtggtgttc

SEQ ID NO: 1887031 - DNA, 4001 bp, Homo sapiens
atctttgaaatagtatattgtgtcatctgggaagatggcatgactttctactcattcaggtcttctgtcgtttgctcattattaatcaacttttggattttttttcattggataattgtctatatatccatgtactaattacattttcgtggcttaggagtcagggctttctttctatcaggacctattgaaattgagcttttgctttgtatttgaagatgatgtttttttagcgggcagattttagctatccaatgttctcctcagagatagaagcatgtgtttataggcatgtgtgtctgttttctctctcatgtttccccacatttccccttgtgccccaggcacacaatgagtggcaccttttggaagaattgattatttcagaaatgcagagagctggaacaggttggcccaggggaagccatggagatcagccagcttattaacactgacttgtgaaagtttacaagtgagccaggaggtgaggggagggtaacgccagtgaaatgttgtcttcaagagtattcactatttctttcccccttggattacaggaagatgctgaaactctgtggagagacggaggacaagctggctcaggagctgatacattttgagttgcaagtagagagagacgtgattgagcccctgtttttgctggcggaggtaagcagcaggagtgaggccaggcctgaaagagcaaggaggtaccgaacaggagcccctcaatcattctgtttccagcattctacttctttcccttaaccttctccccaacattgtttttcatcagggattcttacctaaccacatggtcaagattcccaaatatgtccttttagcatttgctaccccttctcctacccattctcttccctgcaggcattcctagaagtaaggtggaaagctggcagcttacccgcttccccacccacagcctcgactgccttcatccccaccttccacccatctcaagtcttcagtgctgtgaacagcagccactccttactaggattctgggggcccaggcctcctgcagttttatgttttttttttgagatggagtcttgctctgtcacccaggctggagtgcagtggtacgatcatggttcactgcaacctccgcctcccaggttcaagtgattctcctgtctcaagcctcccaagtagctgggattataggcacccaccaccatgcccatttaattattatatttttagtagagacggggtttcaccatgttggccaggctggtctcgaactcctgacctcaggcgatccacccgccttggcctcccaaagtgctgggattataggcgtgagccatcgtgcccagctgcagtgtatgtttatatgggtcccttgtctttggactttaaaggacactcaattaaactattttattaaaaagcaaccttaatgcctatgtgaaaactttgctagcttcagccaagtgaaagcttctcacgggagataggaaatgcttggggagctttgaaccctgaatccctctcagttgtttttaattcgtcatctgttaatagattgagcatctcaaacctgaaacaatccgaaatctgaaatattttgagcaccaacatgattcttaaaggaaatgctcattagagcattttggatttcacatattcggatttgagatgctcaaccggtaaatatgatgcaaatattccaaaatcccaaaaactcccaatcccaaatatttctggtcccaagcatttcagataagggacactccatctatataaaatctaaccagcactatcccctagaactctgtattagtcagggttctccagagagagagaaccaacaggatatatgagaggggtttctcccctattaggggaagttgggattctcccctattaggggaagttggctcacataatcacagagggggagaggtcccatgataagccatctgtaagctggagaaccagagaagccagtagcatggctcagtccagaaacctcagaacccgaaactcagtccaggaacctcagaagctgatcgtgcagccccgaatatgaggtggaaagccagagagacccccattaaatgtcaaagaacctggagtctgatgaggggaaaaggcatctcactacgggagggagggagagagagagcagagagagaatcctccttcttccacctgtgtgtttcagctaattggatggtaccgctccattgtgggtgggtctttctcccagcctgctgactcacacattggtctcttttggaaacaccctctcagctacacccggaaaaatacgtcactagcctttgaggcatccatcagtccagccaagttgacacctaaaattaaccctcgcagactccctacaatgatggaaatattctcaatctgtgccgtttgatagccactgcccttaagtggtttttgagcaccagtgcgattcaggaactcaattttttagtttctttaattttcgttaatttaaatttagaatttcatagctacgtgcggttagaggctactgtattaaactgccttgccctagaccctgtctggcttcctctctgaaccacaacgagcacctccacatcccctgacactctctctgggacagaggtatgggccggtaattacttatggacctgaaactattcaaggagaaaatcgtggatgaagttctttgggattgaccagctctcagcttctcaagtcatctcctcgcttggagcattcacgaggtcccctctgtgcctcaaaaggagggtcccgggtctggccaaagcctaaagcaaaccaaggagcaagtccgttgtgggtgctgacagtcacttggctcaagcaagatacccagtggccctccagcttagcttcggagctgggtggtgactcaggttgcctggggacagttacacttctccttcctactggaagttgttacacgcagaacattactcatccctgctcgggagagtgaatagaaagcacttcagagaacattggattctcctcgaattttttccttatataaaaaccgcagcccgagatgattttagttcaattttcggccaattttcgttttgcattctcacatcctgccctacttttgctgggcccggaaccaaaatcctgcactgggatgttcagtgaagccatttttagaatgaaaaaatataaaaagagcatctacatacaaccaaaatggaagaactcgtagccgagaaaagccatgatggcaatgtttattcattattgactggaaaagtcttactttatttctataaatataaacatttgcttcctttctttttataaatatagaatctgtatcctagatgcagccatagcctctccacgctcttcctccttcagctgtccattttgcctcaggtctgtgtcagacatgactgcgtggctcccttcatttctccccacttttggcccttctggaagtaaagagggatgtggttgagccctggtttttttttggcagggcgggagttgggggcaaggtgagggcaggaaagtggccaggcctgcatgagcagagaagcacaggacctgtgagatggtctggcttgatggagagcctggctggtgtccagcaaagatggagcagagtttagctcaggaaagggcatcaataatttcatctgatgttggtcaaagggtacaaagtctcccttaagcaagatgagtaaattctggagacctgatgtgtagcactgtgtgacgatggttaatgatactgtattgtagacttgaaatttgctaagaggatagatcttcagcgtactcaccatcaaaaaaagaaaatagaaactatgggatgtgatggatatgttaattagcctgagtgtagtaatgatttcacaatgtgtgcatatgaaaccattaaaccgtacacctgaaatatatacaattcctattagttagacctcagtaacacaaaagggaaaaaaggatttcatctgaaaataaggattgcgagaccgctagta

SEQ ID NO: 1887032 - DNA, 4001 bp, Homo sapiens
gttttgccatgtgggccaggctggtctcgaactcctgacctcaggtgatctgcccacctcagcctcccaaagtgctgggattacaggcgtgagccactgcacctggccttaacttacgtctttaaagaactctccatgtgtaagattttcctggccgtcttgaaactgcctttgcaaaactatgactgagaccgtgaaaaagatctaacttaattgactccatttgcttctaacctccaatctgtccgtgtcctttcctaggcaggctgaactaactttgggagaaacttggtttatagtttaaaacaaagataagtcgggtgcagtggtggctgggtgaggtagcttacgcctgtaatcccagcactttgggaggctgaggctggtggatcacctgaggttaggagttcgagaccagcctgaccaatatggtgaaaccctgtctctactaaaaatacaaaaattagctgggtgtggtggcgggcacctgtagtcccagctactcgggaggctgacacaggacaattgcttgaacctgggaggtggaggttgcagtgagctgagatcccgccactgcactccagcctgggcaacagagcgaagactccatctcaaaaacaacaaacaaacaaacaaacaaagacaataacagccctttcccaaagcagacctccttcttgcctggggactagattgcctttttaggactaacattagccacaagattagaaattatggtttaagagtcatgcagctggaggctgcaagattctgaccctccctaaactgctcctaagatcagggcttgaggtattttgcagaccctgctcctgatggatcagctggcaccacccaggtcaataaactgactcatctgatcttgtggccaccacccaggaactcagtgcaagaagacaacttctactccctgtggatttcattcctgaccaatcagcactcctggcttcctggcttccccctacccacccttaaaaactgtgctccctgaatgcttggggagactgatttgagtaataataaaactctggtctcccgcagagccggccgtgtgtgaattaccctttctctattgcaattctcctgtcttaataaatcggtctgtctaggcagtgggcaaggtgaacccactgagccgttacagtcttaactgcagttattcacacccttttccttggtttgagtaaaatatagatttgttattggaaaggggtctcaatctagacctcaagaaagggttcttggatctcacacaaggggtaatccagggtgagtccacagagtaaagagaaagcaagtttttattagaaaagtaaagaaacaaaacaatggctactccataggcagtgcagccccaagggctgctggttggctatttttggaaatttcttaattatatgctaaacaagggatggattactcatgagctttctgggaaaggggcaaggaattcctggaactgaggatttctcttccttatagaccctataggttaacttccagacattgccatggcatttgtaaactctcatggcactggtgggagtgtcttttagcatgctaatgcattataatgagcatataatgagcagtgaggacagccagaggtagctttcctcaccatcttggttttggtgggttttggcagcttcttactacatccttttttatcagctgggtctttgtgacctgtatcttgtgctgatcttctgtcctgtgactaagaatgtctctctgggagtgcagcccagcaggtctcagcctcattttacccagtccctattcaagagggagttgctctggttcgaatgcctctgaaacatttgctaaatgctttaatatcataaactgctttaactttttctttttttttttttttttgagactggagtctcgctgtgtcacccaggctggagtacagtggctcgatctcggctcactgcagcctccacttcctgggttcaagcaattctcctgcctcagcctcctgagtagctggaactacaggtatgtgccactacgcctggctaatttttgtatttttttagtagactcagggtttcaccatgttggccaggacgtttctttaatttgataattgttcatcttaactgctttggagccattagattctaagtaagccccattagattctagataatgcctaacctcctaggaatgcagcccagcaggtctcagcctcactttacccaactcctactcaagatggagtcattcttgttccagtgcctctgacacactccccctcccttttacagggagacttttcatcctaagtgttgtagagcgatgaggatccatcatctgtaatttctttaggagaaataagggtgatgacattcctgcctaactattagtttctctagtattcagggtagagagaagcttaatcagagagcattggtatggtcaaggccaatcataactctgagttctgacaaaaggtgatatttagaagattaacaggtgttcaatttaagaaattatctaaagtaaactaagtaaggaggctttccatgaactagacaactgttggaaccaaggtgatatggagtcgctagccaattccatctgtcccagaattagatattgatccagatttttttttttttaattgagatggagtctggctctgtcgcccaggctggagtgcagtggcgggatctcggctcactgcaagctccgccttctgggttccggccattctcctgcctcagcctcctgagtacctgggactacaggggcccgccaccacgccctggctaatttttctatttttagtaaagacggggtttcactgtgttagccgggatggtctcgatctcctgaccttgtgatctgcccgccttggcctcccaaagtgctgggattacaggtgtgagccaccgcgcccagccaatccagatttttatattactcattcctctcttttcctgagcagctgccagaaatcactggttggttcccaggaataagcagggtcagtttaaattgcagaaaaaactaaaaagattttttggctttttattagttcagtctatgcagttagttcctgttttgctcaatgcttatagactcattttccaagagagtcttggaagttctttcctctcctttttaatggcaaactttgcaaagttatcagaaacttgcatttaagagtccttgtcagagttctatagctgattataagccaccttttgaagaggatcaaaacaagacaattgtctgtagatgatgtgaaaggaaaataaacctcgggactctgaaatcactaagcaaaatggaaaagtcacactgggaactgcgtcaggcaaacctgcctcccattcttaataagatagctacaaagattaaaaaaaaaaaaagccatatacctcccttacaatttgcccacaagtaaattccttgtgggtctcaagatctttaccttagaacattctgttgaatttcaccctggcaatgtaaattgatagcttattttcacaggtgcaggacaaagagtagaactcaaagtcatccctctgctcacctgagacagatgcatatctgactgcttcctctgccctactgtttacattagcatatgtaaaaatgcagattcactgagccagacatggcataagtggctattcatctactcccctgccttatgtaaactgtgtattcagtgaaaggctgagcaaagactcagaaagatgcaaccatttgtctcttatctacccagacatttaaaaaatttttcctcttcccccagtatccatccttccccttttaaatattgaagccctcaaaatctttggagaatggcacagtttcctaggcgcatgtccttaaccttggcaaaataaactttctaaattgattgagacctgtctcagatacttttagttaacaatgacaaaaagtcttagggcagccacggttaaagacacaattgactaggagttttggttatttct

SEQ ID NO: 1887033 - DNA, 4001 bp, Homo sapiens
aacaagagtgaaactccgtctcaaaacaaaaaaaaagaaagaaaagcagctttcatgagcaatatcctggtggccacccaagttcatgatgaggcagatgcgggatgtatttccctctctatgaggcaatgctgacagaccaggaagggaactatgagataaggctttaagcttgatcgatggattctgattgaagttaagtgggttcttactcatattcaacagcattaatagtaattgctaactccttaataattcaataagagcttttgtataatcggtgatttaaaaagttttacaaaatcttcacactattcaattgtttaatatagattaacatctctctcttattttttttaagagacagggtctcagtctgttgcttaggctgaccttgaactccaggtctcagatgatcctcccacctcaccctcccaaagtgctcagattacaggtgtgagccacggcacctggccagattaacacctcttctaagagcagtgagtcttgaatgagcatggctcctcagaaatatctttttttttttgaaatagggtcttgctctgtcatccaggctggagtgcagtggtgcaaacacagctcactgcagcctcaacctcctaggatcaggcaatcctccttcctcagcctcttgagtagctgggactacaggcatgcacaaccacggccagctaattaaaacaattgttttggccaggcacagtggctcacgcctgtaatcccagcactttgggaggctgagactggcagatcacctgaggtcagaagttagacaccatcctggccaacatggtgaaatcccacctctactaaaaatacaaaaattagctgggcatggtgatgtgtgactgtaatcccagctactcgggaggctgaggcaggagaatcgcttaaacccaggaggcagaagttgcagtgagccaagatcatgccattgcactccaacctgggcaacagagtgagaatctgtctaaaaaaaaaaaaaaattcttttttggtagacatggggtctcgccatgttgcccaggctggtcttgtactcctgggctcaagtgatgctcccgcttcagcttcccaaagtgctgggattgagccactgcacctggccagagatatcttttgaagtagacattgcttactattactggctgctggacccataataggggctgagtcctatgaccagcctggacatctttcccagcttcttgagaggtgccaacatcacatcaggatatatgtatgagctgcattctgcactgactctttcaccaacttaatgagcactctggattccttgagatcattcttaaaaagagtttgaggaggataccttccttccacatgactaatgctgattcattaaccagagaatgcaggagttagaagggactttaggaaccatctaagtagtcctgttagcctcagaaagagtaattctagggatattttgtgaaatcaacactgactatgtttgggaggtaaaatgattcctttgtcaaggtgtttgggtatgggtgtttagggtatgtaaaattagatattttacataatagtagtaactagactggtgaaaaaaaaacagaccaattatttacctctaattcagcattccattgtgctatctctctcctataacttaggcttttctaagttgtaaagaacaaggatatggagtctttctacctccctcgtgcatgttcactctgagatgctggctatggtgggcaagaaggaggataagccaagggatgcccagccattcctctcacacccagaaaaagggagggctttcaggggactgtgggcaggcaaagctgaaggaaatttgggatatgtgctaattcccaggaagaccctgtctggtgatgctcagatagcttctgtagggtgaattattctcgaaaggcagtggtctccagatcagggcagtccaccactatggtgagttacagtcctgatctgctgatcaacaccctcttagcagtgcccccatggacagctgtcgccccccttccattgtctgggggcaatagcagaatgtctgaggatgggtcttacaggttgcattgctcttgctcccctttggcttgcctgcttcatgtcagatgggagctgtaccagtgggcaccccacctgtgtaccagagctcctgcttctgcaggagactgaggccagtatttcctccttgtcatggaagattctatcacaggtccccttcttctttctcctttagccagtctcataaaaatttgccaatatcagtatccaattccttctaaaattaatatttcttagatgtaggcaaggaactaagcattaaatattgcagcagaaaatatacacgcctaccaggctagggatttatagggaaaatatacaagagagatccaaatcacttcaaaattatttccaagtgggttgatgctatttgatgtggttacttaagaatgtagacaaaagatacacttgcagtgctggccagaagatagccttagttattatgaatgttgcatctggctttgcaaagagcaaatgcctagacacattctcagggatgggatgggatttgttaaacaatctcttgcatccagtctctgaaacataaaagccgttgatattcttttagagcaggtaaaaaatgcttggacttttcttagaaaagggagaacattcctagaattagcatctaaaacatgtcaaaatttagcttgcaaaaatgagttcaaaatgaactactgttctacagcaatgttttccaattgaggtccacaaatccctgagagtctgtggctaaattctcaggggtccatgcattcctagaaaaattttttacttaaataataatctgaaacatttcatgattatttccttgaaaacttcaaatgaatgtatgttcatgtgattttagtgcttatatttatacatgtgaaagcacaagagtcttctcaaagtaagtgagattttttttccttttaaaaacacctagtgagccaggcatggtggctcatgcctgtaatcccagcaccttgggaggccaaggtgggtggatcacaaggtcaggagttcaagaccagcctggccaagatagtgaaaccccatctctactaaaactacaaaaattagccaggcgtagtggcaggcatctgtaatcccagctactcaggaggctgaggcagagaattggttgaacccgggagatagaggttgcagtgagccaagatcgtgccactgcactccagcctgggtgacagagcgagactctatctcaaacaaaacaaaacaaaacaaaaaaaacactgagtgaaccctaatgcctaatgtaaattatggattccaggtgataactatgtgtcaatcaatgtgggctaatcaagtgtaacaaatgtaccatttgggttggggatgctgataaccagagaggctgtgcatgcgtggggcaagggctataacttctgctcaattttgctgtgaacttaaaactgctctaaaaaataaagtctgttagaaataaaaaaaagttatgcaaaaaatgacccaatactgtatgtaagctaaacatgaacagcaagttaaattagaagaaaagaaagatccacccatcactcaaagttaactaattctgctccaaagtattgggggctgaaaaccagctggcattctccaggcaatcaaggctaatctatttccatcaaccctctttctccagtcttataggacccttagcctctctcaagtacagtcagtatggacccatgcaggcaccatttggtgggacctctgcccccaggagcagataaggcctagaattaccaatgtgaaaacatattttagacccagtatccaatggaccagggtgaacctcaagcatctgtgtgtacatcaagctctaggctcttcctcagtgatgcatatgtttttccatgtccatgtgcctgggcttctgccctgatgtagttgtctgttcctctactggtaat

SEQ ID NO: 1887034 - DNA, 4001 bp, Homo sapiens
ttcccaagtagctgggactacaggtgtgcacaactaattttctttcttttctttcctttcttctttcctttctttcttttttgtagagatgggagtcgcattgtattgcccaggctggtctcgaactcctgggctcaagagatcctcccacctatgcctcccaaagtgctgggattacaggcgtgagccactgtgccctgccctaaatgatttctaagatgctaaacaaccctgacgtacggtcaatcctctggttctttcccctctgaccacattctgacctcttctcagaatatcccaaccatttctgttttccacctctgattccaccttggattcctagagctcttaggagagagaacccccttagcaaggaacctctcaacagccccaggcccagagtgaacccgggaggcggaggttgcagtgagccgagatagtgccactgcactccagcctgggcgacagagcgagactgtctcagaagaaaaaaaataaaagtatatgtatgtataacatatatataatatagattatatatatattagacaataaatatatatagcctaaagctcaaggtgtaccccccacatcccgttcattctgcctaagtgcacagagctggggtcccctcccaacaccaccccttcacaaacatgtagtagcctaacagaatacttaagatcaaaataacattctgctgtttttggatttttacttacatgatcctatttaatcctcacagtgcacctgccgaggagaagagattattatcccgttttacagaaagctcagaaacagaatatggccccttaaccaccagttgctgataatgccaggttggacctctggcttcccagagcactacacccagcagtccactgcagtccacccactgacatcccctggaacccagaagcaagtgcgttttaatctgcaagacctcggggccctggggaggtgggatggctagcatgtgggtgttgattaactgggaaaccggcacgagtgtcttagaagtacttcacaaaggagccgggtggggagtgaaggagggggtggggcgtgagacgttaagaaaaattggattaacgtgtcgtgggctgggttgcattaaccattcccaacactatctctggggaagtctcacacctgatattcaatagacatcccctgtagtgggtgatgttggcagaggcaggcgacatatacaataatatttttagagatccttgttcacacttcatccgcaccagaggacttcagcccctgtggtattcactcctctttagggctaatttgagaaactgtctcagattggaatccagcacctagagataggctgaggtgagcaggctgatctgttcagacgcttcgcggaccaggttaactttacaagctcattggcttccagagggttggggacccttcttatcctcctagctcagagggaaagattcaagagtttactcttcgcccaatgcccacttcagctaggggttcctggaagaacggggctgtggagtatctcagaaaactttcctccctctactgtcttcaggccccaggagacaaacctccttccaagcctcctggtcccagtggcttccctctcaccgaaatcgaaagaacccgagtcccagcccgaccccttctctcgccgagccctggctgggataccttggccgggaggacaggacggcctcaggctggccgccagacgcactccgcaggacgcgcgcgctcgagcctcggtggactcagccgccggccccgggaggccgcctccctgcgcagcacctcctgccacccgcgcgggcacgtgggatcttgactcgccgcccccgcctccttctgctccgcgtccccagcccgcggctcggggcgcggcgtggcgcggcgcgtgggcgtgctgcggggcgaccatggctgtagactgttacctccagttcccacagtaacaatcgaaagccacggttgccctggagacgcgggggcggggcgcgcggacggcgccggcgcggggcgggctgacgtcagggccgcgggggggcgggcggggcggcgggggctgaggagcgcgcgtgggccaccgcccctcgcagcccctagggacccggacggggcggcccgatggcggcgcctgcgttgatcagcaccgcggacagcggcggcgcaggcagcgggccgggggcggggccctgagggacggggactgggggtccccgggcgcggcggcggcggccggggccgcggtcctggggcggggccaggcgtcggtggccgtgactggagactgttactgagggcggcccgggcagtaagcagtctagagccaaggtgccggcgcgctgtccgggcggggtgccccggtcgccccggctgccccggctgggggctctgctgctccgcctcccctgcgtctcccgccctgccccgcccggcgctcgcgaccaggcacgcggcccctgacgtcagagggccgtgacgtcaaagatgtcccagagggggcacttccggcgggggcgtgggggcggggcgggacctgggaggccccgcccccccggtcctgagaggacagctccgctcgcagaggcgggaagccgtgggcgccgcgggacccgctggacgggacctgccgggaaggggcgcccgacgccatgcggggcgggggtcccaggagggccggggaagcgggggtgggcgtccgtctctcgcctgcacccccgctcagccggcccgggcagcgaggctgagtcaccgcgccgcagggagggagaggagggggcgcgtctcctggggcgccagcaccttcgcctcactttcctgggagaatggcgcaggagccccaagaaagccgggggggggtctccgaggtcggtcctccactcgatgctcctccgaagtagctgcgtgtccatcgggcgccggcaggtgctgcgcgggctcgtgtcgtctctggccccggctccgcagccgcgaggggaccccggtgccccccgtccgcccccatccccaccccggaggggccgccccacccgccgcctgcccgtcccctcctcgtcctcccgtccgtgtccgcacatctgtccctccgcggctggtccgtcccgcttacctggcgggccgcgtcgccactgcccggtcgcctcccgcagcctggccggcgcggcggcttttataggcgcgcgtagtactcgtgcggcggctcattcatgcggccgcggctcctacacactgacgcgctgccgacgtcagcggggaatttaggaaatgggaaaaggggctatttatagtggcgaggcggggggtggggaccgaggcgaccgggaggggaggagggggcgcggaagcggcggcggggtagggggagccgcgcccctgcccagccgacaaggggttaactttccggaaccgcgggcctggggccggggaggcggcgcggaggggcgcggcgggcccttcgagcttattcacgctctccttccggagccccgcggctcctgggggtcttcacgtggcagccccttccccctcctcagttcctggacctgacgtttctgccgtcacaccccgcaaggccactgcggtgtcgccaccctctcgtcctgcagggtgggcaggagaggaagctggactcccgtgggggcctggggcgcagcgagggctgtggcgtcgggggccgggagaagaagagtaggggagcccaaagtagcccaggagtctttagcggaggaacctgggcctgggagggaaggcccagcggggattcaggtaccacccaggagctggagacccgagggacggcagagaagttggggaaggtgggccaacctccccagaaatgatgagcaacgggatcctctatgagggagctgggggaacgcgccagaggtaggggtgagaggaatgggcagcctcagcaagggagagaggaaaggctgtcagtgccacgctccagagcctggcatccaggacccaccttcggaccatttgtggca

SEQ ID NO: 1887035 - DNA, 4001 bp, Homo sapiens
ctgttgggttggctttgtcccgaattgcctggaagttcatcttctgtctagccttagatcttgttgctaaataatttgggggacaaggacgtgagaatcccctcagccaggagtcagtctatatgcagtggcaggggtctagacagagtccccagagccaggggtgttgggagaagccccgagaggcagcccctctccactctgaacccgggactcattaggcaagccagtttcagccaaggtcgggggccctcgtgtggcacccccacagaatagcagcggtgatactgaaccctagagcccctgactgtgggctccacccaggcaagagccaatggaactggaggtagggggtgcatggggaggagtggacatcttcacttccctaaagcagtgtgtaggtcaacacgcacgccactgcatgatgtgttgctgtttaggtcagagtatatatgcatgccattatgcgcatgcgtgtgtatagtatgcatctatagaatagacattatctatttctgtatatgtgaaggggccattgtgtgtatatatgtgtgtgctattatgtgtctatgagtcacataataaaacgtaacaaaaacacattgggtgtatctgtatgtatgtttctgtgtcattgcatctatgtttgtttgccactgtgtctatgtgtgtgctgttatgtgcatgggaggctatcattgcatgagtttataaattacaacacatcatgatatatatagatatggatgctactatatggcacaatgtagtaattgattacacaatatatgacatgctcatatcgtcatgtaaatatgcataatgacatggtttgatttatatatatatatcaccatgtatctatgtattctatatttatcatgatatatgaacatgtctctatctatgtatgtgtatggagccaccgtgtttattatgcaaatgtcactgtatgtgtgtgctcttctatgtgtaagacacgccctatgtttctatcattgcatgtgtgtactactgaatatgtatgtgccctgggtgtgtgtaatccctgtgtgtgtcatgccagtcatgtcacatgtgtctgtgtgtgtgttactggcacactgaatggggcctctgtgtgtaaatgcatttgcatctcagtgtgtgctttgtatatgagtgtctgtgcccttgtctaagatgctgtgtatgtgccacagtggattttgcccaatttttatatgacctaggaccccctagactttcttagattaaaactggatgtaggcagctttcagtttgggtatgtaggggggcaggatagggccagagctagggtagaaggtgagaggatgccttacatccctgcccctttctgcagatggcccaggcccttctctcctccggctgtggcctggccaggcccagagccctcttctgatctcataggcagggccaaacccgtatcttctggaggagcgacagaggttctccctcccagcccttctgtgcgcccatactgtccatgtgcctgccgcccgcattcagctccccaccccagcaacagagtctcagacaaaagagaagcacagtccagtctttattagcattgggtccctggtcccaccacccattcccctccacgtaccatcccttcccaccccttcctcgtccttgacgctgcggctgcatcagggttccacatgtccagccctccccgcccccaaagactgcagggcagcagaggagctgctgtggcctttccccagctgtccggaaccaggaagggcaggaaagccatggaggcctttcaggcatctgggcagggtagggaggggccgtaaggtgctcacctgtcacacgaggtccccgagcgccgaggaagatggtggcgggcagcgggcggcagcagtggcgtgatctccgaagcccacagtacactcatccataaagtaggaaacactacaccctccagtgctgttagtagtgctttctactttatgggtgactgcactgtctgtctgtccgtcggcgtgtactcttcaggctgcccaggcctcctgactcctgctccaagagccccccagccctccttgtggcttcctaagatccccccaaccctgccagggccccccgagggcccgccctgggccttgtgggcggtgactcagcatggcgccagacttgcctcctctacctccctcccccacttcctcttcagttccctcttcccttccccctaaaggctccaccccatccccccagtttcagagacactcaggtagagactagggcctctggaggcctcaccttcagttctgtgaacccctggctggccgcttccagccacgctagccaccctccagcgtccaaatgaggcagccacagctcccctgccaaggtcttggtctccagtccaccccaaccgtgaggtcctgactgcccagagcctcagtccccacccttcagcctccccaccagcccaagatcctgaccccccagggcctaagtccccagcctccccaacagcccagggtcctgaccccccagggcctcaggccctggcctccccaccagcccaaggtcttgaacacaccagggcctcaattcccagcctccccaccagctcaaggtcctgactcccccagagcctcagtcccagcctccatagcagcccaaggtcctgaccccccagggcctcagtccccagccactccaccagccccaaagtcctgactccccagagccttgattctcggcctccccaccagcccaaagtcctgactccctcactgccctgctgttcccctggcaggagcccaaggctatcccaacaaaaatggtggccatgttgggcggaggaagaggctggcgccccttgagacactggtcccacttctcagcctctgcgtaccctctgccatccccgccttactctccagccctcctccttggacacctctttccccgcctggggtcccggagccattttaccttccttcactagagagggtttcaaggcgctttgccctgagcttcccgcatggggcttgcacccaagctcctcgacacccccaacgcgcctccacccagaccagcagcccaagcccctagaggccccgagctgaggagccccagttggggcagcagtgaaggtccggatccttacctgaggctgcagggcggaggagagctcgccctgtgctccaggctccgaagtggggttcccttcagggagggcagggcttataaccccgaggccacgtgggccagatctcagggcgcccaacggtctcagagcgcgccccgcccccgcccgcaggggatgagcgccctccctccctccctccctggggaggacagactgacaggaaacagaagggggtgggcccgcgggagggctggggaccctctctcatgccctgggcaggtggcttccggccccagctgcccttccccccgtggcaccagctccaagggatggctcaagagcctgggactgactcagggcattgagggtgaccccagaagaccagggctcctcgacagggccctcggtgagtgcccaaaacggggagtccagaattccagcacaagaaaaggaccttctctctgagccccaccgctgctgacctcagcccagaaaactcccttcccttcccaacactcaggccaggccctggctcctctgcgtgtgctcccgagggccatggaggtgctgatgcatgaagggcgtccatggagactgttgtcctcagcaccccacaaagccacccctcctgcagcctcagcctgcagggcacagtgcgggggacactctcaggcccggtggactgatggcactaggctaggtgttcacgctctctttgggacctgtggggacaagagggcagggcagagctgggtgaggatcaggtcctaaggtggggcacaggtgctatgcggagagaagggggcttggaggagtggcgggaaagaggctcgagggaaggttctggcggccaccggatgtgggcatg

SEQ ID NO: 1887036 - DNA, 4001 bp, Homo sapiens
aacctccgcctcccaggctcaagtgattctcctgcctcagcctcccgagaagctgggattacaggtgcccaccaccaagcccagctaatttttgtatttttagtagagatggggtttcaccatcttggccaggctggcttcgaacgcttgacctcaaattgtccgcccacctcagcctcccaaagtgccgcctgactatccgctaatttaaaaaaatttttttgtagagaaggggtttcaccatgttgcccaggctggtctcaaattcctgggctcaagcagtccatgcaccttggcctccgaaagtgctgggattaatatgcgtgagccaccacatctaaccctctcttttttttatttttttattttttttttgagccaggttcttgctctgtcactcaggctggggtgcagaggcacgatctcagctcactgcaacctctgcctcccaggttcaagtgattctcctgcctcagcctcccaagtagctgagattacaggtgcccgccaccatgtccagctaattttttgtgtttttagtagagacagcatttcaccatgttggccaggctggtctcgaactcctgacctcaggtgatctgcccgcctcagcctcccaaagtgctgggattacaggcgtgagccactgcgcccggccaccctctcttttttttaaagaggggtcgcactgttacccaggctggactcaaactcctgtgctcaaaggatcttctcaccttagccccccaagtagctgggactacaggcatgtgccatcattcctggcttccttctctttcacataccctcagaaactcctgattggtccgaagggccacgtgatctcccagatagcacaggaggcaggccatgacctcatggacatcttcctctgcgatgttgacatccgcctctctgtgaagctcctcaagtgaccaccctctactgaccctcccagggcattccagctcaagctgctggcaggaactgaccagttctgtccttggctggggaccctccaggcactggtgagagacatgaacactgactggccactagctggcctggccctgttgagtctgcacagtccctgcccagctgtgtcttctgttggaagaaggaacctgccttagctcagtttccaggtggttcctctgcctggcaccacagctacaaaggtgtagctaagaagatggcccattggtgggagcaatgtcaccctgcctccagctagctatgggcccagagtttctccctgagtcgctgttgctagcagggagatttctcttcctgccctcacttctttcaccttgaacttggataagaactcgtgtctcctgagtgaggtagcgcctcccatctgctccccaattcttgatctctcccaccccatccctctccccagtcttggatactaataaaatataagcattctggttctcatctttattccttttatttatttatttttattttttaatattagggactgagtctcactatgttgtctaggctggtctcaaactcctgggctcaagaaatcctcctgccttggcctctgaaagtggtgggattacaggcgtgagccactgtgcctggcttatctttatttctttacaacaggaaagagaaaatgtatctattccctcccctacccccaatcccacgcccccacccctgccttgtttgagctggagtctcccttccagtagtctgcttcagggtcctgagttctcttcctggcacgttttctgggtatagcaagagaaccattaccattactaaactcagtaatggtaacggtttccttgccattcccaagtgccctggcagtcagtaggttgtgacaggctgagcagagagcttcttgggcttgcagcatctctcctgtcctccttgtcaggctccagagctgggggtgcccggactagtacatcatctatactgtagtgtctcatcgcaaacttacagtatatgatgatatcccagccagggccccactgggggcacaggaagcatggcttgaaaagcactgtgaggggctgggggcagaacaggacaggtcagggctggacacacacagcttcctgctccctgctctacagctccctcgcaggccagcgtctccttgattctgtggtcaggcacagcccaggtgggttatgggaaggggactggagctagggtctgttaagatctcatagggacccagggccagtgttaaacaagccagagatggcgtaatgatgcagaaggttccctttggtcacactaacaagcagacaggcagacagacccagagaaggtgcacttacctggagctggaactgcagactgaggaggcctttggatgcagggaggatctgtccctcaagctgcttgccttttatcataccggtccctcccctgggtggggcacttttcctggccctgcctcttaacccttgccctgctagagtccatgacaagggtcactggcccctttccctagaaggccttttctcacatactctctcatggaccatattcacccttcactcccatctccaagaagctcatcatctctgccgggctgggaaggagaaagaacagcctcatcccatccaccagcatttaattgctggtcagatccctagtggaaggtttctcgtttttgctttttttgtttttgtttttgttttgcagtggtggtaggcaatgttagttgaatctctctgtatagggcaggaagggtcctggcaactggatctccagaatctgtctggcagccgagctcaccctacccgtcagcctaaatttctattcccagcccctgcccctgtgtttatgatgagcccaaggaggccagacctaggcaggcagagagactctgcctagcactgccctggcaaggtcctcttgggggttgctctactaggagatttgagagcagctgaatccccagctcttgtgggtctgctcttcaaagctcaaggcacctccagtgagagcctagcactgtttggttctttgcctctggggtagaggagaggctcctcaaagcaaggcctctgctgtttagaatccccattctgggggacacgcccttccctcttccctatcctagacaatctggtctgtgtgctggaaggcagttaatactcttcctctgcgggggtagactagaccaggatggaagtgggagaagagacccaaccttttctgggtcctgtggaggtgttctatttcctgaggtcacagcacgctggcacatgctctaccctctgcttagcatggtcttccctcctttcttgtctagttagctcctagcccctcttcagagctctttttttttccttccttttttttgagacaatttaactctgtcacccaggttggagtgcagttgtgtcatcatggctcactgcagactccctgggctcaggtgatcctcccacctcagcctcccaagtagctgggactacaggcgtacaccaccacacctggctaatttttgtatttttagtggagatggggtttcgccatgttgtctaggctgctctcaaactcctgggctcaagtgatccgcccacatgggctcccagagtgctgggattacaggcgtgagccaccgcaccagcctccctcttcacatctctaagtgttacttctgcagggaagtcttcccagactatttaagtctccctgatagggacttatttatttgtgtgattattcacattaagtaaatagtcatgagggccttgtttattcactaatatatttctgtgtttttgtttttgttttttgtttttttttagcgagagtcttgctctgtcgcccaggctggagtacagtagcataatctcagctcactgcaacctccgcctcctgggttcaagcgattctcctgcctcagcctcctgagtagctgggactacaggtactcgctgccacgcccagctaattttttgtatttttagtagagacaggctttcaccgtgttgcccaggctggtgtcg

SEQ ID NO: 1887037 - DNA, 4001 bp, Homo sapiens
gcaaggtgtggtcagctcagttttcaattttctggatgtggattttgccacttaatactcaatccgcaggcagattagccatctccctagtggccgctgcttatttgaatttcataaaaacaaaaaactttcagttccaaataaacaaacagaaaatctattttttgggatggggtctcactctataacccagattggagtgcagtagctcgatcatggctcactgcagcctcaacctctcgggctcaggcaatcctcccacttcagcctcccgagtaggtgggactacaggcacacaccaccacgcccggctaattttcgtttttttgttttttgtttttgttttgttttgttttttgtagagatggggtgtgccatgttgcccaggctggtctggcactcctgggctcaagcagtccacccgcctcggcctcccaaagtactgggattacaggcatcagccactgcgcctggccttacaacacatttcttttctttttcttttctttttttttttttttttgagacagagtttcgctcttgttgcccaggctggagtgcaatggtgtgatctcggctcactgcaacctctgcctcccaggttcaagcaattctcctgcctcagcctctcgagtagctgggattacaggcgcccaccaccatgcctggctaattctttgtatttttagtagagacagggtttcaccatgttgtccaggctggtttcgaactcctgacctcaagtgatctgcccgccttggcctcccaaagtgctgggattacaggcatgagccatcacacctggccttataatgcatttcatagctaatgcagatgctatagctcccctacaattaattgtgttgacagcagaaatttatttttggattattttagtttggttcgctcaggccatgtttgctaggatagataacagctaattgaatgggggtacagtgaaaaccaccttgagcttcatgtcaaaaaacccgagtttgcctgtgaaacctgtgaaatgggagaagtgaaaaaattaaataagtaaataaataaaatttgagtttggatctgttaggatattaatacttgtgacctcaggcaactcacttagcttctctacccctcattttcttcatctacgaaattaaagagttggattatacagtttctaaaatcccatctggttctaaatccttagactccttagactaaatcgttagtgtttaccaagctgtagaacaaaagtggaggtttagagacaaaccccaaagaacaaaagaacttgtgtgggggtttggggactaagactcctgggtcccaggctcaacactccactgacccattaggcagaaccttcccatgcccaggtccaactggccagtagcaggatgataaggaaacatttcagggaacatgagtagaaatagaggagacccctcatttcagggagcagcaccttgacaaggcaggaggatgagaaggacctctggaggggtctaagctgagctgccctgagtcacagagatcacagtggagtttctcctgagacaggagtgtcagctgagtgggaactgtgtccctcatgggtggggtcagaggttaccttggccagcagccggcgcccgtcattatctaggatgaaaacagccttgatggtgtagagggaaggttcctgcaactgacaccggagaggagagttccgtttggcccctgactcgaggtggacaccctgtgtctatgggatctgctggccctaggatacatcctcaggccccagcaaccccagtcctcaaggtccacagctggttctgcccagccctgtgccacatgggccaacccaggtgcccactccactcccaggcagatgttccactgcaggccccgagtgggcgctgtgcccgttgggtgcagaaggtccttccgggcccaagttctgtcatgcactgactgctccagagcccgagtcggagtgtatcacagaacctgggccgggggggacagcgggccgagcctccttcttccagctgatccctggccgggctggacctgcgctatcagcgcgcccccaggccctggcccgggtagactccagaagcatgcccatcacccaccggtgatgggagccgagtctgggacggacaggccactccttaccctccccgcggaatcgcaactcacccgccacccccactccaaacggacccagaacttcagccccgcgccgacggactcaggacaggcctcctctccggtcggcgctgggacgaacttttcctcccgggtcctggggccagtcaggggtgacacaaagttcccagccgccgggcgcgcgagttctgagttggctgctccccctaaccctgctctgtccctgcccagctcccgccgcccgggatccccgcgcccgcccgctccgtacccgcagccccgagggctccccggctcgagcaggcggcgccgggcccccggcctgggccgccgcggccccctcccccgggtgcggacgtggccaggcctcgggccgctgcattccgctcgccgcctcgcactgacagcgccgcccgccgcctgcccgccgccgccgccccgcctccgcgccgccccgcggccccctctcgcgcgtggcctccctttcctcggggccccgtcctcttgctcgttctcccccatctcccctcccgccctcaccccacctctccttcccccacttctcctctccctctctcctccttggctccttcccgagtcccttacatccccgaactctgcatcctcagggtgccccaagaccagccctcgtcctgcttcctgcctgctctccggcctgtggctttggtgtgcgccagtgtctataggctgtcctggggccagcagcaaacacaagcaaagcccacttttgtctgttgacctctggtaggtaccatgaggacaaatacgtcaggtcaccctttagatctcagggacagggtctataagcaagagcaaatgaggacagttctggggacacccctctgtgaagaggctttctcattcctctctcactacttgcagaaggcaaccatgggcccggagacacctccccaggctctcctaagtcacagatatggcaccatcagaagcaagacagacgcccagcagcacaaatgctccaccaatgacatcgggctttgcagcatgttttggtttctttggtctaagtctaactaagacaagctctcatttcagggtacactggcaagtgggaaattcacatcccagtgatatgttagtgctacgtatgcatttaccggtaaaaacactgtgcgtgtattttacatttgacaccttcacatccattatctaatatagcccacacctgtaagataggcataatggaccctcattttaagcaaagagagactcagaggttgtgtgaccttttcaagactatacagctagttgactggggatagaacccagatttttgactcaaaatttcttccctattcttctcttcaagccctcttatgttgtggaccacagtcacttaccctagatggttacagaatggggttttcctcactgaatgcatcaagtcttcttatcttcaagcctctgctgaaatataattaccaaaaggtcctcctgacagccaccatatctgacttgataggtctctcctgtcacattctctcagttcctatttctttctttcattgcacttttttcaatctctaaatattatttttactaatattgcttgtttgagacacggtctcactctgttgcccaggctggagtgcagtgactcgatctgggctcactgcagcctcaacctcctgggctcaggcaatcctcccatctcagtctcccgagtagctgggaccactggtgcatgcaaccactcccaggtaattttttatttttttattttttttatttttgtagaaacaaggtctcaagtctgggctcaatggctcacatctgtaatcccagcactttgggaggctgaggtgggcaga

SEQ ID NO: 1887038 - DNA, 4001 bp, Homo sapiens
aggaaactatgaattcaagagagagcaaaatcaaaaagctctccactacaacacaattcctcaatacaacggcttacacggaagcataaatcagttgcaggaggccaggctagcccagcctactgcatagctgattcaatcacattttgcaaaggaaaaaaacccaagaaggaaaaacctaatcactcacttcccccaaagaaacgaagcaccaagtcatttcctaaaaatctctaaagccctggccagacccagaaagaatggggcacagcctgagggaaactgccgggggcaccacagtgctcctcaggcctcattcccagccctgtgagtccaccttccccagccggtcccctccagggtgggtgcagggcagccagccaggcctgcttttcggcatctcattgctccagcccacttctgggatgttttatgaccacgcaatattctggagatttccacttcatttacttttagacactgatccccagggctgggagaggcattggttcaaagggagaactttgttttcccaagctgattcagcgctccaaagagcatttttcttaattaggggcgaggtctccagttgaagctcccatcagttccactcctagacaattttgtctccaaactaagaatttgtcaagatgttcagaaatctaccccatggccaaactcttttctcccataattctgacatctgcatgttccactgggtaagcctccaggacaaagctaacatggacaaaagtcaggccaactgcaggacggggtatgtcccttcctggcctcccaggcccaaacctgcctccctgaccccaaaacacacctgactgcctaccacacacctgactcccctgtgttggctcccacatgcccccaaaacagggacaacagtatgggcaggacgcctgcaaaggactactctacacgtggcctgcagaggcagggagcctgtgggaaaatgcctcttgaatgggtttttacacgacctggcaaggggtgggccaacctggccgtgatggttcctccctctcaccctccctcctcccagctcctaaaaacctctcctgttttccaaagccaagtaagacagggaccagacgttccctattttgtcaaccagttcttcacacagttcaagtcacctcactgcatgtccccagatgtttttccacggccaagagccaaaaacacaacacaaacaaaggacaaataaccaaagttccaacaccaggcaaacccgaggtttcaggggttggtgggtttttgttttcggggagtagaagcaaacgcactagaggaatagataagagactttaaaggagagtttaaggaattccagcaaaaaacttgaagaggactagagtgggtccacattatgttgcatcggtcagggaacaaaagaccggccattgggaacacatccacaaagatccatctttaatgaaatggtgtttgggagaggaacaggggcttcctgcgccaccgggccaaacctccgcttcccacctccccaggggcaattctagaagtcaggccccgttctccccacccccaagctcaaggttgccgccctggaaagcacagcagggcaggcctcggtaagtggcagggcttggcccatgggtaagccgggtcccgtctgtccactcaacccaggtcgccggggcgcggtccacgtctgcccaaagggtacggaccccaagcagtgaccgactcacacttccgagagcgtcgctatttctccagcgaagtgcggggatttcccgaatcaccgcacgcagccggggcgagcgcacctcaccactccttctccagcgtggacctgagaggcagcctggccggagcgcacgccagcccgggaggaagccggcctggggcgaggaccggggagaagacgctggtcccgggggccgagaactgggactttgtaggccagttgatccgacaccctcatctcgcccgcaaagacccagccctcagctcccatcctcggagttcggggtgcgtccccgacgggcttcccggggctgggtccggtcgccggctctgtgcaccgcgctccgctccgccgaagctctgggtgtccctcaggcggcgttccccgggaaagtccaccgccccgcccgacctcgggtcgcgggctccaaacccagccctccaagggttacacgacgctcggcggcctccacgccacccccgggccgcctcggctcaggccgagggacagcgctgggggagggggaggtgcggggaccaaagcctccccaccgcagccccactcccgagtggggcgcaagagttatgcgccgagaaacttcgccacgctcccacgccgcgcctgcgaggcccagctccgctctgcctcggttacctgcgctcagctcggcgggcgaggggcgcggggcgcggggcaggagccgtggccgacctctcgcagcaggccgcaccctcccgcaaggccgagcccgcaccgctgcctgggcacgggggccatagccgctagccggggcccgcgccccgacgttccgggagcccctcgaactcctggccgggggccgtggcctcgctcgacctgcccgggacctgggggccgccgccgccccctccgctaggagagcgagcccgacgaagccgggagaggagcggggcggcgagacccctcgaaagttgggggggtcggcttgctcgccgcggcccgacctggctccacgtgctggtgacacatcaggaaggctgcgcgccccgcggctcccggcgggcggacgcggccagcgcccgcccgcaccgcctcccggagccgagcggacggcgccccgccccggcccgcccttcgcccgcccctaggcggcaccgcccccggccgcgacgcccgctccagcctgcggcaccggcgggagagaccctgacggcggtggggggtggcccgggttcccaggtcccgggtggcccgcactgccccggggatggggtcccgacgcgggcggccctactcgacagtctggagtgccttcctcccagtcacgcagtccttcccgccccggagcccagtaattttcccttttcctcctttgacccgtccgagcagctgccagcgcttcctcccgcggagaccggcgcggggagccccctgccggccgctccgctcccgggccgcgcccccgcccggtggagcgcgcctgccgccggcctcaacttccccatctagaacctggagccgccgggcacttctggcagggctttggtggcaaagattataaattaaagtgccaagcatagtaccgggcagcatactttcttgagatgttaaaatttcgtgctttcaactcccagttccagcggcctgcagacaacctctcttcctggctgtgctgtttgaaaagctgagttcctttagggagactgtggaaaaggagtgggacagaaaagctttgaggctgagtaagagctgtcccaagattagcgaggggtgggaggtcagtggaatccccttggtggagacctgctgccccactgtctctccggagacgccaggatgtgggagagtaactgcgtgtctcctctgggacctgaaccaggcctctaccaagatccccagcctcaagatggccaggattccaggcaccgtgggtgatggggaagcccaaataaccactgaggttgagtttcccaacctcttcaggtcgagatttggagccatttaaagaaaataacgtgacatatctgtttgtgtcccgacatagatattagctatgttcctgccttctctttcctggcctcaccaacccagatcatgcctttaaatctcactatgaggctgggcacggtggcgcacacctgtaatcccagcactttgggaggccaaggcaggattgcttgagcccaggagtttgagaccagcctgggaacatagtgagactctgtctttacaaaaagttaaaaaaaaaaaaaaaattagctgggcgtggtggcacacacctgaggtgggaggatcg

SEQ ID NO: 1887039 - DNA, 4001 bp, Homo sapiens
gatgcatagcctgtgggcgggctccacaccccccctcccatttttgctatcccccctctccccttctgacagtgcgaagtggacggagacggaaatagagatgctgagggctgctgtgaagcgatttggggacgatcttaatcacatcagctgtgtcatcaaggaacggacagtgtgagggagggtggctgccagaaaagggcgggtgggcagccttcttcctccttacccaaggttccatcgtcctcagaactcctttccagctcagctgcttccctactttgtcactagttttttagaatccccttgaggactgaaagaatagaattgtcacagttggtcagaagttcctaaaatgctgtggtaatccttccaagaatgtgaatttaggttgcctgagatgctgttattgtatttgatgatggaagtcccctggttatttatataaatgtttgaggaccccactgcagtgtttccagggatatggtgaccctgaactagttgatcagtaaatctcaatccacctgtaaatcaccaagctctacctgatgtctctcccagaagagaattaggagatgggcctttcccactactcagttcagggactccactctccacactccatccatcctgagtgagtgtaaaacttcgagaaagtgagaaccctaccaatgggttggggccccgacctggattcttatgaagggactcccagaaccccttcccctcccgtcccctcttctgttagtctctctgatgactcctttcctaacctcttctctcttttcttcagggcccagataaaggccactgtgaaacgcaaggtatatgaagattctggcatcccccttccagctgagtcacccaagaaagggcccaagaaggtggcatctggtgtcttgtcacctcctccagctgcccctcctcccagcagctccagtgtccctgaggccgggggtccccccataaagaaacagaaggctggtgagggctgtggagttgctgcctaggggttaaaggtcccatctgaggtttagtgagagaattgggcctgggtcaaagaagggtcagtctctcttcctgtccctgtggaggttcccagagaggggcagaggggaggggagaggaggcacaaagctttgggaagcttggggctgggggagaggctgtcaggggaacctagaacctagcttatgcccccttcccagatgtgacactcagtgctctgaacgactccgatgccaacagtgacgtggtggatattgaagggctaggagaaactcctccagctaagaaactcaacttcgaccagggtaggagtcctcctcctcccacacagctgacggggttggggagaaagggctcacctggatggcagggcacggtctccgcaggggcccctcccttgtataggggtttcagaagagaaggtgctctcatacacagcgcagggcattggatcagtacgtagcagggtgtttcagggaggtgggagtggccttggaagcacactgggggctcgctccatctcggcccattttacttcctgttccagacagcctgaccctggattctggccttctcatgacctctgctgatcctcctctcctctcctgctgagccttccacctctgacctctcactgttcatgccggacctgtggatctcctgggactccgagcaaggcctgcacgagagagggctgaaaggctgctggggctgccacctcgctattcccgcataagcatctgcccccaacccctttgaccttcatctgatggacatttttatacagaaaacaataaagatttccctctcagcttcgtgctgtctgcttaacattattagcaggagaggcctgttccctcttctctcctcggcccatgggggctcagcccctcctcggtagttttcaccaccctgcctggagcagcacagccaatattggcagactcgcttccctgtgccaatatttctgtgctgctagagccagggaagctgggtgtgggcaacaaagactccactttgttctcttgaggcagaacttactcccagggtctctggccatcagtattcttgaaactgccctggagattttagaggggtgcttacataccccaccctctccttgcccacctggcaagaagtttgtcacaaggccccagatgttttttgtgtcacttctccaggatggcctcccagggccaagcctcggcggtgcctcccccaccctcgctctaacaccacagtgtggtttggacgtggccacagtgccgtacaaaccacagtgtgctgctggggcgggagcaggaccggggtgggttgaaaggaagagagcacatagcagtgctgggaagaccccagcaccacctccaggagcggggggatagagaagccttaaaaggcaaacatggcccccaaaaacgtttgggaggaaccagggacgggctgagcaggcaactggaaggcgacggaccatggggatgagctcacagtgtagtaagattggaccatcttccctctgtaggaactcagctcaggggatccctagggtggggtcagaggcagaagaaatagggaatgactggaggggccaacacactgcctcctgtctcagcaagggcagggacccaaggcttcctgtgtccgtccttcctctccctgggtcagaacccaagagaaaagcaaggagagacagagggccaaggccagcagggttgggagttggcagtccagaggtggtggggccggaacatggttgggagaggggggccggaagtcgccctgggccctgggcctgccacaagatggaggccaaaggcaggaaatggagaccagggggaaggggagcagcagagcccaggaagagggccatctggacctggggggccaggtattcaacccccagtgctgttcccactccccagggcccctgaggacccgagccggcccccacagcaacctccatcagcccatccaccaggccagggcaggcgggcccaccccagagagccacgtttaagctgagacaaacatgcctctccccacccccaactccaggccttccctcagcccttttctcctgtccaggacttgattttttaaaaacacccctcagaaagcaaaatccaagggccaaaactccttttgcaaatcaaaatatgaccccctaaaatccagaagttatcttcctatatcccatcgcatcttttaccaccccctcttccgacacaccccccaaaactcttagcaatctgaaagatccaaggtggtgtatgtaagcagtctttttaggcccccgaagatgccagacccctcccggacacccctatctgccctccatcaaatcttgccaaggcctcctgctcctccaccaccctccatagcccccaaactaacagttgcccccagctcctacctcggcagagcctttgtggggggtgaaagagaaattaaacactatcctaacggctggggatgttggggggctctctggtctcagcctttggtttccgtctggggggctgcagtttaggggtataagagaaagcctctccaatcatccccccaattccaagactgacaaagccaaccccaccccagcacgcacctccaaacctcccccccaaccgccacgtctctcctgaaaacagaggacacttccctccccacttacctcagctactctcccctgagatcctggtcccctattttgaaaagagcaaaatttagggtgcatccctcacatttggggtgcaggagaaaggagccgccccagtcgcatcgctggcctccttcctctcggctggctcagggactggggagtgccctggggagggggcacccccacaagagatctcaggaggggttcctccactcccagtcagaattggggacacccccccaaaacccgtcccagcccatccgtctccaactcggcgggagaggcagctgcaatgccccagtcagattcacccaacactacattcctcaccccatct

SEQ ID NO: 1887040 - DNA, 4001 bp, Homo sapiens
gtcaagcaaaagcactgctgtgtacaacaaaattagaaaagtccccaaatctatgtctccaagcaccagaggtatttcttcagactcaagatcacagtccagacccactctgggaaagagtgaggcatgaggacacttgccccagtgggaaaggacacaagatcgcaaaatccttaccctttatgcaaaacggcctccaaaacaggtatcacatcgaatctgcatactcaggttcaaatctcggtgcttccacaccccccaagtggggatcttaattgtgaagtaatgaaatcttctgccaaacctccctcccaggatgtcagaggtgaaaggaaggactgagaggtcagtggcccaagcccacctcaggaatcttcttaccaactctcagccatcaaggatatccaaggcgatgggggtggctgactccttgggagggggcatccaggaggccaaacggggtgggcggcaggcaggcggaaaggaggcgagcaggtagaaggttattacgaaattgcttccataaaacctgtggctgttgtaaaactctgctttccaaagactttatttcctcctttctctctaacattctccttttttctttttacagcacttttcctgggagggggtggccaagggacaccagggatggaagacagtcaggctctgagtgactgggcaggtttgtgagaggcccagggagaagtgagataaggccgcagggacgcgccaggccatctccacccagaccagaggatgagaaactgtcaagggacagagttgttagcctttgcttatcaggacagtgggttgaaggctccatttcccctaggctaggggtgggtctccctaatgcccctctgctctagcagaagccccttgttcagagaccccctggccctccaagtcagcctggcgccgaagccccatccggtcgggcctctttcccgggcccctttgcacatttcctctgcctcaagcagcagggggaaggtttgggaacaaaagttagcttatgctttggaaagtcccccttcttccaccagcacttctagttattcctttcctgggcacagggccaacagccttaagaggaccgaggtcagagagggtatcagagtcttgccctgcccaacccctggtttcatcccttgtcactgcatcagtcggggttgaattgtccaacaacctgggctccccattagcttgcaagtcaggcccctctccaaggaggtggcactcaggacctatgtgtacccccagcccagcccaaggccagtgggaagcctttggccactggggtgggtggggaggaaaaagtcaactgagggattaggaaaggaaggacttttcggacctacttctgtaggtctggtcccatagggggccttcgacaggaccctgagggctttaggctgagattgcaagagctctcagtgtttgcctttcagaatgagacctactgagccctcttcaaggacctgaagcttcctgctgaggtggagcaccagcccgcaaagagttacaaaaacctcaagaaccccctgcatttcttttgaaatcaaatatttgtgaagttggggagagtttctctggaaagttctggatgtagttgagagctcagagaccctaaggctggaagttggagctctgactgccatctttgggttgggctgaacagcccaacagggccagggaggtgcctcgggagagttgactgctcctcatcccccttcccctcctaacacacacacaaaaaaacattcagaagtgggaagacacttcccagatctcttctctgggggaacatccttgttgctcctggatgaaggacctcaaacctcttccccattttgcaaggttgatcttccagtcctgattctgctcccctcccccaactcctccagctaagcaaggagcagtaactgccgtgaatcgggtggtttaatgttgttgtgttcagaaacccaggcccaacaacatgaaactacctaattcactcagcagttccaattcaagctctaggtcaagagctcactgggggcaaaccctgtggccatttttttgtgggccaaaaagcggcttaacttcattttgctccacctcttccccaacagaagaacccagttgctactaaacaacacatcggaagaactgaacccaggactctaggtaaaaccattttggagccggtcctgatagctcagattccagagacatttgctgccttccaggagccctggccagagaagaagaccctagacacaggcacaagcctgggcagggcctctttgatatacctgctcagtctctgcctctcagcccagctggaggtctccacagataaaaagaattctcaacttcaaacagatacgaaggtgcatctatactcagcaccctgctagcccctgtattccaggtcacccagcctcccagtgtagctctgagaggccagatcttcaagtcctacacaccccccagctttgagattggggctcagacaggagagtgagacaaaagagtgctgagaaagaaagtgacagagagaaaggtggaaaagcagagtgtcagaaagtttcgggaattctagggaacaaacagaggaagaatgggatttggaggggaaagccggttgatctgaacagttgctgtgaaggcaccctgcccaaaatgtcccagggccctggctctgcagaggccgagctgccccaggtaagacaattcattccgaatcttcgcagaataaggactgagaggctaaggactgggattgggacacagagaacaaatttgcttcctccttcctgaccttcggtctgggtccttggccccctaacgtgcccgctcctcacctctgcctctccagacacccgcctgctcacaggtgctcacgctcacacccgcacccatcgcaaaaacgcagctgtgcaggccgagggcggcggcggacttacctgggcggcggcggtgccggcagtgcgcggccgtcggaaggtgcggagccagcggccgcggcccagtccaggctccctcccgccctcgcccagaagcgagggtccgagtggccacgtgtccggcagggaagtccgaggtagcgagggagtccacctggccgcccgctccccctcccgggtataaatcttggggaccggaaatacaataaaacttcaccgtgttgatgaacttcaaacggtttacatcccctcctgtcctgaaaagaaagacgtccgggggcggattaaaaggaaggggaaacaaatttacgagcggcagaagcacccgcctcggcccctttctttgcccgcacactttgtccgcgtggagagaagcagccccagcccccgggacttggcctccgccgaaccggccgccaggcgcgctcttctctcggaggagtcggcgctgacccagcccgcgcccggcagagactggaagccgccgcctacacggaaaatccacagagccccgcgcagaccctatgatcggctcggcccgccgggcttgggatgaggctccctgcttctcgctagagcagaactgggctccctggcgcttccttgcgaaagcccaggctctcccaaccacgcccggtggcctccattttttgcatctttccgctgaaagcgggttttttcttttttctttttttttgacagagtcctgctgtgtcacccaggctggagtgcagtggcgcgatctcggctcactgcaacctccgcctcccggttcaagcgattctcctgcctcagcctcccgagtagctggaactacaggcgcccgccaccacgcccggctaatttttgtatttttagtagagacggggtttcacaatattggccaagctgatcttgaactcctgacctcgtgatccaccctcctcggcctcccaaagtgctgggattacaggcgtaagccaccgcgcccgacccaagggttttttgtttttgttttttgtttaactttacttttctctttccttttccgtttctagcggccagacc

SEQ ID NO: 1887041 - DNA, 4001 bp, Homo sapiens
taaggctgtggatagcacagagcacactgggggcagaggctgagcgtgtttgtgtaggagcactcaatactgcatatgtttcaataattaactagtgtatttaagaaacttcattctacgtgggcatggtggctcacgtctgtgaacccagaactttgggagaccgaggcaggtggatcacctcaggtcaggagttcgagaccagcctgaccaacatggccaaaccccgtctctactaaaaatacaaaaactagcctggtgtggtggtgggcgcctggaatcccaactactccagaggctgaggcaggacaatcgcttgaacctgggaggcggaagtggcagtgagccgagattgtaccattgcactctagcctgggcgacggagcaagactctgtctcaaaaaaaaaaaaaaaaaaaaaaaaagtaacttcattctagcattcgtagggaatggagaggtggccactatccaaatgaaactaaaaacctttttcttcccagactcatactccagattatgcacacagagaatacagaaaactatgggaaaactggacattgcacattttcatatgacatcatctgttattttttttgtcttgctctgtcacccaggctggagtgcagtggcgccatctcggctcactgcaaactctgcttcctgcgttcaagggattctcctgcctcagcctcctgaatagctgggattacaggcgtgcaccaccacgcccggctaattttttatatttttagtagagatggggtttcgccatgttggccaggctggtctcaaactcctgacctcaggtgatctgcccgccttggcctcccaaagtgctgggattacaggtgtgagccaccgcgcccggccgacattgtctgttttaagggaggtattcctcagctcttcggtgataaactgctgatgtattgcactgcctgacagtcaccaagttggaacatgataaatactgcagatgtgtaaggcacaaaatgagacttatacaaagtagagatggaatcgcaagaattcccaggccctctttttatttacagtgataccaaaccatccacttgcaaattctttggtctcccatcagctggaattaagtaggtactgtgtatctttgagatcatgtatttgtctccactttggtggatacaagaaaggaaggcacgaacagctgaaaaagaagggtatcacaccgctccagctggaatccagcaggaacctctgagcatgccacagctgaacacttaaaagaggaaagaaggacagctgctcttcatttattttgaaagcaaattcatttgaaagtgcataaatggtcatcataagtcaaacgtatcaattagaccttcaacctaggaaacaaaattttttttttctatttaataatacaccacactgaaattatttgccaatgaatcccaaagatttggtacaaatagtacaattcgtatttgctttcctctttcctttcttcagacaaacaccaaataaaatgcaggtgaaagagatgaaccacgactagaggctgacttagaaatttatgctgactcgatctaaaaaaaattatgttggttaatgttaatctatctaaaatagagcattttgggaatgcttttcaaagaaggtcaagtaacagtcatacagctagaaaagtccctgaaaaaaagaattgttaagaagtataataaccttttcaaaacccacaatgcagcttagttttcctttatttatttgtggtcatgaagactatccccatttctccataaaatcctccctccatactgctgcattatggcacaaaagactctaagtgccaccagacagaaggaccagagtttctgattataaacaatgatgctgggtaatgtttaaatgagaacattggatatggatggtcagatgaaagataccaaaatgtcagacagcccatcgactggtgttgccatgagattcaacagtcaacatcagtctgataagctacccgacaaggtggtacagccatggagatgtcacgatggtaggcaaaacaagcagacagtcaggcaggatttgataaaaaaacaaaaacaaaaacaaaccaaaaaaacccaggcatttctggcctgttaagatcgaaccccaattctattctattctgacataatgctcataatgctcctaaaggaaaaaagtaaaattgtttattttcctcccaagcaaaacaaaatgaacaagttcaatcaaaaacatcccaatggaaaaaaatcacactaagaataaaacacttacagaacggcaagaaaactgggttaacatataaatttgtgtctgttgaaaccagagtacatgctagaaaacattaacacagatacgacagagtgtggtttttttttagaaatgggtaatttctctctccagtatcctttcacttgtatgagatatttctcctctcctgttttcacaaaccaagaaatccccaggtaggccaatcccagaggtgccatttagcagtatgcagcagcccagtttcagcataacaaaacatgccttggtagtggctctctcatgcaaataaaagaaagcttaagaaattcttgttgtaggtggattaggcaaggctgccattcagctggtataagctaaaagtaaaaaatcaaaacgctcaagaaaacggacacaattttggaatgattaaagatgtctttataaagtttttttcaagacttcattctaaatacacagaataaaaaatggtgtcagctcacttgtaagacaccaaccagattttccttatactgtctcaaaatttaaagatcaatttccccagagggtgtgcaatgcatcataaaatggcccttttttgaggatgggagaggaagggttgggcaggatggaatattaaattgtaacatgataaacatgcaagactgttatccaatctagataatttatatacattttgatgacttaggaaaacaaagcaatcatttgtgacaagcctaaaaagcttgacatatttaacatacttaggaactttttttgtgcggtgggaattctctaattgtatcatgtgggccttttgaaagtaacaaacagaaggccagtctgttgcaagtttgctgctgaacatcacattccaccctaagaaaacacaaggtggattgcatcgagggtggataccttaccttagcacagaaggaaaaagtatgtcagtgcaaagtatggactaaactgctttcaggaaaaaagttgtaaaaattgatacaggttggaaaagggaattttccttcccggcttggagtcctcccaatttaaggcagaacccatccactccaatttctgcagtttaaaactttctctacttatttagttttctcctctgagttcaaccgctgctggattcgtttggcataactttgtgccatggagttaatgatagataggatgaagtaacacaccatgacaacgaccaacttttcaaacatccaggacaaccagttttctccctgtagaaataaatgcagaacaatgcaatgaaaaaggcttcattagttcagtagtaaaaagaggatcatctataatgcttgaagtgtgtaacttacaaaacctaaagaattaaaaatgaaaagtaagcaaccccaactactctgaaatctccattactctcctttttacacccaactatcaagatttcactttgttggatgtaaaatcagtgttgaatcacatagtttagaatgggatgagtgtgaggttagctcttctactaggacctaagaataaactctttgattaaactcaactctgaagtcgccatgcagatactcatgagtattgtcaagacagttaaatatttttgttccagtattaggagctgtttttaaaacacacaaatgtatctgtttctgatgtcatgtttggtcaactgagggcagcaaaggtccataagaagagtgcaaggccattaaaaaaaacagtgctctggccgggcgcggtggctcacatctg

SEQ ID NO: 1887042 - DNA, 4001 bp, Homo sapiens
ctatggctcgtatttgccagggggtgggcggaaggggaaatggggagaagctactgtggattcggggtattttggggagacgagataaaaatgttctggaattactggtgatggtggcacaactttacaaatatactaaaaacacgaaattttacattttttttcttgtaaatctaggtctgaacagataattgtataatttggtaacttgttttcctctcttttttagagacaaggtctttctctgtcaccctagccagagtgtagtgacgtgatcatagctcactgtaaccccaaactcttgggctcaagcaatcctcctgtctcagcctcctgagcagctaggattaaaggcacttgccaccatccccagctaattttatttatttatttatttatttatttatttatttatttatttattcattcattcatttattggtagagacagggtctcgctgcattgcccaggctggtctcaaactcctggcctcaagtgagcctccgcctaggcatcccaaaaccctgggattgttttttttgagacagagcttcactcttcttgcctaggctgaagtgcaatggcgagatcttggctcaccgcaacctccacctcccgggttcaagcaattatcctgcctcagcctcctgagcagctgggattacaggcatgcgccaccatgcccggctaattttgtatttttagtagagatggggtttcaccatgttggtcaggctggtctggaaatcctgacctcaggtgatctgcccgcctcggcctcccaaagtactggggattacaggtgtgagccaccacacccagcctttttttttttttttgagacagagtcttgctctgtcacccaggctggagagcagtggcacaatcttggctcactgcaacctccgcctcctgggttcaagcgattctctcgcctcaggctcccgagtagctgggattacaagcacacaccaccatgcccggctagtttttgtatttttagtagagatgatgtttcaccatattggacagtctggtcttgaacacctgacctcaggtgatctacccacctcggcctcccaaagtgttgagatcataggcgtgagccaccgtgcctggcctcaaaaccctgggattacaggtgggaaccactgcatatggctgagttgtacactttaaaaaaaatttttttttaaatatggaacacttcacaaattacagtgtcatctttgagcaagggtcatgctaattttctttgtatcattccaattttagtatatgtgctgctgaagtgagcattgaattgtataatttaaaagggtaaattttgtggtatactatactagttttatggtataccataaaattgtgggtatactttataaaaataaaattatggtatgtaaaatgttacggtataccataaaattatggtatactttatggtataccattaaattgtactcaggcagtatgaaaaactcagtataaaaaaattcatagacctgtacaccaacagaaaaaattttactgcataatttaaaaaataaaaaaaaaattaagtcctgtgtccgaaaggcaggagccaggttctcacctgttgtgtgtcacctaagttgcctcatacaataaatgctgaggacagtggttcccggacgtgggtacatgtccaggaaccacctggttgggggaggtctttgaaaacttctgatgcctggcaaccgcccccaggcattcagatttaattggtctgaggtacaacctgggtactgagatgtttttttaaagcttcccaggtgattctaacatgcagcaaaatttgagaaccacgggcttagcaaaaggttgatgaacaaccattcttgggagccaaaagctaatccccgccccaccttacctcactttcacctcaaggcaatcagatcagatctgtccttggcaaagagaacagctacagccaatcctgctgttcaccatgccggacagaagtaaatcagagcattctctccagttccttaagggccactgctctctctataaacatgtggttgatgagatcagcaattctgaagcaggatccattctacaaagcatggtttcttccgttctccccaggttttctctctcttgctgtccccatttgtagctggggttgggaagtggaggagagagaaagtcactgaataaatacattctctgtgttctcaatgaacagacatgaaagaaaagaaaaatggtaaatacattcctagtagggtgagcctcagtaggtttctggattacccttcccagaaacattcatattttcaaagaagacctcctggtaaacgaagacatgagtcactagtaaggaaggttttgagggacagggtctctttcctttaacttcccagacacatgtctggactggtcctgattgtttgacctgtctgttttcttagaacagagcatgagatcctagctagctgcattccattcacttaacaatttgttgttcgaatttatttatttcagttacgattaggttttgtctgtggcatttatcgtctttctatgccaagcagtctcacactaacttgaaagcccttttgtattatctactgtgtttcctacaggtgagtcttttcaccttgtcttagtaattaagacttctggttgtagattacaaaaaccatctcaagcaagtttaggcaacaatgggagttctcaatgagattacaggtggaaccaggaaagttaagcctcagggagagcaggaatccaggcatacgtggtctttatcagggagtagacaccagggccccaccccagtcaatggggaagtcagatctcagagaataataatcattgaacatgaattgaatgtctgctatgtgcaggaacatatattattgataacatattcttatgttatcagtatgagttatattactattgctcttcccattttataaatgaggaaactgaggtccacagaagataagcaatatgttcaagagcttccaggccaggtccggtggctcacacctgtaatcccagcactttgggaggccgaggcaggaggatcacctgagcctcagagttttgagtccagcctgggcaacatagggagaccttatctctacaaaaaatttaaaaagtaaccaggtgtggtggtggtgcctgtggtcccagctattcaagaggctgaggtaggagaatcacttgagcccgggaggtagagtctgcagtgagctgtgactgtgccactggactgcagcctgggtggtggagaaagactcggtctcaaaaaaaaaaaaagaagtagggggtggggggcagttccagttggcactggaactcaggcagtatggtttcagaattgacacacttagccaccaggtgaatggttcccttaagagttgtacagtgggcaacctgcacacccatacctggcagccctgactatggactagatcagtgtttctcatcagagacactgaggacatttggagctagataattttttgtgtaggactatcccatccttcatttactatatgtgagtggtaataacgctcccaatcattgtgacaatcaaaagccaatcattgtgacaatcaaaagtatcaacctcttgaaacttaaaaaaaaaagaaaatgaaaaaaaaaaatttaagtatcaacctcagttgagaatcactaggataagtagatagccccaaatgatgtctacatctattttgtgagctcttgatgaccagtagcaatgtgacttcttttcctcttcccacagtagttggcccagacaactgtatacatactccacaaatgctggatgtgcattgtcattagagcctgaaaggatccagagtcctcagcttggtgcttccctacccaggatgatagggatggaaacatgagtcatgcatggtagattcactccaacatcctacgggaagacacaacagttttctcagtttttcatttggtccgctgaacaagccagcatggtagaagg

SEQ ID NO: 1887043 - DNA, 4001 bp, Homo sapiens
aggaacctctcaacagccccaggcccagagtgaacccgggaggcggaggttgcagtgagccgagatagtgccactgcactccagcctgggcgacagagcgagactgtctcagaagaaaaaaaataaaagtatatgtatgtataacatatatataatatagattatatatatattagacaataaatatatatagcctaaagctcaaggtgtaccccccacatcccgttcattctgcctaagtgcacagagctggggtcccctcccaacaccaccccttcacaaacatgtagtagcctaacagaatacttaagatcaaaataacattctgctgtttttggatttttacttacatgatcctatttaatcctcacagtgcacctgccgaggagaagagattattatcccgttttacagaaagctcagaaacagaatatggccccttaaccaccagttgctgataatgccaggttggacctctggcttcccagagcactacacccagcagtccactgcagtccacccactgacatcccctggaacccagaagcaagtgcgttttaatctgcaagacctcggggccctggggaggtgggatggctagcatgtgggtgttgattaactgggaaaccggcacgagtgtcttagaagtacttcacaaaggagccgggtggggagtgaaggagggggtggggcgtgagacgttaagaaaaattggattaacgtgtcgtgggctgggttgcattaaccattcccaacactatctctggggaagtctcacacctgatattcaatagacatcccctgtagtgggtgatgttggcagaggcaggcgacatatacaataatatttttagagatccttgttcacacttcatccgcaccagaggacttcagcccctgtggtattcactcctctttagggctaatttgagaaactgtctcagattggaatccagcacctagagataggctgaggtgagcaggctgatctgttcagacgcttcgcggaccaggttaactttacaagctcattggcttccagagggttggggacccttcttatcctcctagctcagagggaaagattcaagagtttactcttcgcccaatgcccacttcagctaggggttcctggaagaacggggctgtggagtatctcagaaaactttcctccctctactgtcttcaggccccaggagacaaacctccttccaagcctcctggtcccagtggcttccctctcaccgaaatcgaaagaacccgagtcccagcccgaccccttctctcgccgagccctggctgggataccttggccgggaggacaggacggcctcaggctggccgccagacgcactccgcaggacgcgcgcgctcgagcctcggtggactcagccgccggccccgggaggccgcctccctgcgcagcacctcctgccacccgcgcgggcacgtgggatcttgactcgccgcccccgcctccttctgctccgcgtccccagcccgcggctcggggcgcggcgtggcgcggcgcgtgggcgtgctgcggggcgaccatggctgtagactgttacctccagttcccacagtaacaatcgaaagccacggttgccctggagacgcgggggcggggcgcgcggacggcgccggcgcggggcgggctgacgtcagggccgcgggggggcgggcggggcggcgggggctgaggagcgcgcgtgggccaccgcccctcgcagcccctagggacccggacggggcggcccgatggcggcgcctgcgttgatcagcaccgcggacagcggcggcgcaggcagcgggccgggggcggggccctgagggacggggactgggggtccccgggcgcggcggcggcggccggggccgcggtcctggggcggggccaggcgtcggtggccgtgactggagactgttactgagggcggcccgggcagtaagcagtctagagccaaggtgccggcgcgctgtccgggcggggtgccccggtcgccccggctgccccggctgggggctctgctgctccgcctcccctgcgtctcccgccctgccccgcccggcgctcgcgaccaggcacgcggcccctgacgtcagagggccgtgacgtcaaagatgtcccagagggggcacttccggcgggggcgtgggggcggggcgggacctgggaggccccgcccccccggtcctgagaggacagctccgctcgcagaggcgggaagccgtgggcgccgcgggacccgctggacgggacctgccgggaaggggcgcccgacgccatgcggggcgggggtcccaggagggccggggaagcgggggtgggcgtccgtctctcgcctgcacccccgctcagccggcccgggcagcgaggctgagtcaccgcgccgcagggagggagaggagggggcgcgtctcctggggcgccagcaccttcgcctcactttcctgggagaatggcgcaggagccccaagaaagccgggggggggtctccgaggtcggtcctccactcgatgctcctccgaagtagctgcgtgtccatcgggcgccggcaggtgctgcgcgggctcgtgtcgtctctggccccggctccgcagccgcgaggggaccccggtgccccccgtccgcccccatccccaccccggaggggccgccccacccgccgcctgcccgtcccctcctcgtcctcccgtccgtgtccgcacatctgtccctccgcggctggtccgtcccgcttacctggcgggccgcgtcgccactgcccggtcgcctcccgcagcctggccggcgcggcggcttttataggcgcgcgtagtactcgtgcggcggctcattcatgcggccgcggctcctacacactgacgcgctgccgacgtcagcggggaatttaggaaatgggaaaaggggctatttatagtggcgaggcggggggtggggaccgaggcgaccgggaggggaggagggggcgcggaagcggcggcggggtagggggagccgcgcccctgcccagccgacaaggggttaactttccggaaccgcgggcctggggccggggaggcggcgcggaggggcgcggcgggcccttcgagcttattcacgctctccttccggagccccgcggctcctgggggtcttcacgtggcagccccttccccctcctcagttcctggacctgacgtttctgccgtcacaccccgcaaggccactgcggtgtcgccaccctctcgtcctgcagggtgggcaggagaggaagctggactcccgtgggggcctggggcgcagcgagggctgtggcgtcgggggccgggagaagaagagtaggggagcccaaagtagcccaggagtctttagcggaggaacctgggcctgggagggaaggcccagcggggattcaggtaccacccaggagctggagacccgagggacggcagagaagttggggaaggtgggccaacctccccagaaatgatgagcaacgggatcctctatgagggagctgggggaacgcgccagaggtaggggtgagaggaatgggcagcctcagcaagggagagaggaaaggctgtcagtgccacgctccagagcctggcatccaggacccaccttcggaccatttgtggcacgatggacgctcccagagctcacgttagggtaatagagagtgaaggagaccagcagcttggccaagaggggcccccaggggatgaggaggacggtttcctggagaagttaatgttcccggagaccagaattggcagggagagcccatgacttgtggggcagttcccctggttgggagcggggaaatgcatggtcctggcccagcctggctccatcgagatggaggaagggtctaaatgagaggagtgtgttcagacgaggagctggaccaggatggggagggctgtgcaaggcatggccggaagagcggggcagggagagaaaggtcgaagagtgaagtgcacaggagggcaaggcggtcctcaccctgcct

SEQ ID NO: 1887044 - DNA, 4001 bp, Homo sapiens
gatagaattcgtaggtcaaatgacatggaggcttttaggccacatgacacatatcacccaactgtcatccaggaagcctgcaccgatgtatactcccacacgcaatgtatgggaatgttttttcagtagtctctttgccaatattgggtcttatttttttctgttatggtttgctaagggaaaaatgcttccagctctatttgcctttctttaattactaatgaagcatactttttttcatggttttatccattcagatttcttttatgaatttcctgtgtgtgtcctttcgcagatggttcttggtccttgaggctgcttatataaacattacaggctgggcggaggtggaagtagggcggtgaagccacagggcaccgcactatggtgccacatctcggaggcagaaagcctggagagaaatggtgatcaaagtaggagagggctggaggctcgccgtcaatggaggctggctgccctccctcctcttggggtgctcctggcctttaggggctcctctgctggatgcccaggtaggaccctgtgctctccaggcctggtccttcactggtctccatattcccaggctgcctctcctcacctctgctccatgatgggtgaagatggcagaggcacatagcgagggctggagggagatgctgtggccagtgaagcaaggagaaagtacggaggcagtgtccagggacagagtcacctttgttgcagcctatgagtctatcccctgcttctctaccactgtcccacacgcatcctgcccctcagcttggctgcagaagagcagggttccacggtctactcttctccacatccttgagtttttcacaagcggaggacaagatacagctccctgcacatctcctcccaccaaatcgaacagacacagcttcctgtagccgctaggtgagaatggatcagggctggaggtggcaggtttacactcactgcctgatatctggaaggaggtcacatcccacaacccacctcccctacttgctgcaggggagaatttcctgtctgcacaggcctgagctggggatcacataccaccttggaaagcaaagtgaggaaagaaacagagtagcagcagttagaatcccaccaaggggctgctgtcctgctttggatatcaggggaagccttgggccacccttgcatggggggaagtcacggagaggcgagctcttactagctcctcgcattggtctaactctaaccccctcctccagcttcccattccccacccagcttctgggtgatggtatcagggatgggggagggacaacagcttctgtgaaaaggtgttttgtttccacccacagcagggggagagcccgggttctgagtcaacccagatgggcttctgattccctcatgcacactcatctgtgtgactgcccatctcacaggtggagaaactgagacaggaggtctaagggtctcagatacaggtaagtgcccaggaatctagagtctgggccagcctaaggaaatgcagggaaaagtaagagcagaaggatgactcctcacgcctgggtttagtatcacttttccctgaagagtgagcttacttttggacctcatctggaaaggccagtggggaagaatgaaagatacggaaggagggtcaagaaggaagtcggggagacagagtgttctctccacttcttcccactgtcacacaaagaccaactaaccttgggttgtttgagccttctactcctcaatccagccagtgtctctaatctaaaaccgctccttgctgggccaatctgggcaaaggctctccaacttgcccaaaacgtatcatccaccctgctgttcggaccttcccagcccatttctgtcaccttccagatgatggggaaagcagctcctcctcctcctcgaagccaggggcagagggcaacagttcttcaactggcagctttagctgggtcaggacataaagcttgccactgaagaactactgcggctcagccaggtgagggcgtgagaggaacaggctcctaagggaaagggagggaaaatgggaaagatctgagcagggcatgttgctgcaacgctgacccactcgctggccatcagggtcctgccccagtagacctctgagattctaatgcagggctgcagctctgatctgggcccgcggaagctgttaacctcgctgagcagcaagaggtggctgtaaacagacttcccttgctcttctttccagaactggagtctagagaaacccagtcctgctctcaccctcccctgccctagcggcccctgggggcccagcctcctcagcattcagacagggtggggcccgggaccctggacacaccccaccagcacgcaggtactagaagtgtggtacctcaggtccagaaatgtgagttcagtgatcagcccaactgacttgttcccagggagttcagctggaaggagagttctgggggcctggattggggaagagtgaggaagggaggaggcctagcgtttgaaagaaggtcagcagaggcccccggggctgtgaggggcggacaggggaccacaggctggagaggagggaggtatcggcagggtggccggggctgtgaggggcgggcaggggaccacaggctggaggggagggaggtatgggcagggtggctgggcagcttccccaggactctcagatgccaggcattccgcttgcgcattccgggtacatctggtatgaattccaggctgtctgccggcccctccatgtctgaactttgttccaagttccaagccccgcccccacagttccaacgcatgaatcagcaggaaaagccgggccctgcagcatggcccagggagggggctgggggcgtggcaggctcgggggatgtgagctggggagggcgggtccgtgctgacactcagtccaagggcatggcccacgccaggctgaggggccaaggcggtcttgccttggaatttctatactcagagggtaagaaagattgggggatacggggtgcggttcaaattccgaaaccctcttgggaggcatgaactttgtgtatcttccttcccctgggtgaccagtccaactccgtccgaccttcctctgtctgagatagctctgttcaacccagaggactcagcagctgctgagagtctgtgccaagcaggtgcccttggctgcagggcggggtgggcccagggcactgaccctctgaccagctgctccatcaaccctctggcactctgacagctcctagcccaatctgacagccaggatgacaggccaaaggagttggaggctggaaccagggccggagggaggtgggggtgacagcctcgccggaggccatggggaggggccaagagttggccgagaggtggggagagaggcagcccagtgatgactaacccaggcgccccacccagccagccggcttcccaggcagtcagggccaggcctgggctaggggcctcacaatcggacaggctggggggaggtgcagaggtgaccttctctcggcccaagacggccagttagtctggggagcgggggttagagtttccaggccctcctcttgccctcttccccccgcccaaccacggtgaaaccctaacctttgggttgcataaggccccggcaccgccgccccctactcctctcccctccccccttacataacatcccctggagagaacgagaggaggggccggcccgcccagcgaccccttccctgccagggcgctgaactggccctgacccagtgaacgccggcagaggcaaagcacctcctcgccgcccgctcggggggtccagaccctccccaggctagatggccggcccctgtatcctcagaccgggggccgccgggtgagccgcccccggccctccggcccctcggctctccccccgccccccgccactccgccagcccttccgccacgactcccgtcccagactctttcctcgtagctcctgacacactaacccggccagtccaggc

SEQ ID NO: 1887045 - DNA, 4001 bp, Homo sapiens
gcggcccctgggggcccagcctcctcagcattcagacagggtggggcccgggaccctggacacaccccaccagcacgcaggtactagaagtgtggtacctcaggtccagaaatgtgagttcagtgatcagcccaactgacttgttcccagggagttcagctggaaggagagttctgggggcctggattggggaagagtgaggaagggaggaggcctagcgtttgaaagaaggtcagcagaggcccccggggctgtgaggggcggacaggggaccacaggctggagaggagggaggtatcggcagggtggccggggctgtgaggggcgggcaggggaccacaggctggaggggagggaggtatgggcagggtggctgggcagcttccccaggactctcagatgccaggcattccgcttgcgcattccgggtacatctggtatgaattccaggctgtctgccggcccctccatgtctgaactttgttccaagttccaagccccgcccccacagttccaacgcatgaatcagcaggaaaagccgggccctgcagcatggcccagggagggggctgggggcgtggcaggctcgggggatgtgagctggggagggcgggtccgtgctgacactcagtccaagggcatggcccacgccaggctgaggggccaaggcggtcttgccttggaatttctatactcagagggtaagaaagattgggggatacggggtgcggttcaaattccgaaaccctcttgggaggcatgaactttgtgtatcttccttcccctgggtgaccagtccaactccgtccgaccttcctctgtctgagatagctctgttcaacccagaggactcagcagctgctgagagtctgtgccaagcaggtgcccttggctgcagggcggggtgggcccagggcactgaccctctgaccagctgctccatcaaccctctggcactctgacagctcctagcccaatctgacagccaggatgacaggccaaaggagttggaggctggaaccagggccggagggaggtgggggtgacagcctcgccggaggccatggggaggggccaagagttggccgagaggtggggagagaggcagcccagtgatgactaacccaggcgccccacccagccagccggcttcccaggcagtcagggccaggcctgggctaggggcctcacaatcggacaggctggggggaggtgcagaggtgaccttctctcggcccaagacggccagttagtctggggagcgggggttagagtttccaggccctcctcttgccctcttccccccgcccaaccacggtgaaaccctaacctttgggttgcataaggccccggcaccgccgccccctactcctctcccctccccccttacataacatcccctggagagaacgagaggaggggccggcccgcccagcgaccccttccctgccagggcgctgaactggccctgacccagtgaacgccggcagaggcaaagcacctcctcgccgcccgctcggggggtccagaccctccccaggctagatggccggcccctgtatcctcagaccgggggccgccgggtgagccgcccccggccctccggcccctcggctctccccccgccccccgccactccgccagcccttccgccacgactcccgtcccagactctttcctcgtagctcctgacacactaacccggccagtccaggcccctctccccgaggcgcccctgcccccgccgccccttctcctcccggaagggctgggtgtggccgcccggaccccactttcaccctccatcccgttaccgcggctccccgctgcgtgaccgggtcgccagctcacacccacctggtgctgggtgtgggggttgctgcacgagggggagcaaatcactgcgtccgctccccacggccggcggcgctgtctcttctcggcacccagcacacaccggctccaggctccgatcagctggcggcgtcgtgacgcacgagctgcgaatgcacggcccggggccaatcaccgcccactgctgggcaacgtggccccgcccacccgggggccgacggggcctcgccctggtcccgcctctccgggcgccctggctctgattggcaaggaggccacccttttgccgggcggaattgcacgaagccacgcccacccactgaggagccggccaatagacggacaggtgtggcccagccctccgcgtcagcgacccgcttagaaaagcgctacgtcaaacgagagtcctaaagagcaggcgaaagccacggcgtctgcgtttgcaatgcatgctggtccgtgtagttctcagcctgacaccgtcgttcccagaacccagcgcgctctgtgagttggcatttttaaactgagctcggaatccagcccggggaagtccttaaagggcgacagcccctccttgttggagtcgtgagtgcttcttttagacattccccaaactgactcgccggcctctgcgggacgctatagctctttaaggaaaggtggagcggaccaaggagcaggagtgggcagagcgtcagcccccagggcagcagagactgccgttggagagctctccagggtttttggaggagggagggtgctcgcctcgcccagcccactcctcctgggggctcttcctaaccacaggaggctttttttcttggatgtctcttcccagtcccagaagagcccccagagcctcccaagaggtagctttctaacaaaagattcatagcacagtcctcaccttagggtagagggagggcttctggtcagaaattaggggatgggccatgccaaagtgcaaagggtcagcaatcgcatcctctgattaacccccattcagtcccgccctccaaagctcttcactgactcaggcctacttagggaagagattcgaaggtggagaccaatgagcaggctgctccttccccaggggccaatcagagtctagatgagcgggggatgggcaaaaagtgaaatgaacccagtgacttggcaaaagctgctggtcggcgtttttaaaggggcaagccggagacctgccctaccttatcaatccccgcaagtcccccaaagaggaacatgtggactgaaatccatgccttttccttcagctccaaataggggctgagggtaactaagcaggaatgatgaggctggagggtgagatccttccttctgttaaatacgcactccatcaggtaattgataaggttcacttggagctccaaaattctgagcctgcgttcaggacattgcgcctttaaggaaacttcctgccttgcgccccagtaacagctgattgttggaaagtgtgacctctggggacgaatcagctgttaccacatcctcctccttgcttaccctcctccatccccttatccactcccatgggtggtgaaggaaagaacgtgggggatgtgattgtatgatctttcttttcccccatcactccaagactgtctcccccaaccccaaccccgctctgctccttagttcttcagaggctctgggcttggaaagagaggtatttcctgttagcacagtaaattcagactctgtggtctagaccctccctggtctaggggaaggccagtactggggaggtccagaatggtggctggcgctggggagggtacagtgaacccgaggaccaagcctggggaggaggaatggctatgggaagcaaacttggggttcagaacgctgcttctcaggccagccgccccctacttcctactcaagttgccctattcctccatggacaggtgtctgctgatgggatcctcctgcttttgcccatttactccacctccttatttattttttttttttctgtttttgagacagagtctcgctctgttgcccaggctggagtgcagtggcgcgatctcggctcactgcaacctccacctcccgggttcaagcgattctcctccttcagcctcctgagtagctgggattacaggcgtgcgctacca

SEQ ID NO: 1887046 - DNA, 4001 bp, Homo sapiens
gccaggcatggtggctcacgccagtaatcctagcactttgggaggccgaggcaggtaaatcacctgaggtcagactgaccaatgggaggctgaggcaggagaattgctgaacctaggaggtggagattgcagtgagccaagattgcaccactgcactcttgcctgggcaacagagcaagactccatctcaaaaaaaaaaaaaaagttggaaacacaatgtcaaataatcctcccaaaagattttgccaattacatttccaaaaacagtatgcaaaggtgcatttttccttacaccatcaacactgggtattactaatccttttaatattttccaactgaataaggacaacaaaaaggagggcgtgtgtgcatggtggtgcacgcctgtagtcccagctactcgggaggctgaggcaggagaatcgcttgaacccaggaggcggaggttgcagtgagcccaaatagtgccatggctctccagcctgggtgacagagcaaaactctgtctcaaaaaaaaataataaaaagaaatctcattatattaatttgcatttctttgattaggttgaaagtgcttatggtttttggcccttgaaatttttcttttttgattttttttttttaaatggagtctcattctgtcgcccaggctggagtgcagtggcacgatctcggctcactgcaagctccgcctcctgggttcacgccattctcctgcctcagcctcccagtagctgggactacaggcgcccaccaccacgcccggctaattttttgtatttttagtagaaaaggggtttcaccgtgttagccaggatggtcttgatctcctgacctcgtgatccgcccgcctcagcctcccaaagtgctgggattacaggtgtgagccactgtgcccgaccttcttttttgatttttaagtcttcttgttgatatgctgtgtccattattgttattgggatattcttagacatttgtaaaaactctttacatagtagaaaaatatgtcatctgctggaatttttttgttcaagttcatcatttacctattaactttgtttttgatgtctttttcaatgtgacttttatgtagtcaggtctattaatattttaccttttagtttctggccctgtggtcattcttataaagtccttcactaccttgaaatcagtttaaaaaattctctatgcccccggcacaccaagaatgacatatgtataacttaggaaaaccaaaagtatttacttgaggaaaagtagcatgcagtgatattgatattctaacaattatgaaagcttcctatttgtggtgtacaaatgggacacaaaatagaatggtactaggttacttccacttttgtttttccactaaaaaaaaacaaaggaggataagctattactacttccttcttacttaagataaagttaacaatacctactggccctaaaaattttgatactaggagagagagctagttcctatttactgtacccatagttaatctggcctattcaaaccataaagcttgagcagttgatatggacacgtctccctatccttaggaaacacaatgagaatggtgcgcactttggtaaaaacaaatgttcagttctccagctacaagactattattccattccttaagtagctaaaccagctggagaacaatgctggtaattaggaatcagtccacaagggatagccctttctccttataaatgtcacaaggactgtcacccagcaaacacattcctaaccccttctcccttgcttgctctacctggagtggcaacataacacagttctggccaatgaaatacaaaaagtttgctgaagggaattctggggaaggttttacttttctgattaaaaacaaacaggtatggctggcacagttctttcctcttcttcctgccttgaatgcatgtttgatggcgttaagttgcaacagccatcttgggaccacaggggaaagaccaagagatgttggccctaacaccaccgagaagcaaaagccatggacaacaattgcctaccacccctagaattatcctgtcacaaagatgaacttccatttccttatgcctctgtagtcaggttttatattttttataggccatacccaaattaatcctaatagagtcattttcaaataatttttatgtctagcaaatagtagaccttcaaaaattaggagttaatattggtaagattctggaaaaactaagtacacctcaagggattcaagtaaaattccaactaagaatggcataaagttgatttctgaatgatttcatagtactatgatcaaaagataccactaatatctaaactagatttcattttatgcctgggataataacgtaaccttaaagggtttggtttaattttcaaaatctagttttgctttcttcttgatataattttttcacagcatcctgacagggaatctaagatgcactcactttactctgcaatttttaaacagactggatccagaaatgaacaaaaaaccatggccatatctagacattcacttgcaaagcacaggatagcagatgtggtcacaaagccagacacaaatgtactcagaaccatccataggctgttttgtgctcaaagtactgaataaaccaaataaaaaataataatagtatttgtcaaaatttgcagatctcatactttcagacaaggaggggaaaatctgatggcatttggtagcaaacaaaatactctaaaataaaaagtttatatgtagtttgagggataaaactggcaaaaaccacctgtgcctatgttatgaccaataatttcacttggtaaatatgtttaaaaatgcttctcatagcattatttacaatgatgacaattaaaagccatttaaatgtccaacaatcagtgaatggctaaataaatattataacaatattatttcgtcattgaaaaattttaattattttaacgacatgaaaatgctctcagtatataaaacatttcctgaatataatttcaatataaaaaagaaaaacaggaaaatactgaaagggaacttacaaaaactgaaatgaaatgctgtaagatgttaaaagtggctgtcttctgtgtaggtgtgagtgtatatacatacacttcccgtctctgctgacaggtctagaaatagcaatactcactaacaaggagcacccctagtacctagatcttggtttctaaataccacaatccactaaacagagccagggctccttcaagaaagactgatttcagggctggaagatggaaagtctaagatgagcattaaacatcttcttgtgccagaaagtaaggaagtactcaaagattgactgaagacaactttgaaggacacaagccagtttgacggcacttccactatctgggacaattttaatatcaaaataaacataactcattgaataaaataggaaaacatgagtccatattgatataaatgaataaataaatggtaaataaatgagggagaagaggaagctcttcattatagaatgccaattaatagatacagaagaaactattattttaaaaaggttatccctgaacggtaatattatgagcatacactttttttctgtatttctctcgtttcagctttataaaataagcatatacatcttttgtaaaaacactcacaatccccaacaaatacaacatatgcacatctccagagcactcactagagccactttcaaaaggaaagcatatgcacaacagccccaagtacaaacggcaagaacatgggccacctgccctgtcctagagagctcacatgtcccagggcgctgggctaaagttcaaaacaaaacaggaaaaacaaacaaaccaccaaaggcagcactgaaatttatgcaagtttttggtttggttttatagtaattatgagggtgaagagatgtgacccttactgcgatgccaatgacaaatggttaactgataagaagaaatggagagggcgaaggctgtagag

SEQ ID NO: 1887047 - DNA, 4001 bp, Homo sapiens
aaagacatactcatggcgactcactcccagaaccccagcactttgggagactgaagtgggaagatcatttgagcccaggagttagagaaccagcctggcaacatagtgagacttcatctctacaaaaaaatttttcaactagccaggtatggtgatgcacacctgtagttccagctactcagcaagctgaggtgggattgcttgagcctaggagtttgatggtacagtaagctatgatcacaccaccgcactccagcctgggtgacagtatgagaccctgtctctaaagaaaaagaaaaaaatattgctaaaaaaaaaattaaacaaagacatttgggagggcaacacaggaggatcacttgagctcaagaattcgagaccaaccacagccattttattcataatatgcaaaacgtggaaatgacccgatgtctataagttggtggataaagagtttgtgatattctatacaatgaatactactcagcaataaaaactgtccaactgctaatatacaacatggatgaatctcaaagcattatgctaagtgcaagaagccagacacaaaagactgtataatgtatgattccatttatatgaaattctaggaaaagttaaactagagatcagtggttgccagggacttggggaagaagaggttgaccacaaagaggcacaaaggaatgtaggggtctcactctgttgctcagcctggtctggaactactgggctcgagtgatcttcccacctcagccacccgagtagctaggtctacaggtgcaccaccatgcctggccacaaaggagctttttgtaaagtaacagaaatgttctatatcctggctgtggtggtggttacatgactgtatacatttgtcaaaactcgtcagttcactgggcatgccacacccctgtagtccaagctactcaggaggctgaagtgggaggattgcttgaagccaggagttctaggctgtgctgcattatgattgcctctgtgaatagtcgctgccctccagctgggcaacacagcaagacttcggctttgcttaacaaatagcttacttacttttattttatataattgtatctcaataaaattcatattttttaaaagtgatgaatccacactattgtatctcataagaataaactgtaaaacaaacactcttaggttttaaattcaaccatttcctagacaatacacaaaattaacaccaattaagatttggaggactaggcacagtggctcacacctataatcccagcactctgggaggccaaggcaagaggactgtttgagcccaggagttcaagaccaacctcggcaacacagtgagaccctgtctccacaaaaaatttcaagaaaatattagccaggcatggtaggacacgcctgtggtcccagctacttaggaggctgaggagggaggattatctaagcccgggagtacaaggctgcagtgaggtgtaactgggccactgcactccagcctgggcaacagagaaagactctgtctctggagaaaaaaaaatgacttggggcaagtaactgcaggaaaaatatacagcagaaattgtttccatcactaccaattcatcataaaactcaaataaaacctaaagtttgacagaacctatccaaatatgtaacagaaagcaacaaattataaagtattactcatttagacaaaccataacaacttagatataaaaaatattctccagacgtgtttcataatgcagtaaaatattgtttttaattagttaaaaggtttttttttttcaaattatgactttctaaaagatatactgttagtaacaacattatagttctcagcaacaaaggttgtggtaaattatttactgataccgaagaaagatgtaaggtaagaatcaaaattctggcgtgcatcctgctttcagatgctttgacaatactattgcactgctagctgtaaagtacagtagtgcaataaagtcagagcattcgttagcagtaataagtaggaaaggaacacaaaagcatcttgcatcggttgaagcttcagtgagaaacgaatttaaagtagggttgccattttggacagaaaaacatccaaaaccaaaaaacatttatatcaatgtttttttaaaaaaggataagacttaaatatcaaagtgatgttgcttattgatgactaatatacaaattaacattcgaacagaaacatgcatagatgtagaaaggaattttgtaaatatgccctaagccttaatagtaattagaatgggtattgttaatactttaggattggtattaacaaaaccagttataattactactaaggcaaagttgtgaaaaatatttttgttctctgcagagatgttggttagctccttcttcaaggcaatttactgattaaacgccatgtaaaacaagccctttgaataaaagtatcaaagaaaacaaatgaaaagtaaaataataagtttctcaatctctacatactcaatctatcactctggaatctaaaccactaaacaaagaaaacacaaaagcacttaccatcttacagctttttatcttgagtttactaagggctgtcataacaacagaagggaatcaatgtgctctaaacagaacattaaccctatctaactgaatactatccaaggggattttaaaatttcagttaactcctgaaatcttaaatagaggcagaaagcatctccatttccttcaaacttagaaatgtcaaagagaaaataatgatggggggaggtgggactgagatttaagtaacaagtttccttagttccaagctaattgacattttaacttttttaacggataagaacccaatcagaagtcagatgtaaacccagaaacagaaatagtatcatagtatcacactgcattaccttttgtgtacagtcactagtagtaccacgaaagaacaaagctaaacaaataccaccccatcattaagtgaaggggaaaaagtcagagaacaaagattgccctacaataagcttattcccccattagtaatgttgattgatgcaaaaatatattttcattattttcaccaacctccctttaaacggtccaattcaactacttagtcggattgagcctactaaggaaatgggctcatacaaaggacagctgaaatataagtgtcttggtgtcaaatcctgggccacataactaaaatattagaatatttaacgctggtagccaagtttcaggttttaaagacaactgtttaaaagataagtgtttaactttctgaattggaagttattacaaacaagaaaaatatttaaaaaatttaaggtattaacaaaattaggataaacactttcttttcaaattaaatattatgcatttccttttaccttgacaaatcctttatttaactgatgtaaaaccaaaaatcagaagatagcacaggaatcatttactcttaaaatcttataaaataaactggtccacaagtataacatttttttctagaagcacatggtaaatctgaagatgagatgcactgtcttttattatctagtcaacacaaagcagtaataattagagccatgataaaaattcatttctaaaccctaataattatggaaacaaactaataacctgaaaggaaaaaaaaaaaagctaccactaatttacttgcaaggatgtaagaaaggaaaaaaacctcatttctttttttcctgtcttcaaaaagaatttaaatactaccccatcattcaaacaatacctaaaagtttaaatgtctggctaccttataattttctaaaacctactttttcaaaatgtttacttcatcattgttcacttaaaagagaatttgttcaatctaaagaagtcctgtgagaatactgactctactgtaaaagccagacgaagtttaaaaattagaaacagccaatttgagaagcaaacaacctgttaaaagcagaattagcatcatttagcagaaatgaattatgaatttaagcaga

SEQ ID NO: 1887048 - DNA, 4001 bp, Homo sapiens
tgttgaacctaccatgaaaactttcattcactgtgcttttggttacgttgcctcctgattagtcattaattttaatgaggttttttccttgtgttgagtatgaatagaccttacagtttgaggatctctagaattccctgaattattggaaagacattcatgactcccagtgtgactagttaagagccccagggagcctgtgaagactagaatctacaagtaacctgcactaagaacgaaattcagtaaaggagactcaagcttagctcctggccatcttaaagggctaatgtatgtctttcacaggtttgttcaacatttcagtaattcacagtatagccaagagcatgagtataagtctcttgaaaaagccagttatttggagctttttaaattataaactttgaaaaagtcacccacgttctcacactatatagatgactttgtatctattttactattttctcatttaaccatactagcaaataaggaaaaaggctattaaatgactcccctgatgctggaagctgacaaagcttttatgcaatttagcctgtaactaaaaattcacctgtatcaattcattctgactcctgcaatatgaatagctcattataaagaagggccttctgattccccctgcctcccaaattaaataaaaaggaacagtcatttgttttcatggaaaaaaaaaaccaaacaaaaacaaaaaaaaaaccagaccatcttaagcaaagttttacatgacattatataaaataaagtacaatttccacttaattcagtcttcaaatattttttattggaaggccatgcattgccttcatttattgtatttcaaatcactgtacatttacttttgtgaaaacactgcctgcattttctagtacaaaaaaaacctaaaaattgtttcaggaatgtagagaaatatccaacttaaatagcgaaaaagtgcaccataattactgctgcactgcagtcatttctgcaattcccatgtttcttaaataactatcttgtcagataacacacaatataaagagcaattatgaaaaacagacatttacatatacttctaaagtcttattgggaatatcctgttggcattggataaccaatcataggtgcagctgcagtagcaggatatgcatatgcctgttggttcataccattgtgcatatttggaacattacttccgtattgctgagtgctatcataaccattctggtaagtccctgttggattaccagtcctaaaactggtctgtataccagcagacacaaaattacttccaaagctcccattggtgtaatttgcagcactgtaaacaccattctgagtttttgccccaaaatctcttttaagcaggctagagtaacctctgtcataattttccctgtctctaaaggtattaaatccaccccttttgcccgcagagtatctgtcccgacggtcatccttcatgcctcctctacccctggaacgacctgtcaagaaaacaattgcaaattgatcaattatgtctatgacacaaatcattgtggacagaaagaaacagatctattcatggtaggcgtgaaatgtttttacaatttttcagcttaagttttcacattcaaggttttactcaccctccaataccatttaaatggatttgtagacaacgatgtgactcgtaactaccaacatttcctatcagtcatccttacctgaacctctgtcttcgaccaactgaagcaacttgggattaattgcttgattagcttcacgaagcacagagataaggtcgctcacttgctttatgttattaggtgtaaagaaagtgtatgctgtgcctgttttggtactgcgagcagttcttccaattcgatgaatataatcctctgaggagttagggtagtcataattgatgacaaatttcacatcttccacatctgtaaggtgttgcagtgtggcaaaatagcaatgtacggagttttgcacaccacaacagccagaccaaaaataaaaagttagacaattgtattcccaagaaggtacgggctgcaaaaaatacagttaaaatggttatccatttcctgtaggaataccattgaggttgaaaaaagaaaaaaaagcacatgtcatctgtataattcatcacccacccagtgacagaccctgtcaaaaggaatgtgtgttccctaagcacattcccaaatcagcaagttcccttacagatcatcaagtgacatctgaatgcttctgcgcagtagggccacttaaagtttcacagcaacctcttcatgtgctcattttgaggaccttgaaacaaaaaaatgtacaaggtcctttgcattacacattcatcagaagttcaaaattctggccacactgcttgtcttgccaagaccttacaaccgcagctgcaagaaaacatacctgtcccccaaaagttgtttttatgcactgtgtctcgtctaggcaagcgcttccaagaagccaggattcacttgagaatgtgtctctctctggcaggtctcgacatgacgactactgtgtaggtgagggaggaactttcaaagcactttcttttcccacttactatgtgtgagaagttgctcctgctctagatctcatgtgccagtactcaccaatttgtaaaaggcttagtaccttttaaagctgctctctccatttcaaacttgaacaaaaatttcattgaacattgaagtttggaactacttcttcgacatttcagcaaactcactgaaactcaaagacccacagatcacagtgaacagtttgaaacaaggctgtaccatggcagtcatgcaaagcatgggacagaagaaataccacggcagtgaactgtgaggataacttccattttttccctcggagagaacagtttacggggcagaggtgatatgttctgccttttgaagattactggcacacgttcagctttttcacctctctaatcgactggaagcagccagccgatcactagtcctccatccccctcgagtcctccgattgtcatgcctaggccttgccacaaagacagcacctttatgtgaaaaaaaacttagaaaaaatgcaggttaaagaaagcaataaactttctttaaaaaagttaaatggagatcttctgggaaaccaagccatgaatgcgagtttgtactaacctagccctctggaggccacatctgtagcaatcagaataggagcttttccatgtttgaattctacaaaggaaggcatatacatgatcaattatctgagcagaattctagctaggttaagtaagggggaaaaatacttcatttgaaatatttaccatttagaacccagtcacgctcttgttgactcttgtcaccatggatacccatggcaggccacctaagttaaaagacaagttgtgttattaaactcacattgaaaacctcagactccagtgcttgaccacttttggtcacagatctctttaatttcgccagaaatgaaaaagttaaattcactatcagatatgaaaaaaatccactgctcgtgatccaagtttgccctttcctaagctgttttaatcaatctgcttcaatggaggagctcacacatacccatctctcctcatttttctggtaagctcatcacatcttcttttggtttccacaaaaacaatggttttattctccttctcactcatgatctcttccattagacgaataagtctaataataggagagagaaaggaaaaatcctgagttttaaaagaccattgctagggccacacatttatggtcagcaaaacattaagttcaatttacatggctggaagtcaaagaggaaacgcctgctaatccacttatcgagcagttcgacccttggtccttaagtcaaccaggggacacatgaattccttctataggaaagctataaatggtgacagccattatttgaaggattcaagaaattttcaggattagtaggctaactaaatgaaatcacaccaactgaaataa

SEQ ID NO: 1887049 - DNA, 4001 bp, Homo sapiens
agtgcccaggtggtggtgaaggagctgcaggctagtgccagcgtgcaggagcagatgcagttcctggaggaggtgcagccctacaggtgggaggccaccgggcacaaaggcctgtgctgtgcggccccctcctctccctcccctgctcggcccgactccccctccccacctcctcccaagtcaggggccgcctgtccactcccgcagggccctgaagcacagcaacctgctccagtgcctggcccagtgcgccgaggtgacgccctacctgctggtgatggagttctgcccactggtgagctgctgcccggggggatgctggggtctttgctgagccggggccctcccttgccctgccagtgtctggtgccaccccctccttgggggcctcacatcctccctaaagccaagacccagggaccctgcccccaccaccttccagaggaggcgatggggagacctagcctcaccagggagggactgtgggggctgggcacagaacaggcctgggctggggctccctgcacccctggggagctgccagctgcttggtcacctgcttgtgtgccctgtggttcaggaggaggcatcctgggccaactgggggggggcactggcccacttgggctccacggcctcactcaggcttgcttttgccatggggggctgggcctggccacttccccaggctgcctggagttctgggcctgcccatcaacgccccccgccccggggacctgtccccccctccccctgagacctgcccatcaacgcccccctgccccggggacccgtctccccctcccccgagacctgccccccacccccttccacatatgcagctcctgcactgagccgaggctgtctgtggctgggctggatcccctgctggcttccctcgggacaggggccctcacacactggcgtctggactcctgacgttgaccgtcccggggctgggctttcggcaggtcaggggctgccggccaaccctcgaccaccagccccagactccatcaagcagatccacttgggccctgtgtttctctctctaccacaggccaagggactcctgctgcccggggctggctgaggggcagtggagaggaagccttcagtccagcccagccctgggggacacggcccccctccaggaactgctgggtgctggccactgtgcagggcacgaggctgctctgggcagctgctgtccctcagctgtgggtaggggtggaggagttggggaggtaggtggggacctcccagggtggccagcccccagcctgctggtgactgcgccacaccccctttctgcagggggacctcaagggctacctgcggagctgccgggtggcggagtccatggctcccgacccccggaccctgcagcgcatggcctgtgaggtggcctgtggcgtcctgcaccttcatcgcaacaatttcgtgcacaggtgagggcgggcgcgggccagcggccgggaagccctaggccaggcccctcccctgaaggaagggcatagggcgggtcctgcctcagggggcttgcgaggaccggccaggttcatctcatgcagcatcagacaaccactatgcagagggattttatgacgtttttgaaaaattgggaagacaatggtttgacacccactttgcaggtttagacgaagagatgcgtactgtcaagctggcctgttctctgtccccgaggcagtcagccagcaccctgcagccccgcgccaaccccacactctgctaagccctcgctttggggcttgagggagacagaccctgcttcgaaggaccctggagggagggttctgtcctgcttgggccaggatgcccagcccctggggaccccggggggacatgctggaagaagtggcgaaggacacgtggccccgtcagccccagacgccgcacggctgtcctctccaacaatatcctggtgctgagtgatgactcaggcgactccagcatcagtgattttgttgaagagggcagctgccagcctcccgacctgcctgccgggccccagctgccctgcccccaaccccaacccaccccactccaccccctaggcccaggacacatggccctgtagcgatcccctggcacgcagacatgggttttatgtggggagggacaggctgggttggcctctgtccccaccctgagtcctgagcacagaagtaatacggcagctgtggtaatatctacccagtaccctgtgcctcctcacacccacgtgaccagccaggcagggttcaaagccagcagccaaggcaggctgggttggaggtagtgccaggcgtaacctgcattctttccagaccctacccaaccctggggccagtggtggctcaagtgagagtgagctccagctctgagtgggcatggcagggctggaccctaaaactggactccggcagccggcaggacccctgggacactccaggcctcagtttccccatcaattcccacctcctggggagccgagagtgatagtgtagtagagctaggaggagagggtcctggagaagcgtggaccggtccgggtgggttccggcaggttctcaccctctctaggccccattctcctctgcactgtaacatttgaggcccacgcacacagtccctccccaggtctcagggttgggcacagagtagggccctgggcagggatggggggtggcagtgtctccaacgccccttccagcctggactgtgagccatccaagtgttggcaaaggaccctgtgctggatgcccccgcccggcacaccccactgaccctccccctgcccccacccggcacaccctgctcaccctgctcaccctgcccctgcccctgcccctgcctgcagcgacctggccctgcggaactgcctgctcacggctgacctgacggtgaagattggtgactatggcctggctcactgcaagtacagagtgagtggggtggggtgggctgggctgggcatgaggggcagggcctgcgccggcaggggtgacccgtccctgtgccaacaggaggactacttcgtgactgccgaccagctgtgggtgcctctgcgctggatcgcgccagagctggtggacgaggtgcatagcaacctgctcgtcgtggaccagaccaagagcgggaatgtgtggtgagtgcggccctggtggcaccgtgaggggccgaggccgagtgccacctgcccacccatgtcaaatcatggccatgagtagtgaggtcagggggctgccggagccacctgtagtggccacacgccagcagcccaagtggctggttgggtggcgaccccacaccgggggagataccaccctgacagggtgccccagggaccccatggtggggtcaaggcatacgtacagggccaacggcccgtcttcagcatgccggggggtctgtcctgagacgggggccttggtgagtacctgtccctggggagagggtctgggtggggtgttggctgccttcacgggagcgtaggtcgggccgtgccaggcagaggggctgacggtggtgctgggatctcccacggccgcagcctggaagcccctatcctgagtgcctagcccggagcgttcattcacacctggtgtagactcggaaggggcagggccgagccgccaggggagtggtccgccccggggtgggcgcccctccctgcctcacctctgctgcttccccaaccgcccccaccactcccgggctttggtctggccgccttctgcttctggggaactctcagatcccacgggccaggccccctccctgagcttttggggcctcccctaagccacttgactgccccatcatggacactgtcccctcctcacctctccaccaaggtgccccttcctggcctgcccacccactgcacgctggctggggtctccagtcacagggctctggccaaggtcatggtgacgtcttgccaaatcacctctgtctcactctgcagcctcttgggacagccagggaccaaagtg

SEQ ID NO: 1887050 - DNA, 4001 bp, Homo sapiens
gggagcaggagtgaagacccgaaggtgagcgtggattctctgccaagaatcccgtaggtggctggtggaggtcgcctcgcctttctggaccgaagtgacctcatgtttggggcaggaatcagcaaagtggccccgcagcggggagaggatttgaggctccagggcagagggtgctccacgcacacctgagcgtcctccagggctgagtttcaggaacatcctggggatgcccctgagggtctcagcccttcctctcggctcacctctcaccccctggggcaggtgaccccatttctcctgcctctgcccggagggctgctcccggccagctccccgtgctcggattcaggggcacgctccctccggtctccactcctgctccctcggaggtggcagagcccccattccaacccagtgctcctgcctgctgggccacactctccactccagcacgcagctcgccccaaggtcttcggagatggtttccaccacctcccctcccacaagccctcacccagggccctttaatccacagtaaggggcctgtggtggccctgcccaaggcaggtgggacttagaactggccactgggggtctcagtggaggggggagcagaggtcccaagcagccttcagtggacgccactcaggacgtgatccaggggctcactggacgacgggaatctgaagaccacatttgccagggccccaagagctcccaggcctccgcctccttcctgaaagccgcttccctcaggagcccactcggtcactcccaccgcccaggagctgaccccccgaggagccctgcctccaggcacagccctgccctcgggggccgccccatcctgcctctcacggctggcgctcttctaccctccaccctctgagccccggcatcccagaatgcgggagggtttccctcagagggggttgcagaggttcataaaaaaaagtgcttcttcagccaggtgcggtggctcacgcctgtcatcccagcactttgggaggccgaggcgggcggatcacaaggtcaggagatcgagaccaacctgaccaacgtggcgaaaccccgtctctactaaaaatacaaaaattagccaggcgtggtggcgggtgcctgtaatcccagctactggggaggctgaggcaggagaatcgcttgaacccgggaggcggaggttgcagtgagccggagttgagattgtgccactgcactccagcctggcggcagaaaaaaaaaaaaaatgcttcttcacaacaaaggtggtaaatctgttcctgagaggtgggacaggaacgctagaaaatgactcccagccgggcgcggtggctcatgcctgtaatcccagcactctgggaggcagaggcgggcggatcactcgagctcaggagttcgagaccagcctggccaacctgacgaaaccccatctctactaaaaatacaaaattagccggaaatcacttgaacccgggaggcaggggttgcagtgagccaagatagcaccactgcactccagcctgggcaacagagcaagactctgtctcaaaaaaaaaaaaaaaaaaacagaaaatgactccagaaggacctcagtgcaagtggcccccggacagggaaccacgtggaaggtggagctgtgtgggcacatttcacgcctgccctggaggggccgcggagcccaggccctgagccaggcatcgggtctgagggtgggcacgtttcctggggctcccaggccagcggccacggtggcagcccgggctggctttcccctgccctcccccaagggcagccccacgctcagggctgggtccccttgggacaccgaagccggcctgtcattggggcagaccacaggcgtgagaggcacggcggggctggcaagctggcaacgggggagacgggagttgccaagaccctgcctctcctccctcgaggaggcgccggaggattccgtcaacgtgactgctccgagcgactccgagagaggcagggcagagagggaggggctgccaggacctacccctggcttccagctcagcagctgggttggggacaccgggccaggctccataaactctccacacatcttcccatggcttggcatccacactgctaggccaggcaggctccgcctctccagccctcaccctgcagggtcagccaggctcccttgtagccaaggtgtcctgcagccaaggtgtgcccacctgccatacccaggccagccacagataggctcgggctgatgccgtgtcccagggcctcggctggcttcccctccaacaccagagaacttcgaagttccccaagcctcatgggaggaaggggattagcagctctgaacgacgcttttgtccaaggcaggctagcctcttagcacccgcagcaacctgccttccccagcgtccattctagcacctctgcctgccccacgtccgctccagagcctctgccggccccacgtccactgcagagcctctgcctgccccacgtccgctccagcgcctctgccggccccacgtccactgcagagcctctgccggccccacgtccactacagcgcctctgccggccccacgtccactccagcgcctctgccggccccacgtccactccagcgcctctgccggccccacgtccactccagagcctctgcctgccctggcacccactttgcttttagcccccgggctgggcatggctgaccttgaggagaagcagacaaaatccaaacctgggctgctcttggaggccccacagccaggcacatctcccccagcggcctagggctccgtcttcctcagggccagcccaccccaccactgcctccctgtgcaggcagcctggaggcttcagcttcagctcagaactgggctacaaataccagccaggaagccggccctgccccagcccagggcaggtcgaggatgccagagtggcaagggcaggggcagtggggccctcttgagaaaaggaacaggccagggccaaagcaacacggaggccctgtcctgaaaggaaaggggcgccctcagaggtcaaagtccaagatgagaggccttctgtggtcctgaccaggaagcttcacgctggaggccacgggaaggccaaggacctgtcagacctccatgggctctgaagcctcgagctggacctggagtggttaagaaacattaacagggctgggcgcggtggttcacacctgtaatcccagcactgtgggaggcctaggtgggaggatcacctgaggtcaggagttcgagaccagcctggccaacatggagaaaccctgtctctactaaaaatacaaaaattaccccggcgtggtggcacatgcctgtaaacccagctactcagggggctgaggcaggagaaccgcttgaacccaggaggcggaggttgcggtgagccgagattgtgccattgtactccagcctgggcgacagagcgagactccatctcaaaaaaaaaaaaaaaaaaaaaaaaagcagcatcaacagccttctctgataccagcttcaccctccctgcccgggcccagaacactttctgggcatggagcttgctgccggggacgtgaggggctccagcaattccagggcccaggtcagctctgagcggcccctcccaggccttgccttgctccgagtctcacgttcagtggcgtcgtcgagaagaaccgtcttgcctgttgctatgcacagcgtgccaggacgggcaccacactgatgcctgacgggcaggagcccggcgtctccagacgctcccatctggggcacgcagcccaaccccaaccggccacggaaggcaggacaccgcgggtgagagcctgcgctgaggctgagtggccggggtctgaacgtcgcccctcggctaagccactcacgtgacttcatctgagtcactctctgagcctcattcctcatatataaaaacagtctgggccaggcacgggggctcccgcctgtaatccagcactgtgggaggcggaggcaggt

SEQ ID NO: 1887051 - DNA, 4001 bp, Homo sapiens
taagcatccaaattaaatggaagagactgtcagactggataaaaaagcaagacccaactattttctgtcaacaagtgatccaatttgaatgtaaatacacaaatagattaaaatgggttgaaaaagatacactatgctagcattaatcaaaagaaagctagttatattgatagcagaccaagcagacaaagaagaataaaggaataaagagggccacttcttaatgctatagaggttagtagaggttaatgcaagagaacgtaacaatcctaaatgtttacatacctaatttcaaaatacacgacacaaactgatagaattgaaaggagaagcaaattcgcaattatagttggagatttcaacatccttatctcagtaattgatctctttggctgctctgagactagctgggaatgaaccaagagtgaatgagtgcacagatgtgggcagagttttcaaaaaggtatcatatatgggccaggcacggtggctcacgcctgtaatcccagcactttgggaggctgaggcgggtgggtcacatgaggtcaggagtttgagaccagcctggccaacatggtgaaaccccgcctctactaaaaaaatacaaaaattagccaggcatggtggcggacgcctgtaatctcagctactcaggaggctgaggcaggagaatcgcctgaacctgggaggcggaggttgcagtgagccaagattatgccactgcactccagcctgggcgacaagagcgagactacgtctcaaaaaaaaaaaaaaaaaaaaaaaagtatcatatatgatcctgattcctatacccaatggcccgtgaacagtattattaataattttggtccttgggccgggcgcggtggctcatgcctgtaatcccagcaatttgggaggccgagtcgggcggatcacccgaggtcgggagttcgagaccagcctgaccaacatggagaaaccccgtctctactaaaaatacaaacttagccgggcgtggtggcacatgcctgtaatcccagctactcgggaggctgaggcaggagaatcgcttgaacccgggaggcggaggttgaggtaaccgagttcgcgcctttgcactctagcctgggcaacaagagcgaaactccgtctcaaaaaaaaaattttttttttaataataattttggtcctatgtaaggtattattaatacacagattttcatttttcgcctaattatcctgaaccagttaaagtgaacacttggaagggggtagggggaatatcgatagccatggcagtggttttcaaactttatcagaattacccgctggttaaaattcagataactcgcttcactccaaagtttctgattctgcaggtttggggtagggcccgagaatttgtcattttaacagtatctccggtgttgctgatgccgctggtcccagaaccacacactgcgaacaactggcctagaacgttgtcattcctttctcctacagattttgaggcagccggtgggctccgaaacaaaacagaggtcactggatccgattcccagtaccatagaagtgactcaaaccagcgattcaaccgacaagcaggatccgggccacccaaagccgcgcgagagtttacgtgacgacatcggcgtcagcgtcacggaggcgtcggccacgttcagcggacacgggagcaagatggcgattccgggcaggcagtgagtgatccgggagttagggtcaggctgggggatgagaaactacggcgactgtatctttggccgaggagttttaaatgcgctggaagtgaagggactgtgtcgtcaagggtagagacgggaaaaaacgagaagtcctgaggaacatagattcccctcccccgtacattttcccggatggaagcccgaagtttgagggagaaacttgtgaggaaataaaggaagttaggctgaggggcagagagcgagacttttctattttccaaaagctcggtctgaggcccctcagtcttgcttcctaacccgcgcttgagtttctccccgcttggatgctctcaggggcagtgtgaagagagacagttcctggcttccttagagggccttgttctccttggcagaagctcaagtcctgattcccgcccttccttctcgttttaggaatattgttctgagaagccacagaaaaagggtaggcatataggaaattggggtatacgttgccgcaaaagagacaaatactgtacgtacttgaaagttttacctttgatgtgtaatccttacttttgatgcggcctcccgtgatctccgcatcttaaaggccaaaacgtgagaaactaaaggagttggatctgatgggatggttctctcagatgctccgaggcaaagcacatgatcttaataaagtgtaatgcgaacttgccccatggctacttgggtttctcagttatcttttaaaaattttcgtgagttacactatccagtcagttcttagaaactgtgtaagtacacagtaggaaaaaaaatctagccattttcttgactgtttagaccacaaggatagttgaaagcattttaaaatctttagtggacatgaactaaactttccactacacatgttttttttttttttttttaaatgttactgtcacttcgccatcttaaaacatttctgaacttttcatttacttctcttctttgataaaaatggtattcgagtttggcccgtgtccacaaatgatcacttagagtagtaattatagaatcttacggcatgttagaattttgagatcactgagaagcaaaaacagtctgttacgtgttcataaagcttatgacatgttttgatttggtagcttcatgtggaagaggtagtagatgtatttgttaacatttaaacataaaggtttaatttctatttcaaaaaaaatatatgcaggtatgggcttattttgccaaagaaaacacagcagttgcaccctgttttgcaaaaaccatcagtgtttgggaatgattctgatgatgatgatgaggtaaggaaacctatgttttactcgtgcatggttggaaatgtaaattttttaaaaattgaacttgtgactctgatacctttgcctttgttatttgtcagtacagtggagtataatttacagaattgtcaaaaaggaaggtgtaaagaaagcagctccaccgattttttaaagatttttttccctctaaaagctgcaaactttacctttaaacaaatacacggtcttttcagactactgaaattgtcataacaaaattgttggtgtaaagatccctaggtatgagttattaagatgtcaccaattttctacaaatttttattagcaaagcagtttttaatttgttaaccatgagctaagatcactatataacagttcttaacaacgctactttttttttaaattcagtgtctgccaaatgtaattgctcagttataatcgtggtagtgaatagttactcttgatagtactacagtaacatctaatatcaacattttctattttagcagccaaaactacttctgtgaaacccacagttatatatcagaaacaatcccaaatgtgtgcttttcttttctctttttttttttttttttgaaacagtgtcttgctcagttgcccaggctggagtgcaatgccgcgatctcggctcactgcaacctccgcctcctgggttcaagcgattctcttgcctaatcttcctgagtagctgggattacaggcacctgccatcatgaccagctaatttttgtatttttgtagagacagggtctcaccatgttggccgggctagtcttgaactcctgacctcaggtgatctgcctgcctcagcttcccaaagtgctgggattacaggcgtaagccaccgcacccagtaaatatgtgcttttccaatactcccatcatgttttaatatttttttttctttttttttttgagacagagtttcgctcttgttacctaggctagagtgggatggtgcagtcttggc

SEQ ID NO: 1887052 - DNA, 4001 bp, Homo sapiens
ccagtggcgctctgtttgcacgccttaggctaggagaggaaggacgggagcacagcactgggtgcccctctccctgtagagtctggggcggggctcagtaagaaggcctgcggttggtggctccccacctcatagctgcaagtaggggcgaaagctggagtgtctcctcccagcagcctcctcgcctccccgcaaacctccgaatctccctggacctcctggttgctgtggcccttcctcccctgattggcttcctccctctttcccaaggccagagaagtcctctcttcccctcaccttcctccctcttcccataaaacttttaggaaaatgggggcgggggcggtggagaccaccagcctggaacttcaagttcaatggcaaagtccctgaccctccccccaggctgggcgccagcattattctaggggcgattaaactcttttgctgccccctgtgcacctcccagttcgggggcagtttaggggaggagagaaggtaatggtggaattctttccctcactctcccccgaccacttcgtcccctccccctcatcccctctacacagaactaactggtagggagagaggaagaaaggctggcatcggttcctcattggatgttttaaatctgtctcaggcccaggccagtgcctggggggaggggcggggtgtcctgcttttgggctagaggcccggggccgctcccgagctttctcccctcttccctggagagcgactgttcgggagggtgagaatggtataaatttcaaaaacaacgaaaccttcttttgccccctccgcagcagtcgcctccgggctttattgcaagtttacggtaacgagttcatctatttaattcgcggttgcagctcggggatttctattagacaggacgggttggggccggggggcacagggtctcccctgaaggaaacccaattagagtgcagcacttagcaccttcaatataactttaatgaagggggggaggggagctgcagggaagagaagtttgctctaggttggggaaggaaagctggagctgctcccgagaactggggggcctggatgaggctttttcctgcttcgagggctttccagcttccggcccgggaactactatttggagtagggatcgcctgcagggaaggcggggcggattctcggctggcggcggcctcgcagggttcccggaagcgctagccagccggagtaaaacccgaaagatggagcctcaggttcgcgctctgcgttgcgggtgctggaaccgagattcaaaaagagcttccggaggtagtttctacgcattgcgccactactcccttattcggcttctggaggcctaataaaatccacttgctttggagttagaaattatttcgggcctggagcccgcgtagacgcgaccctgtgatcccatttcgtagcttgctgagagattcgctgcgggagtttggctctgagggaggggaacggtctggagggcagctcagggtacaattgcgccttgttagtgaaaaggcgccctgcttattttccggagtatatgtgtgtgcctctgcgtttattcgtctgtgagctcattgtctggattcacctattgtgacattgtgttcacacgtttgtccgaatggtaagcaaaacatttcctcctgtagcttaacatagcccttatgtaaaaataaatatctgcaggcgaatataggtttgtagattttgttgtgatttaaacacaaataagtgagagatttcaatgtggtcgtccagggataggtgggagactaaaattgggaagggattcccaatgaaagcgtttaatacaaaacgaaattaaatattttttgcacaggttccatacaagtaaatccgaaaaaaagtgtgtgtgggggggtccacaccactaattattatggcgaggaagataaagaagacatggacagaaggcggatggctctgcggcctggctcccgcagaccgaccgccttcttcttccattcgagatggctcgtaccgaacctccttgccttcttcctgggtctctcgggggctggaccaatacatctgccgatgccctggccgaatggcaggcgacatcgggtcctggacccccacacgcagctcagtacccacgaggccccaggccgctggaagcctgtagctccgcggacgatgaaagcctgcccgcaggttctcctggagtggtgagcctctgtcggaagggggcgcccacgtctttttaatggtcctaacacaccagtggaataaatctctaagattccacatcttttgtttgctctgaatttattgcgagtgaaaaacagagaaaatcctcaagtttaagtttctgatagcagagtgtgggagttagagcatggggagtccagaggttccagacccccaaaggtctctaccagggccatctccgttagtggcggtggcagcccctcttgtggcctttttcctctctccaaggggtcaccccgcaccatgccgctccccctcatctatcttgccccctccccacaggcccatctgcgctgaactctcgccagttccgaagtcggcgagggagggggtttacttgcccgatcgttggtgggtttgagcttatagaggcagaggagtaagaacctgcgatattgaaagctacccacatggggcttccttgaaggaggacgtggaaggcagaaagtgacctgctctgagcggcgcatgtaaccgaggaccttaagctggaccacggggcttggacgattttttaaatcaggaaatcgacctcatcttcctcctcctcgtcctcttcccctgaacccccagtccgcatgcactcacactctttggccttttccctcagtcccgggctcctctttggtaaatagatttgtaggtgtctaagtcacgtcccaccctcactccttcccaggagaggagacagggctaggatcccacccgaccgcgggccataaacacttggctgcggcggccgccgcggggtttctaggagagctggctccgggagggaaatgtcctcgaggtagtggcggccgcggcccaccaccaactgctcgccaccgaccccactactcgccaccgacccgctgctcggagcttcggttctgcgggttgtccagacttcaggcctgtgcgctcaatcgtggagaatgcgccggcaggccccccacccccagcctaaggtgcaggaaggaccagcacgaacccgctggctttgctgcgcggccaggagatgagtcccaccgggcactgagcccaggtacaggacatcagagaatgaacacagaggcagaggccctcatgtccctctcagagtcccggctctgcaaagagcccgtctgtctccagcttccagaattccgcactgtgaatctgtctacgtggactgggaaaacagggttggcaccactctgccactccgtttgtgcctgggaagggctaagtatgcaaggctacaaacatctacttcactgggatcccaaatgctcaacaaaccatgacctgctttggtcagaaccaccagaaatattaagggaagactcagagagtttgggggaggaaattaatggtgaattacccaggcactttctcaaatctctttttctctggaaggaaggactgactaggggcagcctgctggcttcattttcacacgacagaaaaatcatcgtattaaggatgggtgcttccaagaccagtgggtacaccctatggggtggacaaggagggaggaagagacagcctctacaattgtccacctacccagctgtcagctgagaaaaatgctaaacggacatcacagccacacaacgaatctgcccgttcccctctcctcagtcttcctgctgttaccagggtgagaggtgtaatggaagggggtctgagagaaagcttccctgcaaagggatcgccttccaaatttattcataattagctcaattcatgaaagcggtttctaaagtgctctacagagctctagatagaaa

SEQ ID NO: 1887053 - DNA, 4001 bp, Homo sapiens
gccaggccaggtgtcccaatccccagggtgtgcagaagtggagtcagggccagctctgccctccgggtctccacctcatggtccccccctgggcccccacccctgcccctgccctccccttgtccccgttaatgggcaggtctctgcagctgctgggctcagagctgatccctacaagtgtagcgatcacttcaattgaaattaattaggaggttggttttgtcctgtgccagacagcaagatttgcagagggggaagtggagaaaaagcccccaccatcggggccgggcaagcatagagcccccaggactggcagaaccatctgggtgaggccacgtgggagccacacgcctgtagcctgcaagggcaggggaggcacagaggggcttctggccaactgcagtgaccccaggagacctggggccttcagtggaaggggcctgcagatgtgcctccccggctgctgatggcagcagctgctcagcccaccccccctcggccctctctccccctcccattccctgcggatcctggacccagcagcctgagtgttcccttggtccccatcagatctgtggtctcggtccagagctttgcaccccagcatctgcccctccgagcacctcctggcttcttagtaatgacttctggggatggatcaacccttggtctgggcttgtggccccctggccctccccatacttgaggagggaagcagccacgcaccatggagtgccccagcctgggcgctcaggtcagtgcctttggtggaatctcaggtgcgtgccccagctgtcaggcgctgatttgtcccatcgtggatggggttctcccgcactcctgcttctggctgagatgagccatatctctggggagccccggtccgttaagtggagcgtggggttctgaggcagagactaggtttggggtgctcgttgctgtgaggttatcgttgctcctgggctttcccaggggataccagcacctctactcaccccacaggggttccgcagttctcctgccttcctggccatcaccacccacccccaccgcaaggtgtctggctcctgtctcctgctggatgtccttgtgggatcagcccatggggaccccgttcctggtctctgtggtcagccctcagggctggcttcccctactcaggccctgagtccccaacctgggcccgaccctgcatggacgccagcctctgctggcccatgctctgaccccaagatgggccatcccttccccaggccactgcctgggctgttgggctgccgctgttcctgcggtcactgtgagggtagctcccctgtccctgcccccaggttgaggtcccagaggatgcggccctggcagccccttcctcctgacctgtgttcagcccatggccctcctgcctgccccagggctggagcgtgctggaaagggcttggcagagcccagcactgtgttcagagaccgggcaggggcagggatttggtgctctgagggaggatggaggaatggtggctgctcctctgagaagggtcacagcagatgagactgcatccagaaacccctgcccgctgccctcctcacaaggaatcgagggcctggggtcccagctacccaggaagctgaggtgggagggtactggagcccaggagttcgaggttgcagtgagccgtgatggagccaccacactccagcccaggcaataaagcgagaccctgtctcaaatttaaaggtatcgaggggacttgtcccctccctctgcactgaccactggcctccctgcagccattgctctttaggtgtccacacaggcgagtggacggaaggactgatgggcagatggacaggcaatggcaggtcttagctgctgggggacgccagcctccaccacctggatggagtgatgcccaggtgctgaagcccctggttccaaagccatctctccgcgtgactttgaacttggttgaagccacgtagacagacgcctgttggaaccgcaggcttgagccacagcattcaactcggttgaacttcagcagcttccgtgcacgaggcctcagtgggctctcgtagcactgcctgtgtctctgagggccccagagtatcccttcccagggctgccgttcgaagcagggcccccccggtggggggacacacaggcgtttctgttagaagctgtaacgagcagattgcttttacttcgatgctttggggcctgtcttgctctgtgacacagaggaccctgccccgtgggtcctcccagctggccctgccttaccaccaagggagtgtctccccagcatgcagcaaaacaggggtgctgggtgtcagccctggtgcccacctcactcttcccggtctcctgaccctcatcccggtcttcaaggctgggtggcttcagggggccagggctgacatcaagagcctgtgaggggcagtgtgtgcccagttatgcccatgctgaccttcccatgccgcacagaggaggaagaggacgtgctagccttcaacctgcagcacctggccacgctggccacagcctggtccctggtggaggccgctggcctggacagctccactgccccagcgcagccgcccacagccaacccctgcagcggccccaggctcaccccccgcatgcagatcctgcagcgcaaggacacctggacccccaagaccaagcctgtgagtggaggtcccagtgcccacgtcgcccagtgcgttgccacagagccccagcctgggccctggcccggctcacaggcccctgtgccccccccaccaggtgtgccccctgaaggccgccatcgaccggctggacacgcaggaggtggggatgcgcgtgcggctggcggagctgcagcggcgctacaaggagaagcagcgggagctggcccgcctgcagcgcaagcacgaccatgagtacgcctggcgtggcgggggggcctgggagggtcgcagcacccccacccccgggaggcgcccacagtgctggggccgatgtgggaacaggccaggattgggctctgccccctacctgtgggcagacaccagggtccatcggggaggccccccagaggcagtggggcccaaggagggaggcattcggccagcagcgagaccaagtggcagggccaggggtctgtggaagagccgcttgtcagagcctggtgtggcaggaggctggccgcagggtggcgggtgaggggacagtggcagaagggggagtagggaggactgggggtgctgtggggccagggcagaagttgggggattctctgggggaggggacaccccgcagttgcaacaagggcaggggcaccacctgaccagtgtgtgtggatggtaggaggtgggggcggcgggggcccctggctggccttgccctctgcgtgaggggtcaggctccccaggccgagtctgggccgcatctttccccacacccagtagccctcgaaggccaatgccctcggctggaaccttgtcggggagctgggttgtgcatgagcctctgaccatcccccctgcggcccccaggagagacgagagttcacggagccctgcacggcgggggcctggccggccgaggaagcgcaaacactcaagctcgctgcctgccccacgtcccacggggccgctccccaggagcgatggcaagaaagtcaagtgagtcctgggcactggcatggcagggcgcgtgtggccggccctgggccctcgaggctggggagcagggtccaggctcccctgaggcttccaggctgctggtgccccttcacacctactctgaaggcctggccctgcccttcctagaccatcgagagtgaccagcagacagagccctgctccagacaggctttgcccttctggcagctcccagcaccaccctggcccgggtccccctctggaagtcacggcccccaggcccagccacgccggctctgcacacctggctgtggcatcgtccccgcccggcccccctggagtgtgaggcggtgttgcgt

SEQ ID NO: 1887054 - DNA, 4001 bp, Homo sapiens
cccacttcttttctacacactggggatggcccaggtcaggcactgccctaggtcaggaactgccctaggtcaggaactgccctgttgcccacactctcctgttaaggtcaggtccccctgcagccagtgacaaccccagattcctgcttcccctccagtacgcccgtttggtggagatcgtgggcatgcatgaccttggcgtgggcattaccctgggggcccatcagagcatcggtttcaaaggcatcctgctctttggcacaaaggcccagaaagaaaaatacctccccaagctggcatctggtgaggcaaccctaggagagccagggattggggggcacactgggcttggcacagattaggccagttggcacttagattatcagatggctgagcatttcagttgggggaaggttttggggaggcatcacagtgtgctggttgggacatgcaaaagaactggatactcccaggtgttaagggggaactgcctgctggagggatggggaagtgggccgaggggactttgaagctcatcagaacttggggtaaagtagctctctccccaacaggggagactgtggccgctttctgtctaaccgagccctcaagcgggtcagatgcagcctccatccgaacctctgctgtgcccagcccctgtggaaaatactataccctcaatggaagcaagctttggatcaggcaacctgcctcccatttctccccttctcctccgcccaattccaggccccactgctccccgtcctccacgccctgaatatcccattcttccacagtaatgggggcctagcagacatcttcacggtctttgccaagacaccagttacagatccagccacaggagccgtgaaggagaagatcacagcttttgtggtggagaggggcttcgggggcattacccagtgagtgaatttgggttgggggagcttaggactgaggggcaggactgggctcctgggcagatggctgttgcaagtcaccctggggacgtgtgcaaaagccaaagcaggtggactgaatgtggcctttgggactaatatgtatgcaactgagctaaagttttggctccagcaaccaagtccaacacaaaataggacatagccaggcctccttagccctcagggcctgaggggaagtggtggctgtagcctctaatagtctagtggtcgtcattcctccctggtgcataaggagcgaaggagcagtttttcccccagtgacaacctgttgaacacacctctgctttcccacactgccctgacacagtgggccccctgagaagaagatgggcatcaaggcttcaaacacagcagaggtgttctttgatggagtacgggtgccatcggagaacgtgctgggtgaggttgggagtggcttcaaggttgccatgcacatcctcaacaatggaaggtttggcatggctgcggccctggcaggtaccatgagaggcatcattgctaaggcggtgagtaccctgcccgagtccctaggtaacccaaacagaagtctcactgtcccccttgccatgtgtccctgatcacttgcaggcactccctacactagaaactcctcccctaccagcagcccgacttgctagcttaggtctccatccagcgtagactgaactctggttgtatgcaaaacccatccctctggcgcaagcccagcccctctcctagggagactgcagaaccacactgaaccacagcgggatgtgtggaccctcttccaggtagatcatgccactaatcgtacccagtttggggagaaaattcacaactttgggctgatccaggagaagctggcacggatggttatgctgcagtatgtaactgaggtgagggcctcccaagcccctctccctggagccctggggctttcttcccagtcgggtcagactacaacccccagcagcacctggggcagtgggtctccagctttacaccaatgccctaggggatgcggggaggcatagtcagctcagcttctgcgaagagagacagcaatgatgttctgctcaggtgcctgccagcagtaccagaagttaattctacctcatcccttacatccaccccttttaagaaaacaaatacctggaagcacctgatgaactgacccagaacaagtatctgcctgacctgacaagctaggtcagcccttatcttggagatctgggtgatgaggccaagtctgacaaagccctttgcaattttccttcccatgtcccaactatgcaacctcagtccatggcttacatggtgagtgctaacatggaccagggagccacggacttccagatagaggccgccatcagcaaaatctttggctcggtgaggtcccaggcatgctgggagggagtccagtttgggtgctcagctcccaaaaccagtctcatctgttctttgtccctaggaggcagcctggaaggtgacagatgaatgcatccaaatcatggggggtatgggcttcatgaaggtacaggacggtcttctgcagagcctcggctgggccaggggtgggtaggcacatctcagcacgggcatataatttgtgtggccctgtgctaggaacctggagtagagcgtgtgctccgagatcttcgcatcttccggatctttgaggggacaaatgacattcttcggctgtttgtggctctgcagggctgtatggtaagacagagaattgggtgggggtagaggtggggaggacagtgagtcctgactgctggaccctcttcccccataggacaaaggaaaggagctctctgggcttggcagtgctctaaagaatccctttgggaatgctggcctcctgctaggagaggcaggcaaacagctgaggcggtaggcttagggccagagccaggggagggcagggtggtgtatggcaactaaccagtcattctccctcttcctctcaggcgggcagggctgggcagcggcctgagtctcagcggacttgtccacccggagttgagtcggagtggcgagctggtaagtggccaggggtccaggagagcctgcatcagggactgcagccgatggcccctctgagccccgcactgtccccatctcttaaggcagtacgggctctggagcagtttgccactgtggtggaggccaagctgataaaacacaagaaggggattgtcagtaagtgagctctacaccattccgcccctccctttcctctccttgagactaatgcccccacccccacccccaccccacctaccggacagatgaacagtttctgctgcagcggctggcagacggggccatcgacctctatgccatggtggtggttctctcgaggtgaggaggcaggcagggaatgcctgagccgcagggggcctgggcctggatcccagccggcccagatttattttcatctcctgcttcctgccagggcctcaagatccctgagtgagggccaccccacggcccagcatgagaaaatgctctgtgacacctggtgtatcgaggtgagactcggggctgccaagctcaggtgagggctggaggtgcaggcccaacccctccttccctctccccaggctgcagctcggatccgagagggcatggccgccctgcagtctgacccctggcagcaagagctctaccgcaacttcaaaagcatctccaaggccttggtggagcggggtggtgtggtcaccagcaacccacttggcttctgaatactcccggccagggcctgtcccagttatgtgccttccctcaagccaaagccgaagcccctttccttaaggccctggtttgtcccgaaggggcctagtgttcccagcactgtgcctgctctcaagagcacttactgcctcgcaaataataaaaatttctagccagtcatgctttgctcctgtgtgacggttctttccccctgctgcctgcctccctcccaaagaaaggagccagaggcgtggggagtttgcctctattgctttatttggtgttttatacaag

SEQ ID NO: 1887055 - DNA, 4001 bp, Homo sapiens
ttggccagagccctgtgactggagaccccagccagcgtgcagtgggtgggcaggccaggaaggggcaccttggtggagaggtgaggaggggacagtgtccatgatggggcagtcaagtggcttaggggaggccccaaaagctcagggagggggcctggcccgtgggatctgagagttccccagaagcagaaggcggccagaccaaagcccgggagtggtgggggcggttggggaagcagcagaggtgaggcagggaggggcgcccaccccggggcggaccactcccctggcggctcggccctgccccttccgagtctacaccaggtgtgaatgaacgctccgggctaggcactcaggataggggcttccaggctgcggccgtgggagatcccagcaccaccgtcagcccctctgcctggcacggcccgacctacgctcccgtgaaggcagccaacaccccacccagaccctctccccagggacaggtactcaccaaggcccccgtctcaggacagaccccccggcatgctgaagacgggccgttggccctgtacgtatgccttgaccccaccatggggtccctggggcaccctgtcagggtggtatctcccccggtgtggggtcgccacccaaccagccacttgggctgctggcgtgtggccactacaggtggctccggcagccccctgacctcactactcatggccatgatttgacatgggtgggcaggtggcactcggcctcggcccctcacggtgccaccagggccgcactcaccacacattcccgctcttggtctggtccacgacgagcaggttgctatgcacctcgtccaccagctctggcgcgatccagcgcagaggcacccacagctggtcggcagtcacgaagtagtcctcctgttggcacagggacgggtcacccctgccggcgcaggccctgcccctcatgcccagcccagcccaccccaccccactcactctgtacttgcagtgagccaggccatagtcaccaatcttcaccgtcaggtcagccgtgagcaggcagttccgcagggccaggtcgctgcaggcaggggcaggggcaggggcagggtgagcagggtgagcagggtgtgccgggtgggggcagggggagggtcagtggggtgtgccgggcgggggcatccagcacagggtcctttgccaacacttggatggctcacagtccaggctggaaggggcgttggagacactgccaccccccatccctgcccagggccctactctgtgcccaaccctgagacctggggagggactgtgtgcgtgggcctcaaatgttacagtgcagaggagaatggggcctagagagggtgagaacctgccggaacccacccggaccggtccacgcttctccaggaccctctcctcctagctctactacactatcactctcggctccccaggaggtgggaattgatggggaaactgaggcctggagtgtcccaggggtcctgccggctgccggagtccagttttagggtccagccctgccatgcccactcagagctggagctcactctcacttgagccaccactggccccagggttgggtagggtctggaaagaatgcaggttacgcctggcactacctccaacccagcctgccttggctgctggctttgaaccctgcctggctggtcacgtgggtgtgaggaggcacagggtactgggtagatattaccacagctgccgtattacttctgtgctcaggactcagggtggggacagaggccaacccagcctgtccctccccacataaaacccatgtctgcgtgccaggggatcgctacagggccatgtgtcctgggcctagggggtggagtggggtgggttggggttgggggcagggcagctggggcccggcaggcaggtcgggaggctggcagctgccctcttcaacaaaatcactgatgctggagtcgcctgagtcatcactcagcaccaggatattgttggagaggacagccgtgcggcgtctggggctgacggggccacgtgtccttcgccacttcttccagcatgtccccccggggtccccaggggctgggcatcctggcccaagcaggacagaaccctccctccagggtccttcgaagcagggtctgtctccctcaagccccaaagcgagggcttagcagagtgtggggttggcgcggggctgcagggtgctggctgactgcctcggggacagagaacaggccagcttgacagtacgcatctcttcgtctaaacctgcaaagtgggtgtcaaaccattgtcttcccaatttttcaaaaacgtcataaaatccctctgcatagtggttgtctgatgctgcatgagatgaacctggccggtcctcgcaagccccctgaggcaggacccgccctatgcccttccttcaggggaggggcctggcctagggcttcccggccgctggcccgcgcccgccctcacctgtgcacgaaattgttgcgatgaaggtgcaggacgccacaggccacctcacaggccatgcgctgcagggtccgggggtcgggagccatggactccgccacccggcagctccgcaggtagcccttgaggtccccctgcagaaagggggtgtggcgcagtcaccagcaggctgggggctggccaccctgggaggtccccacctacctccccaactcctccacccctacccacagctgagggacagcagctgcccagagcagcctcgtgccctgcacagtggccagcacccagcagttcctggaggggggccgtgtcccccagggctgggctggactgaaggcttcctctccactgcccctcagccagccccgggcagcaggagtcccttggcctgtggtagagagagaaacacagggcccaagtggatctgcttgatggagtctggggctggtggtcgagggttggccggcagcccctgacctgccgaaagcccagccccgggacggtcaacgtcaggagtccagacgccagtgtgtgagggcccctgtcccgagggaagccagcaggggatccagcccagccacagacagcctcggctcagtgcaggagctgcatatgtggaagggggtggggggcaggtctcgggggagggggagacgggtccccggggcaggggggcgttgatgggcaggtctcagggggagggggggacaggtccccggggcggggggcgttgatgggcaggcccagaactccaggcagcctggggaagtggccaggcccagccccccatggcaaaagcaagcctgagtgaggccgtggagcccaagtgggccagtgcccccccccagttggcccaggatgcctcctcctgaaccacagggcacacaagcaggtgaccaagcagctggcagctccccaggggtgcagggagccccagcccaggcctgttctgtgcccagcccccacagtccctccctggtgaggctaggtctccccatcgcctcctctggaaggtggtgggggcagggtccctgggtcttggctttagggaggatgtgaggcccccaaggagggggtggcaccagacactggcagggcaagggagggccccggctcagcaaagaccccagcatccccccgggcagcagctcaccagtgggcagaactccatcaccagcaggtagggcgtcacctcggcgcactgggccaggcactggagcaggttgctgtgcttcagggccctgcgggagtggacaggcggcccctgacttgggaggaggtggggagggggagtcgggccgagcaggggagggagaggagggggccgcacagcacaggcctttgtgcccggtggcctcccacctgtagggctgcacctcctccaggaactgcatctgctcctgcacgctggcactagcctgcagctccttcaccaccacctgggcactgctgatgccagagttcacctcccccaggaacacctgtgggacagacagcatcacccacggctgctccgcctcc

SEQ ID NO: 1887056 - DNA, 4001 bp, Homo sapiens
acaaacaaacatcgggaagagctaagttaaaagttgtgtaccttgtggccggagggggaggggaagcctttccctaggtgctgggggagggcccaagcactctcactagtcagcacatccatcagctgaagacacaaaacccagattataaataatttcatttttaattctctgtacaaaacttctcaatctatgaaaataaagtttgcaaaaggcaaagtagcacaggagcctcaggtcaggaggctaagcacgctgacctacactatgtacacgtctctctcccacgacggagagagaggcctctggggcagagccctgcttgcagtccgggaaagccaagttggcttccgtcagcacagggaaatgtacccctctcttccctgtacacaggaggaaaaaagccactaaggtgcctgcagagcaaggaggggggccccccaaaatggctcggcccctgcagtgccccgatcggccaccagaggtcagcaccatcatggccgccggtcttagggtcaagatcgcgcccctcgggccttccaccgcgaaggcacacagcagccgcaggtcgaactgtggaggccagagtctcttgcactgccttcggccttcaaagcttcgacgcaggacagaagctgcacgggaccaaagtggctagagacaggggtgctgaggccggggacacggggtctagctggaagtgacagtggtcccaccgcccaggcgcatgagcatctgctgacagtcgtgcagcagccggcgatcgccaagcttctcgagtgtgcgcgccgcctcagccagcatgcccacgcgctgcccgggcgccgacaggaagccggggggcaggtagcaggaggccagcagcaaggcctccgcgtgctcccgccgcgtgggccgcggctccagctccgccaccgcgcctgcgcacacgaggatgtgtcagggatgggtctcaagctggccacgcccccgcgggagccctgcccacacacaagccacggcaccagccgcctgtacctggcacacaggtacctggcgggggcctggcgggttcccctctccccaccctagtctcagcccacacacaaagtccacagactgagtcacgcacgtgcagtcatgtatcccacaaatgacagtcaccccactgattccttgtgaaaggaattgtcatcaggtaaccatcaagaagatgcttggtctttttttttttttgagacagggactctccctgtcactcaggctcactgcggcctccaactcctgggctcaagctgtcctcccaactgagcctcccaaagtgctaggtgtgagccactgcgccaggcctgtctgtcccgtctgacacacacacagcctcccttggtatcacatcccatgtgcgcccttccctgctgagcagacagcacatccctggtcagcagctgccccctcacctcctttgccaccggggcctgcccgccgcctcagactgcggtcgaggagctggtgtgtccgtgtggggctggcccccgccatcagccgggccgtggcctcatgtaggaacacctgggggccaggagagtggaggctcagggctctccatctccaccactgcctgactccccgtcttgaggacagggccatcgggcactcaccctccgcatggcgggccggaagctctgtgccagccgcctcaggctgctcaggtcccgttggaagccacgcagctcaagggcggaagcctggggcctgctgctggtgccctgggctgctggggccggggccgggggctgctgctgccgccacaggctggtgcgcaccacaagaagcaggtcacacaggaacagctgcacggcctgggggtggcaggcagggcaggggtcaccagggctccagctctgggaggggcaggatgggggcccgtggtgccaggggccggctccgggctgcactgccgaggcactgcacccgcctcacacacgtgcaatgcaacagcaatgcaccgcggggccgcccgcctctctcggcccccacacccgccaccggcccgggagcagctgtccagccctcctgatgcagggcctccaaagggatcctaccacaccatccacccccctcctcccagggatggggaaactgaggccagataggggcaacccctctcctctggacagaagccttagccaaaaagcagggtctgctggaccccctatcctgtgctgcttgggctaaccccatggtcttctgcagcccctgggggctggggagaggaaccagggaatggaaagctgaatcccccagccctgccaggcccctgaccccacccctcaccttgtcaatggagctgctggctggtgtggtagccaggctgtcctgcaggtacccactggccttctcacagatggtcaggctggctggaccagactctgccttggcacagcccagcagggcccgggcagccttgaaggagtgcagagctgccctgggcaggggtctcctgttgggaccagggcagaagagtgccagtcagaccagtccacaagccctggctgagtgccccccacttccctggctcgagttccctgaggaaaaaaggtggtgactcctcctgcacagaacaaaggctgagtgaggcacagtgcccaggggatgaggaaggctgagcccgggaccaggcaggaggaacctgccgtgcactcactcagactcctgcagcacccggggcaggtgctccaccagcgggcacagccgctcagccgcctcctcatcccgccgcagccagtggatcaccacagctgtcagagaggcccaccacttggccaccgggtctacgcctgcagaagagggagggtcccctgaaccctcagtcacgctgcacgggggagctgagaagggagccaggacaggggccggggactcaccggtggtggtggccatgctggaactgatggagaagctgtaggcaggagcccccgcagcatcagaacagctgttcagcagctgcaggtacccgagggcatccgagaattccctgtggaaggagagagctggctgtcggaacagatggcaggggtcctaggagggtgctccccacctgccctccagagtacagcctggcccctggctctgcaaagtgccactgtctcctcccacaggctggtggggagaggaaactcagagaggaatgaagcgtgcatggcacgcacggtagcccagctctgggctctctccacagggttgaggccagagctattctcagaatcccgccggaggggccttgcctggaggagggcacaacgacacttacttgtccccatcagctgacccagggctggggttgggctgggtcacacagttcagtgctcgctctaagagatgttcccggaatagctgagtcacctgggccagggggtccactgtggagaggaggaggtgagtggggtggggagcagggccccaccctcctctccaagctaagggctttttcctgggtgggctggggccacacctagggccactgggaagtgccggcatgcccctgggtgcagcccctgccaaggacaggggaaagcgggtggacataactatcaccagcaccagccttggccaggagacaacactgaggcctgccctacactgcttccaaaggaaaaccgacttgagaagatgccattgttggctccgcttccttactccacagcggcactgcctggggtcacttctccaattagccatctgcccatcaatccctgcatgtgcttctgaaagccccaatgggaacgagaggcacccaggcctttcccttcctgcaacccccacagcaacaacccatggcagggagaaggactggggtggccagagacagccagagattcaggcgacaagggacaggacaggaatgaggatgagggacaggagaggggacagggaaggggtaagagagcacctgggttcccggccaagctgtacaggctctcccatggggtactgagcacggaccagtccccatccacgaagaa

SEQ ID NO: 1887057 - DNA, 4001 bp, Homo sapiens
aatagcaagagtggtgaacagagcgatcctctactttctcatcatattctgcaaaatgagaagtcagatggatacaaaggttcctccaactctaggactccagggttgtgtggcggccctgcaaggctaggttatgtaaggtctcaccattgcaaacagaatggttcaagacagcaaggatgcactcctcaatttacaactccaaagcaccttgcacagagcttggctttggttacctacttgactctcttttaaacagagggtcttatgcttccctatcctgagctgcacatttgccagggaagtggcctcactgttgccctcatttctgcagaagagagccagagcaggagccatggatttatctctggcattctactcctccaagcccagctgtttcccaagtattaattggtttcagacaaggctttcgtttcagaaaatcaatgaagatgcttttgatcatcttcaaaagcagagaagaatcaccaaagaacttttcttccaagtagtaaaggaataaaacttctaaggaccacatatcacctattgcagggatgtctttcctacaaagattattgctctcccgaggaactgaaaatccttgttaggagatgacaccgatcaggtatgtacctgcatgtcaggtgtgtagctgtcaggaatatcaagtgttctgagcctgcctagagtgccctagagttccagcacgaggcctgagatgcattacattctcaaatatccatatgaaaaggtctggggtctctagttccccaatggtgacttcttttcatattataggaagcctgacaggagctctcctctaagcaaagcccagagttggactcatttcactataagaggctaaattcctcatactcacatcctgacaacattaggctataaggagcttggggaaaatccagccatccattcactcccgccccttagtggactgggttattttcaccacacagaaacactgcagggaaaatagccacttgtgtgaccctctttagctctttccctccctccctgatcaatgtgagcttatataattggcttaaatgaggaagtcagtagaaggggctagggccagccccaggctctgactcacgcaagggccagtgctgggtctgcagcctgtggccagggatgaacaggaatgttcctgttccccatgaggtttgctaaaagacccctttggtggtaggttgacaccccagcaagtggcctagcatggtccgaggcagccgcatagcctgtctgcatgatagcaggcttcagggatccagcttagctggaggcttgactgtgctagcctcggtggtacctgcactgtcattccatatgtcacaatccagggaagagaggctatcaccgagaagagttgtcagtaagaaggcaggacactctaacacgagcaaacccaccaggcttctgttgatccagggcagcatccccctcgcctggcagagttccttgccccacagccaaggctatgggaagcaaggcctccagcaaagctcatggctgccaccaaagcatctctgccaagatgcttcttatgatacttaggaaggatttccacccaaactggatcagggtcaccatgaccctgaatcacaaatccaacacaggctgattccaatcatggtttgaagctttagctgaaaagtttgctgtttgaaaaccatcaatgtgggggcgatgggtgtgcagggtaggaagggaacgcactattttccagtggaggaagagggtatgcctctttaggaaactgttctgggtagagactgctgtgggtgtttcctcaagcacagataataaccaggagatcaagccccaacatgcgggtaatggagtttatgtaacattgaaactcaatgactttggaactttaaaaacatctatagtaagaattcaaaacaccaagatctgaaggctaccccagagagcaaaggggcagccttcagatccaagtggcccaagacagaacctacagtagctatggattttctctaagaggaatcgggcactcatgacttcacttcccagagctctgcccagctgcccagcagcctggagatttccagaacaatggggagtaggtcaccctgccctgataggcaccagggggtggaaacgcctcctcgcccacaacacaatcactctcacccctttcctggctaaatcccacctcccaccctcccgccagctcccctcccatgctcccaatccttgggacctcttggggaattatccaaggagagttctgcctgctgtattttcactagggtcttgggacttctgcaggcagtcagcccaagtgcctacagcctgcctacttgggggagcagatggagagtgtggcaccagcagaaaatacccagaaagccgggtacaaagcctcagtaaagtccaccctgaacttatacatcaggtggaccttgtcggcaacagcgaagaagatgacaaagccgtggtcacagttgagaagcacgcccacccgcgtggccttggtggagggcagggttttctccacgttattgtgccaggcagagatcttggtgttgaaccactccacgcaccaggaggcgctgttgcggccgagcctgctttctgggccctgccggttcatgcttccgtagcagatgcctaccccacagaagttgttcttctgcagctccacctcccagtagtggatccccttcttgtagcagtgcaggcccagcacctgagagcagtatgtgaacctctggggatgcggccggtagttctgaggcatctcagccacagaagctactgtatagcactctgacagagccactttgttgtgggcggtgttgtagtccaggatgactttaatgtaatctgagaaaacatcaccccaaggaattaattacaaggggcccaaagtgctcttttagacctttgccaaagtggtactatttattcactagttttatccatccatgcacccatctacccattggtccatccatccactcatctatccatctgtctgtctattcatccatctatctgtctatccatgtatccatcaatccatccatgtatccatccatccatctatccatctacccatgtatccatatacccatctatctacctatctatccattcttccattcatccatctatccacttatctatccatccttctgcctttccatttatccattcattcattcattaatctatccacttatctatccatctgtccatttatccatccacccatctatccacccatccattattcatcagctcatctatccatccattcatccatccattctgtccagccagccagccatctatcatctatcagtcatccgtatgtctgtccattcatccatccaaaaccatttaccaggcacctgactgacaccagattctggcacaagatgcacaaccatgaaccagagagacaaggtgccgggcctcatggagttcacactccaacaagcaaggcaagtccatcagtaacaacaccatgagactcacactctgccaaaagggtaagcacacactgtagggacacagagacaaggcaactgatgctacagttggggaacatttcactggcaggctggaattggagccaagtaacagaagatgagaactagacagaggagaacagagagagaaaagctgttccagacagagggaacagtgagagtgaagccacggagtgccaaggggattcgcatgtgctgggatcggggaagctgggtggctgggaacacagatgcagcaggagaagggaaacatgttggggctagaaagggaagggcttaggaggctagactttaactggtgggcagcagggagccaagcgaggcactcatttgctaggtggctcagggcatgacacttttcactggagcccgagtttcccccaaggcaaaatgaataagctgggggtggaaaaggccctaagttgatagaattttactttccctgtttatgcggct

SEQ ID NO: 1887058 - DNA, 4001 bp, Homo sapiens
ctcagatcccttccccctccccttgccaatgccagcttggcaggggcaggaagtgggagcctggtggccctggcattcccagcacccagctctggctggacagggcttctggtgacctcacttccaccaaaccagttgatcctctagggctttgccttctaccttaatgccgaactgtgccctttctctgtccaggaggctcctcgtagccccacggacactcccatcagacactgccaccagggagagctggtggtgcaagctgaaggggtcctgggaggctcacgccctgccctacacaatgcaccactccactctctggggacaggaggctcagcacaactcctattttgccagctgcccctcttgcagctgatccaaactgggatcccatgggcaaacaccaaacatgggcaaaaagcaaccggcctgctggctgtgtgggcaccagagtgaccatggcaaggccagggcaagaccaccggctcaccgtgagctccgctggcgcacacagggccgtgagccccaggagctctctctcctccccatggccatctttttcttcttccaaggtctttccccttccctcccagatacagttctaggcgcttactcttcacattcctgagaatcgtaaatcctctgaggtggcagaaccaccactccgagatgccttggctcctcctccctgccaggcaacccccacaccgccctgagatggtggggcttcctctcccttagaagtcacacaggactccgggaggatgaagtccagcaggactgaagttcaggacacacaccggcgggctgcggagagggcctcctcgcgccggggctccacacaggaggagtaatgctattcctctagcttttgaagtaggagtggcgggcgaagctggcacctctggggcggagagccctttctccccggcccatctgcggactggggtgaacgaggagagggcaccagggaaggagcaggattgggggattccgaggaacgggagcagacacccacagacccgagggaagggggctgggttcccctgcgccgccctcccaaaggccagggaacaagaggtgcaggcggcaaaggcgctcaagctcccagcacagcctgggaaggagaggaggtcgcgggacgcagccccaggcctgcctaggatgtgtcagggcgcctggtcggcgggcggaagcggtctccccctcgcagctcgagtttcagaaaaacgacggcgggcgcggggctggacggccggggcacctgggtctctccggatcctcctcccactccatgccagcctgcgcggcttgggccccgcttacctgctccgggtggctcttgtcggcctcgcgaggctcattttcgttgccagccccctgcacctcggcggcggccggcggctcggcctgccccggcgcttcctgggcgcgcagcagctcctctcggacctggacgccgagcttctgcagctgctcgtccgtctcggggtcgaccaccagcaggcgcacggcgttgagtgcggcgcggatgcggctcaccacctgctggtgggtctccttctccacgttttcgccgttcacctccaccagccggtcccccgccagcagccccgccttctcggccggcgagccgggctccaccagccggatgtactggcccaacttgcccttctccccgtgcaggtggaagccgtagccgttcggacccttctccaggcagcagagccggggcaggggcgccccggccgctgcgtccgcgctcatctcgccctgcgacgggtcagcggcgcgacttggggttccgatggggacgggacgggacggcccagcccttcttcccgtccagcgaaccgggagcgcagcagagaagccctgagccgccggacgggccaagcaagcaggtgtcccaggaaccgtcggccgccgcgagccgcgaggagccgagagaggaccacagaccaatccccgccccgcgcggcgtctgagcgtcccagagtccgccccggctccttaccccgggggcggggccgcgctgagggtggggacctccgcgggccaatagggggctgcaggcctgggcgctccggccgggtgaacggcgccggccattgggaacgcgcggggcggggcctgcgctcggcgcggcgccccgcggcgggcgaagactagcgctcaggaagtggaagtgtttgttaccgagcggccggcgctggggtggcaggggcggggctcgccgaattcccggttctgggcgggtgggcccgccggctccggcctggtttcccctacctgtggcggggagtgaggaaagccggccctcgggtaaaggaccctaacttttttttttttttttgagacggagtctcgctctgtcgcccaggctggactgccgtggcgcgatctcggatcactgcaacctccgcctcccgggttcaagcgattcccctgcctcagcctcccgagcagctggggttacaggcgcgcaccaccacgccccgctaatttttgtatttttagtagagacgaaatttcgccatgttggccaggatggtttcaaactcctgacctcaggtgatccgccctgggattacagacgtgagccaccgcacctggccaacgttttaacagcctttagccaaagcctgggtgcagctccagttgagagggagcggctgttgccggggcaactgctcccgctcggggcagcgagggccggtcagtctcgagaattaagacggagggcctcctcggaccctacagagttgtttgaataacatttttccgtttgtgggaaccctaaccctaatccactttgtgctgtcccaggactcgcatagaggagtgcaggttctgatccctgctgggaaggtgagggctccgcggagagcctgggacctcgaggggcagcccgctgaagacaggccatctagggcaatagcgtgggctttggcagcagcgtttggctagggaggtggggtggggagaggcaggacagactcaggtaatcaacctctgggtacacgccacagggaaaggagccttggttttttttttttttttccaacagaaaaatgattaggactgtaaagccttctagctccctcttgccaaagagaggctggtcacagaggcgggagacagtctgttgagcggggagctgaccatctgaggacagacactgaggaaggaggatggaatgattttggcagtgaatgacaattccttcaacaagaccccccccccccactcacttcaaagaaacagtggacaggatgtgctttccaaaatactgcagtttaattctgaaaaactcaaatgcaagaggcccagagctgtctatgggattggatctcctgcaacctgccttgggccccagaagagactggcaatgtcagcctcctccctgctctgcctgagggaggccacggagaacttccttatcgggcccaaactggagccgctgactgctcagagcaagatttctgccttgaaagcaaatgcagtagcctcagaaatgtgcagcgcatacttcttcctccccctctccccctccaggccggcagagctgcagtaaagatgcctgcaggtcatgacctcatgtttcctgtccacttcccatggcagggatcggagctttgggagatatgtgaccaaggaggacacatgaacttgctacccctctctctaccccagacatacccacatgactttgttttactcatattgcattggtttaactcggaaatgggtgacctcccaccacctaacctgactcagtaggaggggaggtaaagcagtttaggccctggtatctgtttgagaagttaaaggaaagggcatgggtggtcagggaggaggcagagcttggggtcaaagggatacatgtcaggggaggtttgcttaatcttgtctcccaccagctccaggagccagggatttctcttttttttcacaacacattccaaacctaggaaagggatttctccttatctggctct

SEQ ID NO: 1887059 - DNA, 4001 bp, Homo sapiens
cagcactttgggaggccgaggcaggtggatcacctgaggtcaggagtttgagacccagcctggccaacatggtgaaacctcatctctactgaaaatacaaaaattagccgggcatggtggtgggtgcctgtaaatcccagctacttgggaggctgaggtgggaggatcccttgagtcctggaggtcaaggctatagtgagctgtgatgaagctactgcactccaggctgggtaacagagtgagactgtgtctcaaaaaaataaaaaataaaaaaataggtctcagaaaaatcggattcagccgagcgcagtggctcatgcctgtaatcccagcactttgggaggccgaggcaggtggatcatgaggtcaggtgttcgagaccagcctggccaacacagtgaaaccccgtctctactaaaaatacaaaaaattagctgggcatagtggcagacgcctgtaatcccagctacttgggaggttgaggcaggagaatcgtttgacctgggatgtggaggttgcagtgagctgagatcgcgccactgcactccagcccagacgacagtgcaagactccatctcaaaacaaataaaaataataataataatttaaaaaaaggtatttctgcttctcgacaatcccccaggacctccaaaagccttggctggtcaaaatagagtcatgtgtcacttaacaacggggatccatcctgagaaaggcattgttaggtgattttgttattgtgccaacctcacagagtgtgcttacataaacctagatggtgaatagcctgctgcacacctaggctaggtgggggagcccattgctcctaggctacacatctgtacagcacgttcctatcctgaatgctgtagacaattagaacacaatggcaagcgtttgtgtacctaaccagaaaaggcacagtaaaaacagtgttataatcttatgagaccactgtcctacatgcggtccctcgttgaccaaaacatcgttaggcagtgcatgactgtatctgcagggtggggctggatagggcaggggtagggagacctgctgagaatggaggagatccatgaagtgaaataaggatggaggactttcagtcaaggaaaagcaagctccagggtcacagtagagggggaaagaccctcaattcactgttctattttcaaaatggctagttcactgggtctcagacagacagtggattctgaggctccttctattttattttatttattttttgagacaaggtctcactgtgttgcccaggctggagtgcagtggtgcaatcttggctcactgcaacctgcaactcctgggctcaagcaattctcatgcctcagcctcccgagtagctgggactacaggcacacaccaccacacccggctaacttttgtatttttagcagagatggggttctgccatgttggccaggctgccttctattttaaaatacaatgcaagttcctgcgcagatagatgcctcctctactcctgcctcaacttctcaggaaaggttggggggcatcttgtccagcccaactctgttgcctctaacatcactgacccggaagatgaccttccttgggcactgcacgtgcagctaggctcttccaggccttcactgcacacaaaccagggagttcctgcaccctcctgggctccaacctgcacaggaatatcttgatgtccagccctcccgaccctcagccactccaatcctccaccagaagagaagatgctaaaaatgcacgcaaacaaaattgttttaataatcagcaaatccccattcactcttattttggacgtacattccaatctgaccccaggaagtcccggtcctcccagaagggccaggtgggtgagaggcaggttgctggccgctgcccgatgcacactgcaagaacaataaggatttttaggggcattatgactgagtcagaaaacacagctgcccctgaaagtccctcatttttcttgctgtccttgaacactctccaggtgaggaagcagtcgtctgccacgcccagatgagccgaggtgaagctggtgttccctcacccgacactgacgccttccccacagcccatggaaagctccctggtgggtgggaaggctgcagggtctccagagagacacaattttctccgatgccgggcccagctgcggccagcctcgccgccctcccaaggcatacccaggaatgacctgggttccacctaaagccaactcagaacccagcgccttctgcctgcaggaaactgcagaccagcatcctggtggaatcccaatgtggagagcagcccccaaaactcgggaacgtggcaagaactatactatagtctgtagcccctgtgttcacaggaggggcgtggaccatctcagagagacaatgatggtctcaggcctggcgtgacacatgaacacaagacagccagcctccaaccttcttgtaaccaggcctgaggccaggcctgattcaggcaaagagaagaaaacaccaggaagtgcccagaagagcaacccaggcctgaaaacccgggagaagagctgccccgactctctccagcccatcttaaagaacggcacacagacaggagattccaacaggaatgggcacgggaactccggttccgcttctctccagcagtcgcggccttggttactctgcctgtaaaatgggcctggaaggagctaagctcccaccaccctctctcccatttcaaagggaaagccaaagaggaaatgagactttcagctctgtcacagaaagcaaaggggctggaagaggctgcaacctgtgagaaacagcacgccctggggtgctgctgaatggatctcaggcccgcccaccaattctcggccatatcccaccctgcccttagcaaaagagcaacagcttcacattggcctgagtgggaaggcaggtcctcccaatacccttctatgaaaacggcctacaatgggcaacaaagacaagtgtgaagacctctggaatgtcctaggtggtttctgggttcaaatcaacaagcccacaggctctgctgggaagcacaggctgaaagaaaccaaggttgggtgaaggagatggtgagacagtggccaaaaagaagggaagagactggtggccaatttgttttttgtatgggaggataaaaaacaagagcttccagaatcagagactcgtagaggattctccttaatgggacaatcccttctgtcccgaggcccaggtgagcctccagggcagtagagggtcaaccccagcgtcagggcatcagggcccagaccaggaaggcccctagggaatgaggtcctgcatgtgcctcccacctgtggaatgtcacccagcaacaggaaacgtgtctcctgaggccaggccactttgcccaaggccccggcacagctggaatctgtccagcctggcactgcacctgctctttgggggccccactgtccatgcaggaacctggcctgtcaggacacaggttgccaccgctgtggtgaaaacacatccccacaaaagacagccagctgctggcaccactacctgctaacttgctgtatgacctgaccctgtgtaaattactcggcttcccagcctcagctctcttatctgtaataggaataataagcccacctggaagggcaatgtaaggatcgaaagaaagcaaagtgtgtagcaggctcctaacaaaagtggatcccctcagaccccaagggcaggggctgggccatagcgaattcttcccctctgggaagggggctgggtcagggtgccagcccgtgcctcgctgcaccctgggcactgacactgcatcttctccccaacactccacgctccttccagttcagactgtgaggaagtgtgcctgctatcccgattgccagctccagcctcagccctctcaaactgacattctggcacctgtcatccacccggagctttctgtcctaaccaagatcacagacatattctccaccaacaaagcagaac

SEQ ID NO: 1887060 - DNA, 4001 bp, Homo sapiens
gcagctaagtccctcccttccatttctatttttttctgactgctattttagaacaaagtggcatagtgcgggaaaaaaatgaggattttagaacaagacaggccttagtccaaatcttaggtctactatattttggcttccttgggtaaattactaacctctctaaggcttagtttccaagtctgtaaaatggggatattacccaccctgtggaggcgctatgacttaagtatgcatcaagtggtaaatagagggtccttttcttattttcacctcatatcagacacctcctgctcagaaaccttcagaggttgcccatcacttgactatgacacctaagccatgcattttgcattttggcccctctctctcatcactcttccccccaattactggggcttggactaatcaaaaacattggttgatggccaggagtgttggctcacatctgtaatcccagcactttgagaggctgaggcaggtggatcacctgaggtcaggagttcgagaccagcctggccaacatggcgaaaccctgtctctattaaaaatacaaaaattagctgggtgtggtggcaggctgctgtaatctcagctacttgagaggctgaggtgagagaatgcttgaacccaggaggcggaagttgcagtgagccaaaatcatgccactgcactccactccagcctgggcaacagtgcaagtctcaaaaaaaaaaaaaaaaccaaaaaaacaggcatggtggctcacgcctgtaatcccagcactttgggaggccaaggtgggcggatcacctgaggtcaggagtttgagaccagcctgaccaacatggagaaaccccatctctactagaaatacaaaattagctgggtgtggtggcacatgcctgtaatcccagctactcgggaggctgaggcaggagaatcccttgaacccgggaggcggagcttgcggtgagccaagatcgcgcaccattgcactccagcctgggcaacaagagcaaaactccgtctcaaaaaaaaaaaaaaaaaaaaaaaacaaaaggctgattccattactctttcctctttcctccctgctttcactttgccgttcaaaccaaatccttcttgattagctcagcaccaagtactggctccctcctcagccatccctatgtgtagttcagtggcacttggggccaactgcttgtcttacagattaggcaactctagattacaaagcactgaaagcaggggcttcatctggttggtctttgaccctgcagagccccttgcacacaggtgatgctcaataaatacttggtgaaagcacaattcattttctgtgtttcaatgggcttcttttctctatagaatcagatgcttggttattctcacctcagcgctattttgttggcttccagaaggcacagtaacgctaggtgtgttgtgttctatcctttaattggaagagctttgggaactgaaaaataagaattatttctccaagcctcatcttctgccactcccccgtactcaccggcctcatacaggaattgaactacttagcactgcacagaacacgactttctctctcacgcctccgttcctctgtacttagcctctgtacttacgtgccattccctttccctgaaatgcccttactctggcttctctgcctggcaaattcctactcatcctccaagactcagatcagacatcgccgcatcacatctgtgaaggctcttctgcaatgggcagtgtagcagtaccccctccatttttttagcttcctcagcaaactccaaataattataacagtacttatggcattatttgtttatttttcttctacttcctagaccgtgaattccttaagggccaagatttctgttctatccccagcacagtgttcggcctatattggagaatccggtccgtacaaactctgcagtgattcaatcaatgagcaaacaaactcaccaatcattcaacacagcagagtttgtacggaccggattctcaaatattttaagacctggtcctctatttggagtgcttcattctggaagatctcttcctcccccaagcccctacccatccaactgcctaggtttggtagaagaggaaaataaagtgattagacgggggaagagtccttcagggctaagctgtcatttacccgctctggcaccgagagggttacggcgacccgggggcggagccgtgcggaggccacctgctgcggggaggtctggcgcatgcgccctgacacctagctggttccctacccgcaggggcccggctgaggaggagcgcttgcgctctgggccttttccgccgggggaagtctcgcgggggcggggcggggcctcgtggagaagttctcgcgggacaccgacggggagcggaagccaggaggtattgctgcttcggcgaccgggcggcggcagcggcggcggcggctgtggcagagtctgtgcctgtggcggtgacggcggcgggagcaagcgctgccctcgcagagcagccttggggtcgccggccgctcgcagcgttgtggaggggcgggccggacgctgagcggagcagctgcgccacggtgagtacgggaggctgcgctcggcgcctctctcgtgccttttcctcttggctctacagcgggagtgggccccgggggaaccgggaccggccccggggttcgcgtcggggcggcgaggcttgggacgtggagcgcaatccccggggctccggactctacgtttccccttttggggcgcttccttcctggggaccgtcctcctccggctcttggctctgggcagtccgggggaagaggtcggggttctctggcgaggtcccctgccttcatcgggagggtttgcacggaaggggcccgggaagcccaggcgggccgaacgccgaccgagtcagtctacccgagcctggcggcgggggactggtgtgggctgcagctgtggtgattgatgtgccttcgacctgcacggcaaccacgtcaccatctcctggcgtctttgggcttaattttgtgcgggaatccactttggggtggaacgtttgctgctggagccgggggagatacctttattctgacacttaaaaaaaaaaactatttgaaaaatatttgtcaagaaaaattcagcagtagcaggttggactgcaccgaggaaggattgcggcgagagcgggcgctggtaattttcatttgcagcgcgccctctctatgattgtaagccacacatgagttatggcttgtttagaaagtttttcaaggctggcttcaaacgctgtgaaagtgcagtttgcaggggactgaagtgcacttgaggtctgtctctttttgatgctgttgactttccgaaatgtcagacacatgagagaaattagcattagtctattttggctttcttactcctctttctccagttatttccttccttctctatctgcttctgtcctttccactagggacacgaaatgcttgtgtaatgcaagtcatttgccccttcctccccccacccccccctttttttctaatgtacttccccttcctccttgtagtccccactctggcgtaatttttcgaggtttcttccctttcgtgctgttcgttttctctcatttcaagattccgtctttttcctcgggaagagactctctttccttgctttcgttcctttacttttgcgcgtcccctgcgttccctgcagtcagccagaagggttgctagagagccgtgggaggctgaagtcccctctctgagaacggggaggctcaaaagattgaattcatccctaagaaatcagtcctgccactaggtcgcaagtgtggtttgcttgtattatttttgtcttttactctttttcttttaagattatgcttctgtgcctgcttatgttttcttctagtatgtctttataataggaagattgggtcagctcagtgactttttttttttaggcagagttttgctctttttgcccaggctggagtgcaatggt

SEQ ID NO: 1887061 - DNA, 4001 bp, Homo sapiens
caaagtccacctgttctgactctagaacaaaaagctacaaatagaggaaataaataagttgaattcaaatgctgctgagaaaaggcaatgtatattatagttctgtggtagtactgataacattcaagtcattcttaggcaccagtcttacgtatatgaagtcactttttcattccattgtacaaaactcatattttgagaaaaatctaatagctaatagtctccaacaccatatgatcataatcctttagcttaagtagagatctacttattaaatgaggcaccatcaacctaaggaaagataagctgtaagagaatgaagacagaggtatatcaagtaacaagaacattcttccttatcaggataaaatgtttatcagtattcaaataaaatatcttaaatggaaagagacaggaaagaacatggttaaatcacagaaaatgaagaaagggagaagctgatcatgatcttgtacaacattatgacagcactaaggtattacgtatccaatacaaggatacttaatagaccaaagaatttaaaatcccagggaactggaataaccagccacaaaagaggcctctctttgttgtggttcacaacacaaaaggccatcaacaaattaggaaatattaaaattaagagagcagcaggtttcttcttggtagacagctcatgctaccatccacaaagtgagcagtggaaggggtatttaatgtcaaggctttattttgaatttctgttccagatgcctctccacagcattcatcacaccttccttcacacttgaagggaaaagtccttaagagttcaccacattttggtgttatttttagcataaacatttgtttttctataagaagtatctctctggattcaaaccacagaaatgtcaatgaatgttatttccattgtataatcatttaaaagtcacctacagagctgggtgcagcagcttgtgcctgtaatctcagttactcaggaggctaaggcaggaggattgtgtgaggtcaggagttcaagaccagcctggacaacatggcaagaccctcatctctacaggaaaaaaaaaaggcacctacaaattgaaactgacttgatagtttaggatcatttatcaccagtcccatgtacttgtagttgatttcaaatgtttggtacaggtgactgtaagacttcaagtattccatgaaaataacattcatgctgggatcataaaattacatttctgggacagtatttttaaagtctgtttttaacttttgtcttcaagagctactttcttcttgctgttctgaccagtgacctttttcctgtaaagagcaaagtaagaaaaattgaataaaaaattctacgtatatttactttccataaccctaccaccagtttaataaacatttactgaaacctactgtgtatcaaataatgaggcactaggaacacaaagatgcattagacatggtctctgccctttagaaaatcacaatcacctaagtgaggcagaaccatcacagtaaactacattactacatggtatgacacataggttcggatcctgacctaatgagttcacaatgattcagtgcttactgcatgctagaaacggttactaagtgctttacatgtattaactcgggtaattttcctaacaacttatgaggagtattgtattattatcctccgtttacagatgaggaaaatgaggcacagagtggttgacttgccagtcatcactcactggtaatccatgttagacacgaatcctatcagtctgatcctatagcctagtgaaggttgaatgtcattaactaagtggtaacagacaaaggaaaaaagttttgagaaaataatcaatgtttgcaaactattattatagtaatacaaagttctttggtgtatattaactcatataatcccaaatcccaactctacacagggaagtagatattagaaccagttcttctggctccaaatccagttcctccccgactcactgcatggggctgagtttgtgatgcctgaagtgaggtccactaggcagcaaggattcaggtttgtagctcaatggggaagttggggctgaagataacaaccttaagagcgatcagcacagaaatatgagctgagcctataggcatgggtgggatcattaaggaaacatctatagcatagaggtaagccagagttggatcatgatgggtcttgcttgtatgctatgttaagtagtatggcctttacatatgaagaaaatggagacacaaccaaagcaccttaagcagggggctgatatgacaagatttatatcaagtgtcttcgaagtcttagtacaaattaagttttaataacctcagaagaaggcaggtgcagtggctcatgcctgtaatcccaccatgttgggaggcagaggtaggcagatcgcttgagtccaggagtttgagaccagcctgggcaatatggcaaaaccccatctctactaaaaataaaacaatattagccaggcacggtggcataagcctgtagtcctagcttctcagggggctgagatgggaggactgcttgagcccaggaggtcgaggctgcagtgagccctgattgtgccactgcactccagtctgggtgacagattgagaccctgtctcaaaaaacaaacaaaaaaccccagaagtataaatgctataaacttataaaaatcagcatttagactgggcgcggtgggtcatgccttagcactttgggaggccgaggcgggcggatcacaaggccaggagatcaagaccaccctggccaacatggtgaaaccccgtctctactaaaaatacaaaaattagctgggcatggtggtgtgtgcctgtaatcccagctactcaagaggctgaggcaggagaatcacttgaacccgggaggtgaaggttgcagtgagccgagatcgtgccactgcactcccgcctagcaacagagattccatctcaaaacaaaaacaaatcagcatttaaagtataattatttaaaatactgatgtatcttattaaaattcaacatagccaccatcttatgttctagttgatttttgacctttgtaaaaactttcatcagttgctgctcagtgcctgaaaggactgcatttgttatcttggctttaagaccatccaaagagtaacacatacacaacagttctgatgtgacccactcctctcctaccaacaagtctattaagacagattaggtgaccaaagtggccaagcataacaaggttcgctaccaatccactggtctaagtgtcacccagaaactgttgcgacagaaaattaaaatttaaaaatgttggccaggtgcagtggctcacacttgtaatcccagcactttgggaggccgaggtgggagatcacatgaggccaggagtttgagagttcgagaccatcttggccaacatggtgaaaccccatctctagtaaaaatacaaaaaaattagccaggcatggtggcgggtgcctgtaatcccagctacccaggaggctgaggcacgagaatcacttgaacctgggaggtggaggttgcagtgagccgagattgcgacactgcactccagcctgggcgacagggtggcagagcaagactccatctcaaaaaaaaaaaaagtaaatgtgattgtgaagcattcccaaaactgaataagtacaaatggaatttgtacttattgattgattgactattcaaatatacttttttcagtttgtagcacttatccttcccaagttattaaaagtatgataaaattttgagacactatatatacactgtatatttgaaccgacttttattcctcatagacaataccaacatgtgaaaactcttgttcacttatttacaaagcacactctaattttcatgcctctattcatcttgttcccttctccatgcctaaattttacctatccttaaagatagttctactttgttgaaacttctgtaaccacaccaattcacaatcatctttctctta

SEQ ID NO: 1887062 - DNA, 4001 bp, Homo sapiens
aacatgatgggagtattggaaaagcacatatttactgggtgcggtggcttacgcctgtaatcccagcactttgggaagctgaggcaggcagatcacctgaggtcaggagttcaagactagcccggccaacatggtgagaccctgtctctacaaaaatacaaaaattagctggtcatgatggcaggtgcctgtaatcccagctactcaggaagattaggcaagagaatcgcttgaacccaggaggcggaggttgcagtgagccgagatcgcggcattgcactccagcctgggcaactgagcaagacactgtttcaaaaaaaaaaaaaaaaagagaaaagaaaagcacacatttgggattgtttctgatatataactgtgggtttcacagaagtagttttggctgctaaaatagaaaatgttgatattagatgttactgtagtactatcaagagtaactattcactaccacgattataactgagcaattacatttggcagacactgaatttaaaaaaaaagtagcgttgttaagaactgttatatagtgatcttagctcatggttaacaaattaaaaactgctttgctaataaaaatttgtagaaaattggtgacatcttaataactcatacctagggatctttacaccaacaattttgttatgacaatttcagtagtctgaaaagaccgtgtatttgtttaaaggtaaagtttgcagcttttagagggaaaaaaatctttaaaaaatcggtggagctgctttctttacaccttcctttttgacaattctgtaaattatactccactgtactgacaaataacaaaggcaaaggtatcagagtcacaagttcaatttttaaaaaatttacatttccaaccatgcacgagtaaaacataggtttccttacctcatcatcatcatcagaatcattcccaaacactgatggtttttgcaaaacagggtgcaactgctgtgttttctttggcaaaataagcccatacctgcatatattttttttgaaatagaaattaaacctttatgtttaaatgttaacaaatacatctactacctcttccacatgaagctaccaaatcaaaacatgtcataagctttatgaacacgtaacagactgtttttgcttctcagtgatctcaaaattctaacatgccgtaagattctataattactactctaagtgatcatttgtggacacgggccaaactcgaataccatttttatcaaagaagagaagtaaatgaaaagttcagaaatgttttaagatggcgaagtgacagtaacatttaaaaaaaaaaaaaaaaaacatgtgtagtggaaagtttagttcatgtccactaaagattttaaaatgctttcaactatccttgtggtctaaacagtcaagaaaatggctagattttttttcctactgtgtacttacacagtttctaagaactgactggatagtgtaactcacgaaaatttttaaaagataactgagaaacccaagtagccatggggcaagttcgcattacactttattaagatcatgtgctttgcctcggagcatctgagagaaccatcccatcagatccaactcctttagtttctcacgttttggcctttaagatgcggagatcacgggaggccgcatcaaaagtaaggattacacatcaaaggtaaaactttcaagtacgtacagtatttgtctcttttgcggcaacgtataccccaatttcctatatgcctaccctttttctgtggcttctcagaacaatattcctaaaacgagaaggaagggcgggaatcaggacttgagcttctgccaaggagaacaaggccctctaaggaagccaggaactgtctctcttcacactgcccctgagagcatccaagcggggagaaactcaagcgcgggttaggaagcaagactgaggggcctcagaccgagcttttggaaaatagaaaagtctcgctctctgcccctcagcctaacttcctttatttcctcacaagtttctccctcaaacttcgggcttccatccgggaaaatgtacgggggaggggaatctatgttcctcaggacttctcgttttttcccgtctctacccttgacgacacagtcccttcacttccagcgcatttaaaactcctcggccaaagatacagtcgccgtagtttctcatcccccagcctgaccctaactcccggatcactcactgcctgcccggaatcgccatcttgctcccgtgtccgctgaacgtggccgacgcctccgtgacgctgacgccgatgtcgtcacgtaaactctcgcgcggctttgggtggcccggatcctgcttgtcggttgaatcgctggtttgagtcacttctatggtactgggaatcggatccagtgacctctgttttgtttcggagcccaccggctgcctcaaaatctgtaggagaaaggaatgacaacgttctaggccagttgttcgcagtgtgtggttctgggaccagcggcatcagcaacaccggagatactgttaaaatgacaaattctcgggccctaccccaaacctgcagaatcagaaactttggagtgaagcgagttatctgaattttaaccagcgggtaattctgataaagtttgaaaaccactgccatggctatcgatattccccctacccccttccaagtgttcactttaactggttcaggataattaggcgaaaaatgaaaatctgtgtattaataataccttacataggaccaaaattattattaaaaaaaaaattttttttttgagacggagtttcgctcttgttgcccaggctagagtgcaaaggcgcgaactcggttacctcaacctccgcctcccgggttcaagcgattctcctgcctcagcctcccgagtagctgggattacaggcatgtgccaccacgcccggctaagtttgtatttttagtagagacggggtttctccatgttggtcaggctggtctcgaactcccgacctcgggtgatccgcccgactcggcctcccaaattgctgggattacaggcatgagccaccgcgcccggcccaaggaccaaaattattaataatactgttcacgggccattgggtataggaatcaggatcatatatgatacttttttttttttttttttttttttgagacgtagtctcgctcttgtcgcccaggctggagtgcagtggcataatcttggctcactgcaacctccgcctcccaggttcaggcgattctcctgcctcagcctcctgagtagctgagattacaggcgtccgccaccatgcctggctaatttttgtatttttttagtagaggcggggtttcaccatgttggccaggctggtctcaaactcctgacctcatgtgacccacccgcctcagcctcccaaagtgctgggattacaggcgtgagccaccgtgcctggcccatatatgatacctttttgaaaactctgcccacatctgtgcactcattcactcttggttcattcccagctagtctcagagcagccaaagagatcaattactgagataaggatgttgaaatctccaactataattgcgaatttgcttctcctttcaattctatcagtttgtgtcgtgtattttgaaattaggtatgtaaacatttaggattgttacgttctcttgcattaacctctactaacctctatagcattaagaagtggccctctttattcctttattcttctttgtctgcttggtctgctatcaatataactagctttcttttgattaatgctagcatagtgtatctttttcaacccattttaatctatttgtgtatttacattcaaattggatcacttgttgacagaaaatagttgggtcttgcttttttatccagtctgacagtctcttccatttaatttggatgcttaaaacattttcattaaagtgactatgattgcaggctgggtggggtggctcaggcctgtagtcccaacactttgggaggttgag

SEQ ID NO: 1887063 - DNA, 4001 bp, Homo sapiens
tgaaggcaagctccatgggtgcaggggtttgctttgatcgcattgtattttcaggacctgacacagcgctgaacacacagtaggggttcggccagtgtctgttgatgaatgaatgaaaggcacgtggtcccagacagaagagagcaaaggggaatgtgaggggtgaagccaatcaggcaggccgtgggggccacgggaggggatggtgtcactgtcccaaaggtaaagaggagccactgccaggcttgatcagggttgggaggagggaacatagagagtgatgtgaacagatttgggtctggaaaagatcatttcaatccccaactccagccacatctgtgtctctaacctaaacctgaattgcagtttcgaccccattccacatccagtctggaacctactggaaccttctcttcatctcacaatcccagccccctctgaccctaacttggcctgggcattgaatgaccttccttcgatggtgatggaagcgtgccatcagggaggaaagcagggctatgcttcctggttgacagaagctgctcctcggaggtgaaaggaaagaggacaggtccagaaaaagggaataggaacgtgcctgcctcctcactctccctgggtcccaaatcctatctttggagagtctatctctgactctctcataatgctcttcaccttactcctaacaccttctccctatcctgcggctctgacttctgtgattctatcagcaactagttcccaatcccaacctcccacgcttattttcttcagagcacttagtatccaaaattatagtgaacaaattcttgtttactgtttctttcacttctttcccagctattccgtaagctccatgtatgtttcatttcttctctgcctctgcagtgcctagaacgccgtgcaccgtgctcactacatatctgagggaggaacgacctggttcccaacaaacacagttccactggagctcagccctgcctccagccctcttcctagcttcattcttttttgggagggaagtgagggtatgtactttatgaaattaaaggataacacataatgaaatgaatgaagtaccctagacgcccctcagatcaagataagaacacctccagcagcctatatggcctccctctgccagggatactcaccagtagaggttgtctgagaattgctcagttttgctggttctggaagttcctatcaatggataacagaacgtatcccctttaatgtctggctctttttgctcagtatcatctttgtgagactcatccgcattgcagttcattctttttattcctgggtagaattctattttatgattataccacaaaatattgatcatattaatccattatttaacttaattcttttgtcttttttttttggagacggagtcttgctctgttgcccaggctggagtgcggtggcacgatctcaactcactgcaacttccgcctcctgagttcaagcgattctcctgcctcagcctcccaagtagctgggactacaggcgcatgccaccacgcctggctaatttttgtatttttagtagagacaaggtttcaccatgttggccaggctggtctcgaactcttgagctcaggtgacccacctgccttggctttctaaagtgctgggattacaggcgtgagccaccacgcccagctatttaacttaattcttatgccccagatttcactctgtcttctaatttagtttttttttttttttttttgggcttctgattttatatccaactccaatccctcaccagtggatcctggccccacaggaagcaacagatccccttctcctaccctgatcgttcctccccgcagcatcttcaggcctttgggcacccatgtggtccccgagccctagcttcaacacctcccacccttccagtcacagactctgggccctggggcagaaggacaggccagctttctcactgtggccactacctgtcccatttcccagagaggaatggcctggaggctggccagctgcgctgccacttagtgcccctccccctcccctcccccgcccaccagtggcctcagaaccaatgcaagtcactcactgcccatggccctgcttagtaggggtgcctggcactgtagccaatggggactggcaggaggaaggagcttattagtctgataaagatctggggaccacaccctgccccctcccgcaacttccctagggccctggctcaggctggactggctcccccaccctgaaggcgccttcatccacggcatcttctatccgccctttcagaggcaggcccagtgccctgcctgctcttcctccccaccagctcccagaaggcttggagcccagacacctgctcactcaccaccagctgggctccgcctgggcctgcccggcacccaccccggccaccaagggcagcagcttttccagaatttggctggcaggcctagtcaccccacctcgccacctcaccactgcacctcggaggccagccctgtccactccactctgtgcctggcttctcttgcctgccttgggccttcgtgtggcccctccacggtgtctgggactgagtgcccctcttgcctcctgaagagcagccatggccacctacaaagtcagggtggccacaggcaccgacctcttgtcgggaacacgggactccatctcactgaccattgtggggacacaaggagagagccataagcagctgctgaaccactttgggagagactttgcaactggggcggtaagagtgtgtgtgtgtgtgtgtgtgtgtgtgtgtctgtgtgtgtgtgtgtgtgtgtctgtgtgtgtctgtgtgtgtctgtgtgtctttgtggccccgggaggggtgaaggtgcgcagggggagccaggtgagctgagcttggcgaggagaggctggagagctgaggcacagctccgaaggcagtgggctccccagtggctctacacgccttgtccagagctggcttccagcccctcgcccatgtcccagatctctgggccatccttctccatcctgctccttcatctctaaccctttcaggcattcctcatctccctccccatccttttcttctctctccctcttcctcagccctctctccctgtctctgcctatcctgcatctctcttttctcaatcctttccacctgctttccttcccctttgctctcctcccctttctgtcttaccccctctcccgcatccctctctcttccattctcagtcactcttcctaattcagctgcctcctaactgtctcacatttgcactggattctctgtgacttaaaatggcatcagaccagcctgtccagtggaaggcacgctttgcgggtcctcagacctgattttcagtcagacccagccacctgctgctaggcgaccttaataggtcactctatctatgtggccattctgaatatctgcatcttcattgatgaatgggagaaggggctggctgggcctctccccactcgaaaactgtagagtggtacccaagtccccaggggtctgaagggttcctgcaacctcaggtgcctggagaggggagtgggagaagacaggagctggggatggagagaaggaggggctggagtcctacatagccctgggtagaggaatccagtaggagacccccaagctggagaagtcagaaggaagctcaatgatcaggtcaatatcctgtccctccgtcagtccagggaggtgagcattgcgcagcatgagcagggcctaggtgaggggccagaggggtgggcggcctgggagccggggtgaagtcctgcccactcagccaggcttgcatcctgcctaggtgggccagtacaccgtgcagtgccctcaggacctgggtgagctcatcatcatccgcctgcacaaagagcggtacgccttcttccccaaggacccttggtactgcaactatgtgcagatctgtgcccccaacggccgtatctaccacttccccgcctaccagtgg

SEQ ID NO: 1887064 - DNA, 4001 bp, Homo sapiens
aaaataaaagaatgaagaagctctgaaatgaaaagatcttctccaaaacaagatatagaacagtgtgtatatactgcctttgtaggagagaaagtaataaataaggaagaaattttaaaaatcttttatttttttttttttgggacagagtctcactctgtcacccaggctggagtgcagtggcacgatctcggctcactgcaagctccgcctcctgggtccacaccattctcctgcctcagcctcctgagtagctgggacttcaggcgcccgccaccacgcccggctaattttttgtatttttagtagagatggggtttcaccgtgttagccagaaaggtctcgatctcttgcctttgtgatccgcccgcctcggcctcccaaagtgctgggattacaggcgtgagccactgcgcccagctgaaaatctttatactggtatttgttgtagatgcatttagaaatttggaagaatatacaggaaattattatggttttaggggtgggaggaaagaacagggtagagggagaacaggaatgggaaaggctttcactgtatatgttttagattttttttaaccataaaaagattatctatgcaaattttttattttatttatttatttattttttttttttgagacagagtcttactctgtcacccaggctggagtgcagtggtgcggtctcagctcactgcaagctccacctcccgggttcatgccattctcctgcctcagccgcccatgtagctgggactacaaggcgcccgccaccatgcccagctaattttttgtatttttagtagagacggggtttcaccatgttagtcaggatggtctcaatctcctgaccttgtgatccacctgccttggcctcccaaggtgctgggattacaggcgtgagccaccgtgcccagctgcaaaaaaatgtttaaaaggctgtgtgaagaaggctctgcccagttctctcttcagcctagttcatctgccccacatactcttccacacatctgtctgtccccacctgtccaccacctcctgcatgcagcactcaggtcctgtgtcccccaggaggtattctgtgaagtcacactcttatgcgttatgtttcatctatttgttggacgttttaaatgtactctgacctattagtttccttccttctagatgaagacaacaatattttacactgtgccttgtagagactaagtatcttgtttttttgttgttattgtttgttttcagtttttgttttatttatttatttatttttaatttagaggcaggatcttgctacattgcccaggctggcctcgaactgctgggctcaagcaatcctcctgtatcagcctcccaagtgctgggatttcaggcatgagccaccgcacccggccaagtaacttgctaaaagtcaccggggcagagctggagcccaaaccagctctaagctgttctaagtccactttctccactatgcctgtattgcctgctacagttcccagctactccagtccctggagaagtcgatgactcccttggctttctttaattactaatagagttcagtaacagacaatcacatgctatgggaagaaagggaggaggagaggaaagaaaggagggaagagagaagatgggaaggagtgggggcagcgtactcactcttgcagagaccggtctgagtcctcagcatttgctgtgcccaggtctgagtcacaggacatgggctcctcgcaatggtctggactcttggagccattctcttggagtaagcagctatcagagtttaggctgcaggacagctgggatgaactggccgtgtccaggctgagggaggaggcagtcagcttctggttcctccgtatcttatggcccgagtgatggacttcgatgtcttcagagcctgaagaatgggaaatggaatccagagattccttccgctgtagttctgcaccagaggtagagagagggtccagctcagaaagcgggcaaagcccagacagggccaatggggtgagcgtccactcatttaagatggcagacttgtaggagagttcgaaggacaaggacgtgaggccctgcaggaagctaaggaggaactcgccctcctcagcatcccggagcagggcggtgggctggtagtactcatgcaagcgggcctgctcctgcagcagcagcttcaggtagcactccatcaggccatcgttcagggccagccgcagccatgcccggcagcggcccacatccgtgttgacaaacgtcaggtgctccaactctgagatgatgtgtctgggaagggagaacagacgtgtttcaagaaactaccccaaatcacagagatgtgcttttatccactggttagcaggaaccaggaataactactgcaaatagatacaggcatgaaaaaatattgggtaatagtgttttaggccagatgtggtggctcacacctgtaatcccagcactttgggaggccaaggcaggtggatcacttgagctcaggaattcgtgaccagcctgggcaacaggacgaaactctgtctctacaacaacaacatagccagatgtggtggcttgcacgtgtagtcccagctacccagctactcgggaggttgaggtggaaggatagcttgagcctgggaagcaaaggtcacagtgagcggagattggaccactgcactccagcctaggcaatatatatatatatatttatatttatatataataaatatataaatataaattatatatatttatacattatatatatatatatattttgagattggaattgtgaaagataatttccatgttcattccaactaccacggggcccctgacacatctgctcatctaaggcatgctgtcagagctccttaagtgcaaagtccttggagcaatgaagatgcagggtaaagacatggtccctgccctcaggcacaagggactgatggaaaaaggcataaagtgtaggaaatcaacaaccctgtaagaggattggggagcgctccaattacagcatgtggcggaaaagtgggtggtttggttgcaaggccaggaaagagagggtcttaaatatcaaatcaataaggcaacacggggtaatggccccacacccagctgtgcaccagaaccccctggggaacttgagcaggatacaagttctgggaccccaacctagtgaatcagtctccaggctagcatctgggagcctgtaggctacagatttttgtttagaaaagtgacttgaccacagtcatgcagactgcagggtagatgttctgcataaggagatcagaccccaggtgtaccaaactcagtcccagaatgcctccgtctgatgtacatgcccctctgagctaccacagtccctagcgcaggtttatctcctccatgggaatgtagaccgcactctactaggctcagtgagtaagctccagggagcttcagctcagtaaatgttgaccagatgatggactcaaggaaagacagagtgagataagggggacaaatagaaagccagtgtcacccaggaaagaagaacgtgagacaaggcagtggcaatctgcatggaaaggaagattagagactgacaaggcttcttttgggctgaaggtggcatttagtagtcctcagaggcacagtgccagctacttgctcaaaagcccagacagttaggggccaaagagataagtgtctcagggtgaatattcatatgcttttcctgattccactctttatataatcccagcactttgggaggcggaggtaggcagatcacaaggtcaggagtttgagagcagcctgaccaacatagcaaaacccctctctactaaaaatacaaaaattagctgggcgtgatggtgcgcgcctgttgtcccagttactcaggaggctgaggcaggagaattgcttgaacctgggaagcagaggtgccagtgaaccgagatcgcgccattgcactccagcctgagtgacagagcgaaactccatcccaaa

SEQ ID NO: 1887065 - DNA, 4001 bp, Homo sapiens
gaagaagctctgatatgaaaagatcttctccaaaacaagatatagaacagtgtgtatatactgcctttgtaggagagaaagtaataaataaggaagacattttaaaaatcttgtttttttttttgggacagagtctcactctgtcacccaggctggagtgtagtggcacaatctcagctcactgcaagctccgcctcccgggtccacaccattctcctgcctcagcctcctgagtagctgggacttcaggcgcccgccaccacgcccggctaattttttgtatttttagtagagatgaggtttcaccgtgttagccagaaaggtctcgatctcttgactttgtgatccgcctgcctcggcctcccaaagtgctgggattacaggcgtgagccactgcgcccagctgaaaatctttatactggtatttgttgtagatgcatttagaaatttggaagaatatacaggaaattgattattatggttttaggggtgggaggaaagaacagggtagagggagaacaggaatgggaaaggctttcactgtatatgttttagatttttttttaaccataaaaagattatctatgcaaattttttattttatttatttatttatttatttatttatttatttttgagacagagtcttactctgtcacccaggctggagtgcagtggtgcggtctcagctcactgcaagctccacctcccaggttcacgccattctcctgcctcagccgcccatgtagctgggactacaggcgcccgccaccatgcccagctaattttttgtatttttagtagagacggggtttcaccatgttagtcaggatggtctcaatctcctgacctcgtgatccacctgccttggcctcccaaggtgctgggattacaggcgtgagccactgtgcccagctgcaaaaaaatgtttaaaaggctgtgtgaagaaggctctgcccagttctctcttcagcctagttcatctgccccacatactcttccacacatctgtctgtccccacctgtccaccacctcctgcatgcagcactcaggtcctgtgtcccccgggaggtattctgtgaagtcacactcttatgcgttatgtttcatctatttgttggaagttttaaatgtactctgacctattagtttccttccttctagatgaagacaacaatattttacactgtgccttgtagagactaagtatcttgtttttttgttgttattgtttgttttcagtttttgttttatttatttatttatttatttttaatttagaggcaggatcttgctacattgcccaggctggcctcgaactgctgggctcaagcaatcctcctgtatcagcctcccaagtgctgggatttcaggcatgagccactgcacccggccaagtaacttgctaaaagtcaccggggcagagctggagcccaaaccagctctaagctgttctaagtccactttctccactatgcctgtattgcctgctacagttcccagctactccagtccctggagaagtcgatgactcccttggctttctttaattactaatagagttcagtaacagacaatcacatgctatgggaagaaagggaggaggagaggaaagaaaggagtgaagagagaagatgggaaggagtgggggcagggtactcactcttgcagagactggtctgagtcctcagcatttgctgtgcccaggtctgagtcataggacatgggctcctcgcaatggtctggactcttggagccattctcttggagtaagcagctatcagagtttaggctgcaggacagctgggatgaactggccgtgtccaggctgagggaggaggcagtcggcttctggttcctccgtatcttatggcccgagtgatggacttcgatgtcttcagagcctgaagaatgggaaatggaatccagagattccttccgctgtagttctgcaccagaggtagagagagggtccagctcagaaagcgggcaaagcccagacagggccagtggggtgagcgtccactcatttaagatggcagacttgtaggagagttcgaaggacaaggacatgaggccctgcaggaagctaaggaggaactcgccctcctcagcatcccggagcagggcggtgggctggtagtactcacgcaagcgggcctgctcctgcagcagcagcttcaggtagcactccatcaggccattgttcagggccagccgcagccatgcccggcagcggcccacatccatgttgacaaacgtcaggtgctccaactctgagatgatgtgtctgggaagggagaacagacgtgtttcaagaaactaccccaaatcacagagatgtgcttttatccactgatgagcaggaaccaggagtaactactgcaaatagatacaggcatgaaaaaatattgggtaatagtgttttaggccagatgtggtggctcacacctgtaaccccagcactttgggaggccaaggcaggtggatcacttgagctcaggaattcgtgaccagcctgggcaacaggacgaaactctgtctttacaacaacaacacagccagatgtggtggcttgcacacgtagtcccagctacccagctactcgggaggttgaggtggaaggatagcttgagcctgggaagcaaaggtcacagtgagcagagattggaccactgcactccagcctaggcaatatatatatatatttatatttatatataataaatatatataaatataaattatatatatttatacattatatatatattttttgagattggaattgtgaaagataatttccatgttcattccaactaccacggggcccctgacacatctgctcatccaaggcatgctgtcagagctccttaagtgcaaggtccttggagcaatgaagatgcagggtaaagacatggtccctgccctcaggcacaaggaactgatgaaaaaaggcataaagggtaggaaatcaacaaccctgtaagaggattggggagcgctccaattacagcatgtggcagaaaagtgggtggtttggttgcaaggccaggaaagagagggtcttaaatatcaaatcaataaggcaacaaggggtaatggccccacacccagctgtgcaccagaatcccctggggaacttgagcaggatacaagttctgggaccccaacctagtgaatcagtctccaggctagcatctgggagcctgtaggctacagatttttgtttagaaaagtgacttgaccacagtcatgcagactgcagggtagatgttctgcataaggagatcagaccccaggtgtaccaaactcagtcccagaatgcctccgtctgatgtacatgcccctctgagctaccacagtccctagcgcaggtttatctcctccatgggaatgtcgaccgcactctactaggctcagtgagtaagctccagggagcttcagctcagtaaatgttgaccagatgatggactcaaggaaagacagagtgagataagggggaacaatcgaaagccagtgtcacccaggaaagaagaacgtgagacaaggcagtggcaatctgcatggaaaggaagattagagactgacaaggcttcttttgggctgaagatggcatttagtagtcctcagaggcacagtgccagctacttgctcaaaagcccagacagttaggggccaaagagataagtgtctccgggtgaatattcatatgcttttcctgattccactctttaataaaaataaccccatacctccttaagagataacattaatggctgggcgcggtggctcatgcctataatcccagcactttgggaggcggaggtaggcagatcacaaggtcaggagtttgagagcagcctgaccaacatagcaaaacccttctctactaaaaatacaaaaattagctgggcgtgatggtgcgtgcctgttgtcccagttactcaggaggctgaggcaggagaattgcttgaacctgggaggcagaggtgccagt

SEQ ID NO: 1887066 - DNA, 4001 bp, Homo sapiens; identical to SEQ ID NO: 1887064

SEQ ID NO: 1887067 - DNA, 4001 bp, Homo sapiens; identical to SEQ ID NO: 1887065

SEQ ID NO: 1887068 - DNA, 4001 bp, Homo sapiens
ggtctgtgtatgtgtgtgtttttttttttttaattttgtttttccaacatggagtcttgccatttgcccaggctggtctcggactcctggctcaagcgatcctctagcctcaggttcccaaagtgctgggattataggtgtgagccaccatgcccagccagtaccaaggtgtgttttttaagagcaatattggccgggtgcagtggctcacgcctgtaatcgcagcactttgggaggccgaggcaggcggatcatgaggtcagcagattgagaccatcctggctaacacggtgaaatcgtgtctctactaaaaatacaaaaaaattagccagacgtggtggccgggcacctgtagtcccagctactcgggaggctgaggcaggagaatggcgtgaacctgggaggtggagcttgcggtgagccgagattgcgccactgcactccagtctgggcgacagagcgagactgtctcaaaaaaaaaaaaaaaaaagaacaatatcgatggttttattccctgaacatgctaagtgatccccatgtagtataagcatctcagaaggcaggaaaatgtaatgaacaacacccaccgccattcattccatccagagatcgttattttctgcccgggtgtgagtgtgtgtgtgcgtgcaaactgcacatgtgtgtatgaaatggaattaggatctttgtatacatcttgtgtcctgctatttttacttaatattctcggcatttctcatcttcaaaaatgtgattttaatgatggtgcaggcctttgacatatgggtttagaaaatctgcggaaacccggactgtttccaggttttgtcagtttaatgctgatgcaaatgtcctcgtacgtaaatctttctgtacttctgattatttccttgggataaattcccagaagtgggccaaagcacatgaacggtcttcaggcttttggagcaagttgagatcggtggggattggagaagggacccagggaggcttttgggagcttgcgagattggagtctggctttaggggacttgaattcacagatgaaggagatggctggcaaaggtgggaacctcctgctctatgggtgggggggtgacactgctttaccttccagtgacagcatggggatcctcccaacatgacctggctccgcatctttctgacactgtgcacggtccacagttgtgatgctcagctgggagcctcttctgtgtccttcagttgcattaactccttgcagacagaggaggaagctgtccggtgctcctccctgctgcgtgggtcctttgaatctgcccagttgggcctgtggatctgtgcagtcacgtacggggttctaaaatctgcaaaatgacaagctcacgaacactctcgcttctgtgggtgaatgtggataccccttggctgcgtctccctccacagggaagatggagacgtgtaaagtgacaaggacctgctacccctgggcaggttatgccggttccactgtgaggatggtggcagggggcttcccaggaggcctgcacattgggaagagaggggcgaccgtgtgtgactgcaggacccagggcgcagtcttaggactctgatgggggaggagatgctggggagccctgttctgccagcctggtgacagacatctcctaatgtttcccggctgggtacaactcacaatgtcctccgtggggaggcaattgcccatgaggcatccctggcagggatgatcttgtttcattgccacatatcccagcaatgaaacaagaatctagagtgatgtgattcctccgatgacttctccaaccatctggggtttttgtgcgactccaagaagggggaaggaggcagctctcgctcctctgggctcctgatgtggcagctctggaatggccacgtgtccgttggcccacagtgggccatttgtcgaatgtggttgtggtgggattggggctgggctggagagtgggtgaccacaccagctagcctcaccctgggccactgtgcagccaggggtttcatcttcccaggggtctcgttgtgagtgtcctggggctgctggaacaaattactggaaaccaagtggcccaacaaagattgattcgctcatggttctggaggccacaagtttgacatcaaggtattggcaggaccacactccctccgacagctcgaggggaggacccttccttgcctcctccagcttgcgttggcccaggcgctccttggctctggcagcatctgcagtctctgctctcatcacgtagccctccccaccgtgtctctttgtgtcccaagtccccttctgcctttctcctataaggacaccgagcactggatttagagcccatcccaaatccaggatagtctcatcccgggatccctaatcacatctgcaaagaccctttttccaaataaggtcacattcgtgggttcttggggttaggtattagacatgtctttttgggggtcactagtcaaccctctacagaacctcagacgaaagtgaatcttcacaggctgaaatgggggtgaaggtctagtgcgtccctcctccttgggagctccctcagggcttgtgcctatcctgtgatcctgtgatccagccttttttttgagatgaagtcttgctttgtcgcccaggctggagtactgtggcacgatctgggctcactgcaacctctgcctcccgaatttaagtgattcttctgcctcagccttccaagtagctgggattacaggcgcccacccccatgcctagctaattttttgtgtttttagtagagacagggttttaccatgttggccaggctggtttcgaactcctgacctcaggtgatccgcctgccttgggcctgccttggcctcccaaagtgctgggattacaggcatgagccaccacgcctggcatttagtaggttttggttgttttttttttttgagacagagtctcactctgtcatccaggctggagtgtagtggtgtgatcatggctcactgcagccttgatctcctggcctcaagtgatcctctcacctcagcctctcgagtagctgggattacaggcatatgccaccacccctggccaatttttgtattgtttagtggagtcggggctttgccatgttgcccaggtttgtcttgaactcctgggctcaagcgatctgtccaccttggcttcccaaagtgttggggttacaggcgtgagccaccacgcctggcttagtaggttttctagaagcgcctgaggcctggtgaaggcatggtgtcatggagtagagaacattcaactctgttcccggggagccggaacacacccctcgtagccaatctcaacagtcatgacgtggccaggatgacatggggagggggtggtgtggactgtgtgggaggccagctccccgggaagggggctggagtgggcttggctttgaggaggattcccaagaggaggaggaggcggtggcatgctcgtttggggggatggcgtgagccagggtgggcacctcttcatttaggtgtcaccttcttgacattccagccgggacatggtttccttggggaagatggacacccccagagtggggcatctcctggggaagatggacacctccggaatggggcgcctcctgttctcactgttcttctagcacacagttgtattctcttgcagttctggaggctgtgagatctcctggctgttatctagaacaaactcgcctttgagcagcgccgtcctgatggtggggtggcccctgcgggtggaacagcccctgctgtctcagagcttactgagagctagtgggcatgggagtggtgctggaccgaaacacccagagggatcatagagccaggcagtaagcacagaggccagctagtggggagggagggacccatccatgaaaagacaccaagcattgaaagagaggagaggatggttggggaccggcacacatgtgcattttgcgcagatggccaaggtggtgaggcgccagccacgcaga

SEQ ID NO: 1887069 - DNA, 4001 bp, Homo sapiens
tgcagtggtgtgatcacagttcactgcagccttgacttcccacgctcaagcaatcctcccgcctcagccccctgaggagctgagaccagctgattataattttctttttttttttttgagacaaagtctcactctgtcatccaggctggagtgcagtggcgtgatctctgctcactgcaacctccgcctcccaggctcaagtgattctcctgcctcagcctcccgagaagctgggattacaggtgcccaccaccaagcccagctaatttttgtatttttagtagagatggggtttcaccatcttggccaggctggcttcgaacgcttgacctcaaattgtccgcccacctcagcctcccaaagtgccgcctgactatccgctaatttaaaaaaatttttttgtagagaaggggtttcaccatgttgcccaggctggtctcaaattcctgggctcaagcagtccatgcaccttggcctccgaaagtgctgggattaatatgcgtgagccaccacatctaaccctctcttttttttatttttttattttttttttgagccaggttcttgctctgtcactcaggctggggtgcagaggcacgatctcagctcactgcaacctctgcctcccaggttcaagtgattctcctgcctcagcctcccaagtagctgagattacaggtgcccgccaccatgtccagctaattttttgtgtttttagtagagacagcatttcaccatgttggccaggctggtctcgaactcctgacctcaggtgatctgcccgcctcagcctcccaaagtgctgggattacaggcgtgagccactgcgcccggccaccctctcttttttttaaagaggggtcgcactgttacccaggctggactcaaactcctgtgctcaaaggatcttctcaccttagccccccaagtagctgggactacaggcatgtgccatcattcctggcttccttctctttcacataccctcagaaactcctgattggtccgaagggccacgtgatctcccagatagcacaggaggcaggccatgacctcatggacatcttcctctgcgatgttgacatccgcctctctgtgaagctcctcaagtgaccaccctctactgaccctcccagggcattccagctcaagctgctggcaggaactgaccagttctgtccttggctggggaccctccaggcactggtgagagacatgaacactgactggccactagctggcctggccctgttgagtctgcacagtccctgcccagctgtgtcttctgttggaagaaggaacctgccttagctcagtttccaggtggttcctctgcctggcaccacagctacaaaggtgtagctaagaagatggcccattggtgggagcaatgtcaccctgcctccagctagctatgggcccagagtttctccctgagtcgctgttgctagcagggagatttctcttcctgccctcacttctttcaccttgaacttggataagaactcgtgtctcctgagtgaggtagcgcctcccatctgctccccaattcttgatctctcccaccccatccctctccccagtcttggatactaataaaatataagcattctggttctcatctttattccttttatttatttatttttattttttaatattagggactgagtctcactatgttgtctaggctggtctcaaactcctgggctcaagaaatcctcctgccttggcctctgaaagtggtgggattacaggcgtgagccactgtgcctggcttatctttatttctttacaacaggaaagagaaaatgtatctattccctcccctacccccaatcccacgcccccacccctgccttgtttgagctggagtctcccttccagtagtctgcttcagggtcctgagttctcttcctggcacgttttctgggtatagcaagagaaccattaccattactaaactcagtaatggtaacggtttccttgccattcccaagtgccctggcagtcagtaggttgtgacaggctgagcagagagcttcttgggcttgcagcatctctcctgtcctccttgtcaggctccagagctgggggtgcccggactagtacatcatctatactgtagtgtctcatcgcaaacttacagtatatgatgatatcccagccagggccccactgggggcacaggaagcatggcttgaaaagcactgtgaggggctgggggcagaacaggacaggtcagggctggacacacacagcttcctgctccctgctctacagctccctcgcaggccagcgtctccttgattctgtggtcaggcacagcccaggtgggttatgggaaggggactggagctagggtctgttaagatctcatagggacccagggccagtgttaaacaagccagagatggcgtaatgatgcagaaggttccctttggtcacactaacaagcagacaggcagacagacccagagaaggtgcacttacctggagctggaactgcagactgaggaggcctttggatgcagggaggatctgtccctcaagctgcttgccttttatcataccggtccctcccctgggtggggcacttttcctggccctgcctcttaacccttgccctgctagagtccatgacaagggtcactggcccctttccctagaaggccttttctcacatactctctcatggaccatattcacccttcactcccatctccaagaagctcatcatctctgccgggctgggaaggagaaagaacagcctcatcccatccaccagcatttaattgctggtcagatccctagtggaaggtttctcgtttttgctttttttgtttttgtttttgttttgcagtggtggtaggcaatgttagttgaatctctctgtatagggcaggaagggtcctggcaactggatctccagaatctgtctggcagccgagctcaccctacccgtcagcctaaatttctattcccagcccctgcccctgtgtttatgatgagcccaaggaggccagacctaggcaggcagagagactctgcctagcactgccctggcaaggtcctcttgggggttgctctactaggagatttgagagcagctgaatccccagctcttgtgggtctgctcttcaaagctcaaggcacctccagtgagagcctagcactgtttggttctttgcctctggggtagaggagaggctcctcaaagcaaggcctctgctgtttagaatccccattctgggggacacgcccttccctcttccctatcctagacaatctggtctgtgtgctggaaggcagttaatactcttcctctgcgggggtagactagaccaggatggaagtgggagaagagacccaaccttttctgggtcctgtggaggtgttctatttcctgaggtcacagcacgctggcacatgctctaccctctgcttagcatggtcttccctcctttcttgtctagttagctcctagcccctcttcagagctctttttttttccttccttttttttgagacaatttaactctgtcacccaggttggagtgcagttgtgtcatcatggctcactgcagactccctgggctcaggtgatcctcccacctcagcctcccaagtagctgggactacaggcgtacaccaccacacctggctaatttttgtatttttagtggagatggggtttcgccatgttgtctaggctgctctcaaactcctgggctcaagtgatccgcccacatgggctcccagagtgctgggattacaggcgtgagccaccgcaccagcctccctcttcacatctctaagtgttacttctgcagggaagtcttcccagactatttaagtctccctgatagggacttatttatttgtgtgattattcacattaagtaaatagtcatgagggccttgtttattcactaatatatttctgtgtttttgtttttgttttttgtttttttttagcgagagtcttgctctgtcgccca

SEQ ID NO: 1887070 - DNA, 4001 bp, Homo sapiens
gaataaacaaggccctcatgactatttacttaatgtgaataatcacacaaataaataagtccctatcagggagacttaaatagtctgggaagacttccctgcagaagtaacacttagagatgtgaagagggaggctggtgcggtggctcacgcctgtaatcccagcactctgggagcccatgtgggcggatcacttgagcccaggagtttgagagcagcctagacaacatggcgaaaccccatctccactaaaaatacaaaaattagccaggtgtggtggtgtacgcctgtagtcccagctacttgggaggctgaggtgggaggatcacctgagcccagggagtctgcagtgagccatgatgacacaactgcactccaacctgggtgacagagttaaattgtctcaaaaaaaaggaaggaaaaaaaaagagctctgaagaggggctaggagctaactagacaagaaaggagggaagaccatgctaagcagagggtagagcatgtgccagcgtgctgtgacctcaggaaatagaacacctccacaggacccagaaaaggttgggtctcttctcccacttccatcctggtctagtctacccccgcagaggaagagtattaactgccttccagcacacagaccagattgtctaggatagggaagagggaagggcgtgtcccccagaatggggattctaaacagcagaggccttgctttgaggagcctctcctctaccccagaggcaaagaaccaaacagtgctaggctctcactggaggtgccttgagctttgaagagcagacccacaagagctggggattcagctgctctcaaatctcctagtagagcaacccccaagaggaccttgccagggcagtgctaggcagagtctctctgcctgcctaggtctggcctccttgggctcatcataaacacaggggcaggggctgggaatagaaatttaggctgacgggtagggtgagctcggctgccagacagattctggagatccagttgccaggacccttcctgccctatacagagagattcaactaacattgcctaccaccactgcaaaacaaaaacaaaaacaaaaaaagcaaaaacgagaaaccttccactagggatctgaccagcaattaaatgctggtggatgggatgaggctgttctttctccttcccagcccggcagagatgatgagcttcttggagatgggagtgaagggtgaatatggtccatgagagagtatgtgagaaaaggccttctagggaaaggggccagtgacccttgtcatggactctagcagggcaagggttaagaggcagggccaggaaaagtgccccacccaggggagggaccggtatgataaaaggcaagcagcttgagggacagatcctccctgcatccaaaggcctcctcagtctgcagttccagctccaggtaagtgcaccttctctgggtctgtctgcctgtctgcttgttagtgtgaccaaagggaaccttctgcatcattacgccatctctggcttgtttaacactggccctgggtccctatgagatcttaacagaccctagctccagtccccttcccataacccacctgggctgtgcctgaccacagaatcaaggagacgctggcctgcgagggagctgtagagcagggagcaggaagctgtgtgtgtccagccctgacctgtcctgttctgcccccagcccctcacagtgcttttcaagccatgcttcctgtgcccccagtggggccctggctgggatatcatcatatactgtaagtttgcgatgagacactacagtatagatgatgtactagtccgggcacccccagctctggagcctgacaaggaggacaggagagatgctgcaagcccaagaagctctctgctcagcctgtcacaacctactgactgccagggcacttgggaatggcaaggaaaccgttaccattactgagtttagtaatggtaatggttctcttgctatacccagaaaacgtgccaggaagagaactcaggaccctgaagcagactactggaagggagactccagctcaaacaaggcaggggtgggggcgtgggattgggggtaggggagggaatagatacattttctctttcctgttgtaaagaaataaagataagccaggcacagtggctcacgcctgtaatcccaccactttcagaggccaaggcaggaggatttcttgagcccaggagtttgagaccagcctagacaacatagtgagactcagtccctaatattaaaaaataaaaataaataaataaaaggaataaagatgagaaccagaatgcttatattttattagtatccaagactggggagagggatggggtgggagagatcaagaattggggagcagatgggaggcgctacctcactcaggagacacgagttcttatccaagttcaaggtgaaagaagtgagggcaggaagagaaatctccctgctagcaacagcgactcagggagaaactctgggcccatagctagctggaggcagggtgacattgctcccaccaatgggccatcttcttagctacacctttgtagctgtggtgccaggcagaggaaccacctggaaactgagctaaggcaggttccttcttccaacagaagacacagctgggcagggactgtgcagactcaacagggccaggccagctagtggccagtcagtgttcatgtctctcaccagtgcctggagggtccccagccaaggacagaactggtcagttcctgccagcagcttgagctggaatgccctgggagggtcagtagagggtggtcacttgaggagcttcacagagaggcggatgtcaacatcgcagaggaagatgtccatgaggtcatggcctgcctcctgtgctatctgggagatcacgtggcccttcggaccaatcaggagtttctgagggtatgtgaaagagaaggaagccaggaatgatggcacatgcctgtagtcccagctacttggggggctaaggtgagaagatcctttgagcacaggagtttgagtccagcctgggtaacagtgcgacccctctttaaaaaaaagagagggtggccgggcgcagtggctcacgcctgtaatcccagcactttgggaggctgaggcgggcagatcacctgaggtcaggagttcgagaccagcctggccaacatggtgaaatgctgtctctactaaaaacacaaaaaattagctggacatggtggcgggcacctgtaatctcagctacttgggaggctgaggcaggagaatcacttgaacctgggaggcagaggttgcagtgagctgagatcgtgcctctgcaccccagcctgagtgacagagcaagaacctggctcaaaaaaaaaataaaaaaataaaaaaaagagagggttagatgtggtggctcacgcatattaatcccagcactttcggaggccaaggtgcatggactgcttgagcccaggaatttgagaccagcctgggcaacatggtgaaaccccttctctacaaaaaaatttttttaaattagcggatagtcaggcggcactttgggaggctgaggtgggcggacaatttgaggtcaagcgttcgaagccagcctggccaagatggtgaaaccccatctctactaaaaatacaaaaattagctgggcttggtggtgggcacctgtaatcccagcttctcgggaggctgaggcaggagaatcacttgagcctgggaggcggaggttgcagtgagcagagatcacgccactgcactccagcctggatgacagagtgagactttgtctcaaaaaaaaaaaaagaaaattataatcagctggtctcagctcctcagggggctgaggcgggaggattgcttgagcgtgggaagtcaaggctgcagtgaactgtgatcacaccactgcactccagcctgggtgacagagcgagactgtctcaaaaaaaagaaaagaagaagaaaaaaagagagaaggat

SEQ ID NO: 1887071 - DNA, 4001 bp, Homo sapiens
agggaaggccttgctgattagttaacatgtaatctgagatatgtgtgaatgaacagtgatctggaacaggtgcattctaggcagaagaacagcaaatacaaagggtggatgggaaccagctttgaatgttcaaggaacagaaagaaggccagtgtggctggagtgagagagaagcaattatatagacatggaagcagaacggaagagaggagttaaaagcaagcaggggccagtccacagaaggtcttctaagccacagtaaggaatttgagattattctaaggtcaacaggaaaacattgaagggtttccaacaggggaacgacatgatgccatttacatttaaaaaatatccttttggcttctgtgtgtagaatgtgggacagtggttctcaactaagtgtgattttgtcccccagaggatatatggcaacctctagagacattttagtttggttgaaaagttgttgggagggggtgggtggcacattaggtgctactggcacctagcgggtagagtccggggatgccacctgacatcctacagtgcacaggtcaacaccctcccctctgccaacgatgaagaatcactggtcccaaaatgtcaatagtgccaaggctgagaaacactgacagttctagcagcttggaaagctagagcatggtctactgggacagcgcaccactttaaggaacagtcatggaagagggttacctttaaaagtaaagagaaatcatcaaagaaaacagcaacacaaatgagacacaatacctaccactcatgggccactatgtaggaattttaacagtgatctctaaggtaggctgtaataactgtggcttcccctattttaataatgcattgtaacaattgttaacagtgattaagtttcgcaaaagcacgtgctgaatcagttaagaaaaacttaggatgcaagctgaacaagagactccagagagcctaaaagatgatggaacatatgcatatataagaatcacaagtaacacaatgatacacaggtctggcgacgatatttcaaacgtatgcaagctcatgtgagaagcagaaaaccaatcaaggacacgctttaagacacaaggaggacacgctttaagacacaagtcctctcccttagtctcgcccacgctgggaagctggtggggtcgtgtttgaatagcaaaggtgtgcgaacaaaccaaattaggaaaactgcagagtaccttagcctttctagacgctgcaagagccttctctcctccctgtccaaatactaatcctgccgggagtgaggcctggaaggaggcccaggggaagcgggagaagaggtctgggccaaggagagttctatctgcgaagactccaggctcagagcgctactcacctgtctccagggcgacggcagcggccataacaggcaaagacagcgaatcgccacctgcctaacagaggaaaagcccggaggggcgggaggagttccggaaaccacggctccctcttgcggtcccggggcaccgaggaatatggggacggtggctccgctcatccccggccaggcccgcttagcccgcgctggctccggaatggcgagggggcggtgccgggctgtgggagcgcctgaggggcaggagtccagggaggcagacttttaccctcaaaaggaatgagtcccagagcctggcacaaggaagacaagtgtgcaaagttggtggaatgaattcggtggcctaaatgtaccttcctcaaatgccacggctgactgggtctcctcgcccacttcaccctctcttgcaatccaacttgtgaggcgtgtgtgtgtgtgtgcatgtccgcgcttgcctttagatggaggttggcttcccagccatccaggcttgcatacacgtgcataactcctacccctacctcgcctgcctgctgtaccaggggttgattccttcttcctgcgtgttttctgtccaaatccttttctgatttggacagaaaacacgcaggtggcacacagtaagcgcttaataaattttccggctacctgatcttcttggaattgagggcatgctcctgtgcgcccctcattgcacagagctcccttgtctggaaactcagcagtcaccggagccgccgtcggtcctctcgctttctctattttaaaaaacgtttcaaccgctagcgctgttggatctctacctttcaggctttatcacctggggtggagtgggtggtgagagggaagggatggggagtcaagacaggagaacgctctcgatttcccgacccacctcccgtcatatctcatgtcatatctaccgggtgttctacccggtcctgttactttttttcttccgcgaaagcccaaattcccatcactgctctagctctctcccagatcgccaaatccggatgtctgtctcagggaacgtcaaagcaacatgcccggatgaggtcctcccctctccccacctcccagccctctcctcctgcctcccccggtgtcacccgcgcctccttcctctcttcacctccctctaaacaagaatccggcgcagtcagttctagaccctgagcatctcccgcgtccctgcccaatatccgtcccgcccccgatcgcccgcgtcctcttgaacctgcggagccctgctccccgcactccacgcccttgctccgagcttccgagaaagcggggcaaagggagccagaaagagagaaaatgcgcacggagcaggtggccccgcgactccatggtgaggggacggggcacggaaggtggaaaggcgcgctccctcctcccttttttcctccctatggtgggcagttggtgacacacagtaaacgctcaataaatgtttccgctactcgatctccttggaattaaggggatgctcctgagcgcccctcattccacacagctctggtgcctggaaactgcggtcgccggagcggtcgtcggtcctcccggtttctctattttaaaagccatttcaaacctccagcggcctcgccacctctgctgcagaccttccaagcccttctgaagccggaatgatttctccctaattcactccccctgcttaacacattcgaacggctcccgcttgttctcgggaccaaatccaaagcccctggcgccaccttcgagagcctccggacctgctgaccccccacacctgggctctgagctccagatccaagatgctgctcgccctcccttccccgccgctctctttctgcgcgcctttcccctgccttccctttctgtcactctccctggctgagccctctccgcctccaggtctccgggaaggttgtccccaggccggtggggcccctgcaggtcctcagcctcgggcggggtggggtggaggggtcgcacagcgggaattgccaccagcgcgtccgggctccacagcgcgctcgtccagggcgcggcagcgctcagcccagcgcttggcacagtcagtgaccacagggaggagaaagtgaaggcaggagcgcaccttcccacctgccgtccccgtcccctcagaaccgagtcctggggccacctgctcggcgcggtccctctctctctggctcagtccccccaccccgatacgtctcctcctctcagaggctccgaggaagggcgtgggcgctggagggagcagggctcagccgggtgcccctcccgccaggccccaccggggctgagcctcttctgtcgcccgcaggagacagaactcaaggtggaagtaccggagtacctggggccgctgatgtttgtgaaactgcgcaaacgtcacttccttcaggttctgcagctggatctccgtgtagggccccggagccggggacgaggtcaggttcccttgttaccgctgggtggaggtcgacggcgtcctgagcctgcctgaaggcaccagtaagcgcggggctgggggtgtcaggaggcctctggggtgcgagagaagctggggggatgcgcgtgtggagaagagggcgcaggatgggggtgctggaacctggag

SEQ ID NO: 1887072 - DNA, 4001 bp, Homo sapiens
tctcgcaccccagaggcctcctgacacccccagccccgcgcttactggtgccttcaggcaggctcaggacgccgtcgacctccacccagcggtaacaagggaacctgacctcgtccccggctccggggccctacacggagatccagctgcagaacctgaaggaagtgacgtttgcgcagtttcacaaacatcagcggccccaggtactccggtacttccaccttgagttctgtctcctgcgggcgacagaagaggctcagccccggtggggcctggcgggaggggcacccggctgagccctgctccctccagcgcccacgcccttcctcggagcctctgagaggaggagacgtatcggggtggggggactgagccagagagagagggaccgcgccgagcaggtggccccaggactcggttctgaggggacggggacggcaggtgggaaggtgcgctcctgccttcactttctcctccctgtggtcactgactgtgccaagcgctgggctgagcgctgccgcgccctggacgagcgcgctgtggagcccggacgcgctggtggcaattcccgctgtgcgacccctccaccccaccccgcccgaggctgaggacctgcaggggccccaccggcctggggacaaccttcccggagacctggaggcggagagggctcagccagggagagtgacagaaagggaaggcaggggaaaggcgcgcagaaagagagcggcggggaagggagggcgagcagcatcttggatctggagctcagagcccaggtgtggggggtcagcaggtccggaggctctcgaaggtggcgccaggggctttggatttggtcccgagaacaagcgggagccgttcgaatgtgttaagcagggggagtgaattagggagaaatcattccggcttcagaagggcttggaaggtctgcagcagaggtggcgaggccgctggaggtttgaaatggcttttaaaatagagaaaccgggaggaccgacgaccgctccggcgaccgcagtttccaggcaccagagctgtgtggaatgaggggcgctcaggagcatccccttaattccaaggagatcgagtagcggaaacatttattgagcgtttactgtgtgtcaccaactgcccaccatagggaggaaaaaagggaggagggagcgcgcctttccaccttccgtgccccgtcccctcaccatggagtcgcggggccacctgctccgtgcgcattttctctctttctggctccctttgccccgctttctcggaagctcggagcaagggcgtggagtgcggggagcagggctccgcaggttcaagaggacgcgggcgatcgggggcgggacggatattgggcagggacgcgggagatgctcagggtctagaactgactgcgccggattcttgtttagagggaggtgaagagaggaaggaggcgcgggtgacaccgggggaggcaggaggagagggctgggaggtggggagaggggaggacctcatccgggcatgttgctttgacgttccctgagacagacatccggatttggcgatctgggagagagctagagcagtgatgggaatttgggctttcgcggaagaaaaaaagtaacaggaccgggtagaacacccggtagatatgacatgagatatgacgggaggtgggtcgggaaatcgagagcgttctcctgtcttgactccccatcccttccctctcaccacccactccaccccaggtgataaagcctgaaaggtagagatccaacagcgctagcggttgaaacgttttttaaaatagagaaagcgagaggaccgacggcggctccggtgactgctgagtttccagacaagggagctctgtgcaatgaggggcgcacaggagcatgccctcaattccaagaagatcaggtagccggaaaatttattaagcgcttactgtgtgccacctgcgtgttttctgtccaaatcagaaaaggatttggacagaaaacacgcaggaagaaggaatcaacccctggtacagcaggcaggcgaggtaggggtaggagttatgcacgtgtatgcaagcctggatggctgggaagccaacctccatctaaaggcaagcgcggacatgcacacacacacacacgcctcacaagttggattgcaagagagggtgaagtgggcgaggagacccagtcagccgtggcatttgaggaaggtacatttaggccaccgaattcattccaccaactttgcacacttgtcttccttgtgccaggctctgggactcattccttttgagggtaaaagtctgcctccctggactcctgcccctcaggcgctcccacagcccggcaccgccccctcgccattccggagccagcgcgggctaagcgggcctggccggggatgagcggagccaccgtccccatattcctcggtgccccgggaccgcaagagggagccgtggtttccggaactcctcccgcccctccgggcttttcctctgttaggcaggtggcgattcgctgtctttgcctgttatggccgctgccgtcgccctggagacaggtgagtagcgctctgagcctggagtcttcgcagatagaactctccttggcccagacctcttctcccgcttcccctgggcctccttccaggcctcactcccggcaggattagtatttggacagggaggagagaaggctcttgcagcgtctagaaaggctaaggtactctgcagttttcctaatttggtttgttcgcacacctttgctattcaaacacgaccccaccagcttcccagcgtgggcgagactaagggagaggacttgtgtcttaaagcgtgtcctccttgtgtcttaaagcgtgtccttgattggttttctgcttctcacatgagcttgcatacgtttgaaatatcgtcgccagacctgtgtatcattgtgttacttgtgattcttatatatgcatatgttccatcatcttttaggctctctggagtctcttgttcagcttgcatcctaagtttttcttaactgattcagcacgtgcttttgcgaaacttaatcactgttaacaattgttacaatgcattattaaaataggggaagccacagttattacagcctaccttagagatcactgttaaaattcctacatagtggcccatgagtggtaggtattgtgtctcatttgtgttgctgttttctttgatgatttctctttacttttaaaggtaaccctcttccatgactgttccttaaagtggtgcgctgtcccagtagaccatgctctagctttccaagctgctagaactgtcagtgtttctcagccttggcactattgacattttgggaccagtgattcttcatcgttggcagaggggagggtgttgacctgtgcactgtaggatgtcaggtggcatccccggactctacccgctaggtgccagtagcacctaatgtgccacccaccccctcccaacaacttttcaaccaaactaaaatgtctctagaggttgccatatatcctctgggggacaaaatcacacttagttgagaaccactgtcccacattctacacacagaagccaaaaggatattttttaaatgtaaatggcatcatgtcgttcccctgttggaaacccttcaatgttttcctgttgaccttagaataatctcaaattccttactgtggcttagaagaccttctgtggactggcccctgcttgcttttaactcctctcttccgttctgcttccatgtctatataattgcttctctctcactccagccacactggccttctttctgttccttgaacattcaaagctggttcccatccaccctttgtatttgctgttcttctgcctagaatgcacctgttccagatcactgttcattcacacatatctcagattacatgttaactaatcagcaaggccttccctgaccattttatcaaaagaagccacttacttccattctctatcacattacccatgtatttcc

SEQ ID NO: 1887073 - DNA, 4001 bp, Homo sapiens
cagatgcgttcagctggcccgtgcccactcgctgggccttaggctggtgtatgtggggaagttctaacggctctcctggtgggaagggatgttgctctgcttgtattcagttggccatctgtagctaccctgttcttcccaactctcctccctagctagagcaccagccctgggaacacggggctttaggtctgcttgaaggtgaggacgtgactcccacatgtaatcaggagaaagggacagaggaagccccagcccccactgtggctatcctgactccagtggccacatctcaggtgccaggggctgtgggagcttgtgccgtccttggccaaacaccccgcaggcaaagatgcacccctgctgatggagagccttctgcttctgccctctggccctctaccataccacttccccagccagaaccggcgtgcagctaggaggaatgggttgcacggcggagggggtgaggtgggaggcgtctcactgctctcagggttcaggtagaatgttgctggttttgaagctcacctgttgtggagtgttctaatcagttttggctttctgagtttttgtggaattaaagtgctgctgctgcgaaggctgaggctgagtctgtgtggggttgcagtgattaataagccaaaggaatgggaatgagggtcggtgttgttcacgcagctcccttggggctggtgctgggagtggggtgggggtggagatgtctcaggctccgtggggaaagatatggttcttgctcttaagcatctggtctgaggggaaatgtgaggacacagataatcactcacaggggcccagagatccggtaaccacagaaacgtaaaaaagatgctctagaagagaaggggaagaaattgtcttctcaggtcctcatgaataggcaggggctgggtggattggacggacatcttacctctgggggaagactgggaacacttgtcagctctattcctgaccatttcccacactctgcagatcagtgccacgtggtttgagacaaatttgtcccaaagccttttgtttacagttcacacagtaagttcaggagccatatattgtggccataagatgtagaagcaaagatcacgaaacaaccccggtttctctcaatcccttcctctcaagacacgcccactttagaatgcgctccaatacgctccctgttctgggattggaaatgtggcgctgtttttccccagagacgttacttggctctaaaacggagtgcagtaatcgtactttcgaaaagtttcaatcctggcccgtacggggatcgaacccgcgaccttggcgttattagcaccacgctctaaccaactgagctaaccggccagttgctacgaaaagcttgaaataaatctatttagttacaatactgttcagttctctcgggaaaaaccttcagttgtgggactgctttatgagaaatgaaaacagaacacaaacactgactaactgagcacctagacgagtaacagacagtactggcaagtacagatgatgcgactggtgtaactgcaggtcgaggcgcaagtaccatgtgcacgaagagcaaaaacccaacagcgtgtggcagatgcaccgggagaggatagatgggtacgtgagtaaaccatgtaggatggaagttatgagtttctgcaactgtcctcacaatgtttaatgttggcaaaagcgtgggggaaacacggaggcaccgctgggattcgaacccaggatctcctgtttactagacaggcgctttaaccaactaagccacggcgccgccggaaagacgcttaggatcttgtttccttggccaggtcagctgaattgcagagaatgaatacaaagatgtcacaaaaagtcggctgcatacgaaaatgaggaaaggatggatgcagctgggaaagacacgaaaactgaatggagtgactgggggtaacaagagaaatcctagttttgatgctacaaaactgagcacaggacttccttagccgacgaggatgggattcgaacccacgcgtgcagagcacaatggattagcagtccatcgccttaaccactcggccacctcgtctgcagacagccctcgctgttcagactgccctccgcatctcacttctctggaacctgaacttcctgcaggtggggctcgcctacgtcgtgaaggctgcacatttggaaggaatccgctcggcactggaaagagaactcgtagatcagagaccgacttcttccatgcgtgatggcccgaccctcgtccctctgctgagaggtctagaactgctcctgtcttaggacccgcgttatccgcccagaattacggtacccggatccatcgcaaaaatccccgcgcgatggttgggctgtccagacggggcggccttggaacttccagaaacccctctccttcaggccccaaggagatattgcttcttcaatgacctgaacgctgaagctcgaccgtagtttaaaataaagggggttaataaaaaccgaagaaaaatagccgctgaccccgacgtgatttgaacacgcaaccttctgatctggagtcagacgcgctaccgttgcgccacgaggtcggccggccactcggcagctcaggtctccccatgaccactgtgcgccctggaggccagggtcatgaatcgaggcatggatgggcacctagggcatttctgcccctctgaacagctgcggggtcgtatctgcgctcgccgagccagccctgtaggacgagccgggcgagtggcaccccagggcagtgactatgggatccaggcttagcggtctgtccctcccggcccccggcgtcctgccaacgcccagatagagggtcccgagctgatcgccaggggatcccaaagcttacagcccagtggggacggacctgcctagaaacggatggaaggatgggaaccagacggaacgtgacagagcagtgccagagcctagggcacctgaagtggtaagagatttgctcccccagcagcaggtctcctccccggttgcacttttgtaattgcctgcggagacttcgaatgtacccacgcacaacccccgggttcggagattctgatttaaacggcccagggaagagctctgagatcggtatgtaaaacttttgaaaaatatcggtatttcaactgttggagggcagataaattttgtctatattttgatgagttttgacaaatacatacacctgcgcaaatcacaactctttaaaagcatataggacatttccctctctcaaggttcttgcatgtctgtcccttctctacggatccccactcctcccttgccagaggcaatctctgttctaattttaaccaccacaaacatcagtatttcttttttttttttttttttttttttttttttgagacggagtttcgctcttgttgcccaggctggagtgcaatggcgcgatctcggctcaccgcaacctccgcctcccgagttcaagagattctcctgcctcagcctcccgagtagctgggattacaggcatgcgccaccatgcccggctaattttgtatgtttagtagaaacagggtttctacatgttggtcaggctggtctcgaactcccgacgtcaggtgatccgcccgcctcggcctcccaaagtgctgggattacaggcgtgagccaccatgcccggccaacataagttttttgttgttgtttttctgtttttgttttgttttgttttgttttgtttttttgagacggagtctcactctgtcgtccaggctggagtgcggcggcgcgaccttggctcactgcaacctccgcctcccggattcaagcaagtctgcctcagcctcccgagtagctgggattacagcgcccaccaccgcgcccagctataatttttgtatttttggtggtgacagggtttcaccatgttggccaggctggtcttcaactcctgatctcgtgatccgccctcctcggccccgcaaagtgctgggattacaggcgtgaaccac

SEQ ID NO: 1887074 - DNA, 4001 bp, Homo sapiens
gcagttggttaaaagaattaactcagactgatatgaatgttggtacatgagctacaagactgcattaaagtttttcttttgttctactctaaaaattcagcaactaggcccagtgcctgatacagagtgagtcctcaagatatcgttgactgaagctaacaaagtgatttattgatttatttatttattgagacagagtttcactcttgtcacccaggctagagtgcagtggtgcaacctcagctcactgcaacctctgcctcccggtttcaagcaattctcctgccttagcctccagagtagctgggacttcgccactacgcctggctaattttttgtatttttagtagagatgggggtttcaccatgttggccaggctggtctcgaactcctgacacccgcctcagcctcccaaagcgctgagattacaggcgtgagccaccgcccccagcctaacaaagtgatttttttttaaagacgaggggcaggcagggcgcagtagcttaacgcctctaatcctagcactttgagaggccgaggtgggcagatcacaaggtcaggagttcaagaccagcctggccaatatcgtgaaaccccctccctactaaaaggatgaaaaaaattagctgggcgtggtggcagccacctgtagtcccagctactcgggaggctgaggcaggagaatcgcctgaacccgggaggcagaggttgcagtgagccgagttggcgccactgcactctgctctgggagacagagcaagactccgtctcaaaaaaaaaaataaataaataaccaaaaaaaaaaaaaaggaggggcgatgttttattaaacatttcgctatttgaagaattaatacactcatgcaaagaaaagatgaagtaaacatgccctacagtgttatcatttgagatctcttaaaagcggctatgcagccgggcgtggtggctcacgttgtaatcccagcactttgggaggctgaggcgggcggatcactcgaggccaggagttcgagactagcctggccaacagggtgaaacgccctctgtactaaaaatacaaaaattacccgggcttggtgtcacatgcctgtacaaatcccagctactggggaggctgaggcaggagaattgcctgaacccgggaaacggaggttgcagtgagccaagatcacgccattgcaccccagcctgggagaagcgagactccgtctcaaaaaaaaaaaaaaaaaaaaaaaaaaaagcggctatgcaacactctactctgtcccatgaatatctgccacatatttgaattcccagtcttatacgccccaggcctttgcaatgtttagggtccacacgagaagccattaaaatgcaaatacgtcatctgtgaccgggaaccaagctggcatctagcagatactgacacatttatcagtctgatgtgtggacaactaggtgcctcccagaggccttcaggtaaggtggaggaagggccaattctgagctgacacagtgggatccatcttggccaggacagtgggatccatcttggccaggacaaaggcagtccagagaggccccgcggcgcggtgcggcgcgatcacgcccgagtctccttctcgttcccctcggcccttcctaaaacctgctggctcaggtctgaacaatcgcagctggacaggtggtgcacaacgatgttaattttcatcctgtctttttcatcagtgcatccttcagttccctattacttgtgggctggggagttggccaaattgagtgaaaacctgaaatgtctttttgttcttttggttcagccagtttaagttccatgcaatctttaagctaggaggctaataataatacaattctctgcttgcccttttcaaagccacttcagcttataaactccatattagaccatccaggcccagaagacgccaccggcctacaggcagagtcagcggaaccagcctgggctggatctccccctgcgaggcccccaggcaacgcccgcgccgggccggggagatcacgtcccgtgcgtcgggaggcgggggcctcgggctgtgacgtcacgtggccgcgcccctgccgcccagatatctccggcgccgcccgccattttgactccagtgtctcgtttgcagtcggcgctttaggggaactgtcttcctccgcaggcgcgaggctgggtacagggtctattgtctgtggttgactccgtactttggtctgaggccttcgggagctttcccgaggcagttagcagaagccgcagcggccgcccccgcccgtctcctctgtccctgggcccgggagggaccaacttggcgtcacgcccctcagcggtcgccactctcttctctgttgttgggtccgcatcgtattcccggaatcagacggtgccccatagatggccagctttcccccgagggtcaacgagaaagagatcggtgaggattgggaccgtgggtgggcgcatgagggccgaggagaggcagggactccccggaggaggtttgggaggaagcgactccaagtctgagggaagagctccagtgcgccagggccagcccactagcgaggaggaggaagccgcctcggtgggagttggctgaggggtaaacggcaccgacgtggatgcagcacctactgtgctccctcgcggttgctgtgtggctggggcgggcaaggaccccggtttcttcgtcggaggtccgcgcagggctcttgtcctgggagttcttggctcagggcatgactgtcgagtggacagggaagggccactcagggactttaggtttacaatggggaaaagtaaacttgtgggttgtaagcggtaatgaaaggagggggtcctcgtgtgtaccaaccactcttagatagaaatgagatggaagaggtcccaacagcctggcaaaagcaatacagtatttttaaaatggtgtggccttaagaaacgcagcggttcgggggaggagacttttagaattatctttcaaacacttaagggaggagctgggtggttgggtggagtgacagaaggaaagcttttgtgcggaagaggaaactctggaaaaggcttttctggcttagtgtctagccctggtcggcttagtaaagggcaattagtgttgaaggttgtgcgtccacacctacttagtggctcagtggaaagcacgtcgcattatttaaatcctcttttaaagtaaaataactggaacaacgtttgacggtgttggggggtgctgtacattggctgataacacttagcaaacactgatcttactgtgtgaagtaataattagctgcggccgctgagcagagagcatttacattttcctactcttgaagtgaatgtgtgcctttactaagtacaaggaggagttatttctagagaagggaagaggctgaagtagccaaaacgcgcactattttgtatgtgggtgaatttttatatctagaaacagctgttttagaattctggacttttgttgtcttagggatgattgattaggaagggactttaaccctggttttaataaccatttttaaagatacaaacacagaaaaaaaagggaaaaaattgtagcagagttcacacagaaaaaagaaaaaaaaagatgcaaagaacacagaatttgtgtccagttattattttaactgtattttaagactagaaagtatgtcgcgaagtgggacaaagaactcaaaagttcttatcagtccagtgggtttttcttttactttagtacaccataatgttatagacgagtgatctgccttttttttaaatctgtattttacttcatcctgataaaccattttgaaaactttgcggtcctgttttctctctctcttttttttttttgagatggagtttttgctcttgttgcccaggctggagtgcaatggcacgatctcggctcactgcaacctccggctcccggtttcaagcgattctcctccctcagcctcctgagtaggtgggattacaggcatgcacacgcccggc

SEQ ID NO: 1887075 - DNA, 4001 bp, Homo sapiens
ttttgaaatcacatcaccagtatttactaaacacttgaaaaaaatgtatcatcagtacatggagacttgaaaactactctttggtcacaaaaagcacttggcagcacatttccagaatgtttaaatttttatttctactcaactaagaacaaaaccaacaagtactactgtaaaccagataagatgatctgctttcagacaaacatgacaggtagcaaaagaagtgaaaaatgactgactacagaaaatagatcatagaataattaggcagattaataagaacaaagaaacagctgcagaaaggtttgtaaccttaccattttaaaaaaaatccaatttcaatattatacacaacagtatcaaccctaaaaattcacagcttagggagaaatgccctgaatcagacaggctgtctgtatgtaataattgttaataatttttttttttgaaacggagtctcgctctgtcgcccaggttggagtgcagtggcaccatctcgcctcactgcaacctccgcctcccgggttcaagcgattctcctccctcagcctcccgagtagctgggactacaggcgcgtgccaccatgcccagctaattttttgtatttttagcagagacggggtttcaccgtgttagccaggatggtctcgatctcctgacttcgtgatccgcccgccttggcctcccaaagtgctgggattacaggcgtgagccaccgcgccaggccaataattcttcatgaactacaaaagtcatagaaaaagaaaagggaaatgaggatgaggaggtacaaaattattttatttgaattctaactaaaatccaacctgctcacaaaaaatgtcaatccagacatctctcaaaaagagagacatcaaaactgttctaacaggagaggtgtccctctcgagaggccatatcccccaacaataacaccagaacagatacacttcccatggacagatctcaggggaagagtattaaaacgatactgtcgtcgatttaaaaccaaaggaaaaagagtaaccttttcaagggaagcgccattacttccctctcctgctccccctcccttctgtgtatacatgggtctgtgtatgaagaaactgccttggacttctgcagcattgcagtagactagaggatggggaagggggaagggtacggggagagaaacgcttccatcgcccctacagaagaggggtatagatttcctgtgctagggggtggaatccacccagcaagccacccagagcagtctcccttcccaagaatacacagacactacaaaggagaagaggagcaaaggcaccagaggggaaggggacctcgcgcctttaaaccggggtgcacatcaacccagtctccctgtgagggccacaccttcctcgaaacatcccccttccaccaccccttccggtgaccctcaggaaaaaggaatggaattgctctcgccccttaaaaccggagggcgcccagctcaccagcttcttcaccccacccacagaatcacagaccctccttttctccctcccccaccccactcccacatcccttcttccacacacaggcccgagtgggccgaatttccccgcccccctctatatccccctttcccaaagcagaggtgcccttaccctttcgccgacaggtctggggcggagcaggcaggcgcagccccctgcagcgctccggtagccgctaccctggagggtgaggagtgaggaggaggagggggcccggcgacagatcgccgccccccacccccgagccccagcaagccgcccagcccaagctctgcaacaaggggcggcggcggcggggggtgggggggggggcgaggggacgaccggggtcgaggaggcgccctcagcgcttgggctcagttaagatggcgcggggaagtgccgggagccgtctccgtcgccgcctcgggggaaccggcccgggcctcggccgcctctagtcctcacacagccgaggccctctcggtcccccgccgcggcccctcggcgggcgggcccacgcgcagccctccgccaccaacaccacccctggtaaggaggcgctcacaaagggaagagaggccgcgggccggccggcggacggcggggcggggtcccccggggccgggaggcctcagatgttcgcgagtgcctagtgctttcggcccgcgaagggcgcagggcgagcgggacccctcctctctcctcaggcaggcggcggcaccgactcagtctctttgccaccctccctctctctccccgagccctgaagccacagagcccggccgctgcccagcttccccccctttacccgacaccactcccctcctccagaccgtcatcccccgtctccgatctcgcgagattttccgcctgacaggccggaccctgcgcgagacacgactacatgcgcgcgcgcgcgccctcacaggagcgcgcaaggcttgctacgggcagagttgtcccggtggcccggagttccagcctctgtccagcatggcctcactgagttcgcggagcttctaatgccacgcgggcgtcaggtgcattcatttcaccccggagatctgaagaagaagagtttatctgcattccccttccttcctgcttcccacctccaaagcccgccactgatcctgcgaataagtttgccctgaagtgtggaatatcccattcctgcacaactcggttctacaccccctcccccgtgggattcagaggtacactgggcagcgcaatcagtatgcagttgagtttttgagattctaatagttgatactaattcttggaacgacagtaagacttggaaatacagatctaagccaccctatatattggtgatgtagaaaagagataacttcttgaaaagtgtctgtgggtttagtaggttgagtaatgagaagttttggaacaagagcagcaaacaaactaaagactcctatgcaaagaagaagtagagtttttattcttttatctcaaaacttttttttttttttttagggaaaactccctcagtacttattcaagaacctaaaagtgtaaggccgggcgcggtggctcacgcctgtaatcccagcactttgggaggccgaggcgggcggatcacgaggtcaggagatcgagagcatcctggctaacacggtgaaaccccgtctctattaaaagatagaaaaaaattagccgggcgtggtggtgggcgcctgtagtcccagctagctactcgggaggctgaggcaggagaatggcgtgaacccgggaggcggaggttgcagtgagccgagattgcgccactgcactccagcctgggcgacagaatgagactcgtctcaaaaaaaaaaaaaaaaaagagagaacctaaaagtgtacacaaagtgtagtcataaaaaatcttggttctttaaccaacaaaacgactgaaataaataaacctgttatatgagtttcatgaataaaaattaactctgggccgggcccggtggctcacgcctgtaattatagcactttgggaggctgagacgggcggatcacctgaggtcaggagttcgagaccaggctggccatagtagatctgtgctccaaggaaggagcatgttgatcagacctaagcaatccgtgtatacagtgtatgtatgaccttcctctagtctggctcagggatgggcacatgatccaattagagccaatgggtacaataagattttctctggctttttgggaaagaaactttcttattttctcccaaaaatgtaatatatatattgaactcccaaaatggaatccagtggtgtgatcctggctcactgcaacctctgcctcccaggatcaaatgattctgctacctcagtctcccaagtaaccggaactacaggcatatgccaccgtgctggctaagttttgtattttttgtagagatgggtttcgccatgttgcccaggctggtcttgaactcctggcctcaaaggatccacctgcttcggcctcccaaagtactaaga

SEQ ID NO: 1887076 - DNA, 4001 bp, Homo sapiens
gctgggaaataatgtggtcaaaagatttataatatttccctttgaaggtttagactaattggagtctctgaaaaatcactgtacttttcaggtgactttggaataaaaagcattttgagtttttagaagtaaattatctgacttgccaagaataaggtttagctacaatatctaaattaaacatacattcaaatgtttttgtcagaagaaaacattttgaacacatagcattcaaaatacagatattgaaattcctgaaatttcttcttttccctgctttttcttaccttgtaatcactgatgctgcccatggtgatataaggagaaatgctacatagaaccaaaaataagaaaaaggaaccatccggcaacccagtccagagtcctatgtggctctgaaaatataaagggtagcttaaactagtgaatatttgttaaatgaaacaaataattatagccacaaaaatgcactttttgaaatgttgaaaaatcaaagtaaaggtgtagctcattaccatctaggcacgaaggtgggagggaaagtgactctgatcttcaactcaaagaacaaagagaagtcaaaagtcatttaggacctacttctggggatatttccaaaagaattgaaagcaagctctcgaagagataccctcacattcatattcataccaacaatactcacaagtggaagcaacccaaaagtccaaattaatggattaacaaaatgtgtatgtatatacaaacaatggatactattcaaccttaaaaaggatcacttgaggtcaggagtctgaaccagcctgaccaacatggtgaaaccccatctctactaaaaatacaaaatcagccaggtgtggtggtaaatgtctgtaatcccagcaacttgggaggctgaggcaggagaatcgcttgaatctgggaggcagaggttgcagtgagcagagatcgccccattgcactgcagcctgagcaacaagaacaaaactcggtctcaaaaaaaaaaaaaaaaaaaaaagaaggaaatcctgtcacatgctacaacatagacgaacctggaaaatatgctaagtgaaataaaccagttacaaaaagacaaatattccacttatataaggtttctaaactagtaatattcatagaaacataataggatggttatttccaggggatgggggagggggaaagctaattggcatcgagtttcaattccgcaagacggcaaagttctggagatgcatttcacaacaatgtgaatatacttaatactactcaactgtacacttgcaaacagctaaaatggtcaattttatatcatgtattattaccacaacaaaaaaacaataattcagaagttaggacctctgatgaacatataattcaggcctgagtagcacgtctttctgagcaaacccagagatggaaacctcagtagctgggtggatgtgttctgaagcacagaaccaagaagaaaacttgttgctgcttgtcttaacttcagggaaaggaactttaaatcactacccccaaatcagcatccacttgaggctaggccaagtggacactctagcagcatctaggaccacctcatggatataattacaggataacagcatgagcctgtctcaaaataattccacaattatttaactttatttaagactttgagggctatgtctataaattctgtttttcatcataggaatgagggaggaaaggtgtgtgccatggggaagtgggagtggggaacaggtttctaatagagtagctatgggcttcagtccattttgatcctgagcaaacacaatggcattaggaagctaataattcagaagttaggacctttgatgaacacataattcaggcctgagcagcatgtctttctgagcaaacccagagatggaaacctcagtagctgggtggatgtgttcttttgaaggatagcagcataagcctgtctcaaaataattctgcagtgagacaggttcatgctgctatcgttccaaagaggaagggtaatcactgtctctttctgctactcctctggttccactttctggagaattcccttcagacaccccttccctcgagtcatcctgtgcagcagacctgtttacgtgatcagtcggtcatactcaactcacggaggtatgtgtctgtcacgaacatctcaagtactgtatatttcatccccattgttcccatggcttacagaaaacctgtgcttgcatatactcccagcaccactgattcagtgaagccaaaactgagcttcacacttttgtcacaaaatggacttccctttggatggcttcatttctaatcctgcttcttgatgtttcagacttctggtgtgaaacagttggagtcagctttgagacacccctgttggtatcaggcagggtctaaccagaaaaccatgactacgttaagttcttagagtgcaattccttatgacatggttaggtgggtgatgagcatcccacaaagatggtgaagtgagaagcaagctattgttgcttctgggcttcaggaacagcagaaggaggtgatgtgactggagcccaatgtagggggtcctctgctcttctgtctcccaccactgctttctagtgtccaaactgtctgaagccagactatagccaactgacacagaatccaatgcagcctgtgtgtattaggctccctcacaacatagagcaactatgagtaggtgaataaataaatcaacagatagccccagaactggcagattctccttcatattagtctgtctactacacatttagtcaatggagggtccactaactaattataatagatttatatgtaaccagggttacaagttctcctgatttccaagtcagtgttttcttttttctgtttctctttctcatacacttccacaatcaagtatgtacaacttttcaaaacattgcctagaagactgacaaaatattgaaaagtattccctcacgataattatctgataacttggcaggaaaaaaaaatcctgttttgtttgctataacccattgaaaatattaggataaaataataattttcaggcttaacaatcacttatggatatttaaaagctaaagagagaaaacataggctatttgtccaattcttaattgtttagactcagtaaatccaatacttacaagaggaaatgggcttgactcaattcgaatatgttgtgtgtgattaaacatttgaagtagcccattgctgataatattcataagaattggaaaacagtgcaatctcttggtattacacacaactgaaaatctataatccttaaaacagaaacaaataaataatgttaatgctaaattcttaaagaacaaaggcaaggtttatgtataaaagatcctaacagtgccacatgcttgttgtgtgtccatcttcaagtgaactaaactttctgagctttaccttcctcatctatgaaaaggaaatactaaatgggttgttatagggcttaaatgacactctattcatgtacattaagctctagcacagagtcagcatacaatcaatatgaatttttatttgtattactaattttagataattttgtctccattttgctgatggggaaatttcatttagtagagtttaaaagtctccctgacaaggagatgctgtcagtttatgatgaagaagcaaaggaagattgggcatggtggctcacacctgtaattctagcactttgggaggccaaggcgggcagatcacttgaggttaggagtttgagactagcctggccaacatagcaaaaccctatgtttactaaaaaatacaaaaattagccaggtgtggtggcacacatctgtaatcccagctacttggaaggctgaggcagaagaatcacttaaactcagaaggcagaggttgtagtgagctgcgatcacaccactgcactccagcctgggtgacagagcgagactctgtctcaaaaaaaaaaaaaaaagcagcagcagcagcaaaggaat

SEQ ID NO: 1887077 - DNA, 4001 bp, Homo sapiens
ctcactacaacctctgccttctgagtttaagtgattcttctgcctcagccttccaagtagctgggattacagatgtgtgccaccacacctggctaatttttgtattttttagtaaacatagggttttgctatgttggccaggctagtctcaaactcctaacctcaagtgatctgcccgccttggcctcccaaagtgctagaattacaggtgtgagccaccatgcccaatcttcctttgcttcttcatcataaactgacagcatctccttgtcagggagacttttaaactctactaaatgaaatttccccatcagcaaaatggagacaaaattatctaaaattagtaatacaaataaaaattcatattgattgtatgctgactctgtgctagagcttaatgtacatgaatagagtgtcatttaagccctataacaacccatttagtatttccttttcatagatgaggaaggtaaagctcagaaagtttagttcacttgaagatggacacacaacaagcatgtggcactgttaggatcttttatacataaaccttgcctttgttctttaagaatttagcattaacattatttatttgtttctgttttaaggattatagattttcagttgtgtgtaataccaagagattgcactgttttccaattcttatgaatattatcagcaatgggctacttcaaatgtttaatcacacacaacatattcgaattgagtcaagcccatttcctcttgtaagtattggatttactgagtctaaacaattaagaattggacaaatagcctatgttttctctctttagcttttaaatatccataagtgattgttaagcctgaaaattattattttatcctaatattttcaatgggttatagcaaacaaaacaggatttttttttcctgccaagttatcagataattatcgtgagggaatacttttcaatattttgtcagtcttctaggcaatgttttgaaaagttgtacatacttgattgtggaagtgtatgagaaagagaaacagaaaaaagaaaacactgacttggaaatcaggagaacttgtaaccctggttacatataaatctattataattagttagtggaccctccattgactaaatgtgtagtagacagactaatatgaaggagaatctgccagttctggggctatctgttgatttatttattcacctactcatagttgctctatgttgtgagggagcctaatacacacaggctgcattggattctgtgtcagttggctatagtctggcttcagacagtttggacactagaaagcagtggtgggagacagaagagcagaggaccccctacattgggctccagtcacatcacctccttctgctgttcctgaagcccagaagcaacaatagcttgcttctcacttcaccatctttgtgggatgctcatcacccacctaaccatgtcataaggaattgcactctaagaacttaacgtagtcatggttttctggttagaccctgcctgataccaacaggggtgtctcaaagctgactccaactgtttcacaccagaagtctgaaacatcaagaagcaggattagaaatgaagccatccaaagggaagtccattttgtgacaaaagtgtgaagctcagttttggcttcactgaatcagtggtgctgggagtatatgcaagcacaggttttctgtaagccatgggaacaatggggatgaaatatacagtacttgagatgttcgtgacagacacatacctccgtgagttgagtatgaccgactgatcacgtaaacaggtctgctgcacaggatgactcgagggaaggggtgtctgaagggaattctccagaaagtggaaccagaggagtagcagaaagagacagtgattacccttcctctttggaacgatagcagcatgaacctgtctcactgcagaattattttgagacaggcttatgctgctatccttcaaaagaacacatccacccagctactgaggtttccatctctgggtttgctcagaaagacatgctgctcaggcctgaattatgtgttcatcaaaggtcctaacttctgaattattagcttcctaatgccattgtgtttgctcaggatcaaaatggactgaagcccatagctactctattagaaacctgttccccactcccacttccccatggcacacacctttcctccctcattcctatgatgaaaaacagaatttatagacatagccctcaaagtcttaaataaagttaaataattgtggaattattttgagacaggctcatgctgttatcctgtaattatatccatgaggtggtcctagatgctgctagagtgtccacttggcctagcctcaagtggatgctgatttgggggtagtgatttaaagttcctttccctgaagttaagacaagcagcaacaagttttcttcttggttctgtgcttcagaacacatccacccagctactgaggtttccatctctgggtttgctcagaaagacgtgctactcaggcctgaattatatgttcatcagaggtcctaacttctgaattattgtttttttgttgtggtaataatacatgatataaaattgaccattttagctgtttgcaagtgtacagttgagtagtattaagtatattcacattgttgtgaaatgcatctccagaactttgccgtcttgcggaattgaaactcgatgccaattagctttccccctcccccatcccctggaaataaccatcctattatgtttctatgaatattactagtttagaaaccttatataagtggaatatttgtctttttgtaactggtttatttcacttagcatattttccaggttcgtctatgttgtagcatgtgacaggatttccttcttttttttttttttttttttttgagaccgagttttgttcttgttgctcaggctgcagtgcaatggggcgatctctgctcactgcaacctctgcctcccagattcaagcgattctcctgcctcagcctcccaagttgctgggattacagacatttaccaccacacctggctgattttgtatttttagtagagatggggtttcaccatgttggtcaggctggttcagactcctgacctcaagtgatcctttttaaggttgaatagtatccattgtttgtatatacatacacattttgttaatccattaatttggacttttgggttgcttccacttgtgagtattgttggtatgaatatgaatgtgagggtatctcttcgagagcttgctttcaattcttttggaaatatccccagaagtaggtcctaaatgacttttgacttctctttgttctttgagttgaagatcagagtcactttccctcccaccttcgtgcctagatggtaatgagctacacctttactttgatttttcaacatttcaaaaagtgcatttttgtggctataattatttgtttcatttaacaaatattcactagtttaagctaccctttatattttcagagccacataggactctggactgggttgccggatggttcctttttcttatttttggttctatgtagcatttctccttatatcaccatgggcagcatcagtgattacaaggtaagaaaaagcagggaaaagaagaaatttcaggaatttcaatatctgtattttgaatgctatgtgttcaaaatgttttcttctgacaaaaacatttgaatgtatgtttaatttagatattgtagctaaaccttattcttggcaagtcagataatttacttctaaaaactcaaaatgctttttattccaaagtcacctgaaaagtacagtgatttttcagagactccaattagtctaaaccttcaaagggaaatattataaatcttttgaccacattatttcccagccacaagaaggaaatcattgatgttgaaatcaaaggccaaatttaagacttgaattccttttccactctggaaattgcaattttatgttata

SEQ ID NO: 1887078 - DNA, 4001 bp, Homo sapiens
aatcttggctcactgcaacctcggcctcctgagttcaagtgattctcctgcctcagcctcctgagtagctggaattacaggcatacaccgccacgtccagctaatttttgtatttttagtagagatggggtttcatcatatcagtcaggctggtcttgaactcctgacttcaggtgatccacttgtctcggcctcccaaagtgctgggattacaggcatgagctgctgctcccggccaataaatatttttaaagggaaaaatatgtttccccgcccccatcaccccccagacaccagtgttctgcttctttaggaaacatctcctgtgttcacttctagcgcttccggatgagcaccaggtctgtcattgagaacatggaaagagagggtttgagttaaggggctggagaatgccgggtaggagcactgccttcctaaaaccaggtacaatgacacgtacaatcacaggaacccaaactgcttagtaacaagacatgaccagcctttgtgggatttgcttgatttatttcatgtataggatttacttgacagtatctctcaaagcactaaacctacaagagacaagccctggcctcactctcggctgtgatcggatgttgagtgctttgacaagtatggctgaatagggaatcagaattctaaagggaagcgcgccgctgagaggccgaggggagaagcagcgccgaggctcgcaccagacctcaccctggagaccgtcgtggagcacacggcctctgcagctctccttccagagaagcccacgatgtagccagtgagtgcccagaaacaggctcctctaaaaatgcgaggctgcggaggccacggttctcaagcagcttctgccccctcgaagggtctagaacccttggacttggccacaagcccccctgcatcccaggaggcagtgtgccgagttcctggtctcctgtcgggcagagcgaggtgtgcagtggcggtgccaccggtggcctcccacttggcttggacagctggtcgcccacatcttcaggcaggcctgggcgttgcagcagctctgggcctctgtcctccactttccactgatgcagccatgagcacgtgcatggcacacctgcctgatctgagcacacctgtgcagcgccttccatgagatcccgagcacccctccctcccacagctgctgtgtccagcctgtcccctgccctctgcttcctcctccgggccctgcccccttcctggactccagaggctctttctgtggtgccaccagagccccagagacatggagtccaggcttcccgcatcctcctctgtctcctgctaaactccacactctgtccacagagactgcccatcacgccaccaggtagattagaccaagcaacaccagagcaaactccccccgtcagaggagagtgattcagaggacaaaagatacagcagcactgagaacgcccgaagcacccgctttgcagacgccacctgccccgtgatgaggctcagacagagcggccaagcagtcccctgacccacccagtacgaggctttcctgagctggccaaacgtttgccaccgagcccagcaggcacgctgagtgcaccgtctgtctctctcttcttggcatgggcgctgacggggcactgatggggcctttgggatgttgctcttccggctggaaacctctgtggctgctgaattattgtcctgcatccaggaagaatgaggtacccagacaagtggagggtgagcgagacgaggaggagctttactgagtgttagaacagctcaggggagacccacagtgggtggcttctctctgcaggcaggtcgtcctgacaagtgttcagctctcagcagacagggtagctctccgcagctggtcatcccgacgtccgcgttgctctgagtctggggtttttgtggtcttcagggtggggaagtgcacgctgattggtccacaggcagcccaccccaaccagcatgcacatcccccctctgacaaaagcaccgagtcctccttccagtctgcaggactggcagcccgggccccaggcccccttgaagcttcaaggtgtggcttcaccagggacctgcccccttccacccagaagtctgtctgcctcccactgctgttcatggcacccagcttgttcatgccaaggggcgcctgcaggccagcactgagccaccctcagccctccctcagcttccctcccatgttcaacagcgcccagtcccgagggggctgaggtggcaagggctggtgtgtccgtgctgccccaagtgtggacccacccggatggtctgcagcagcacctgggctcagccccaactgtgctccacgactggagcgggcgtggggagtgaggagaggccaggcatttggagcaggcacttctaagcctgcagggggcaggggtggccttcccaggcctccaagagcacagagacgcccgcgtctagagctgccccagggcagcgggccgcggcacgcagggaaggcggagctgctgcctgatccgtggatcgagaggcccagccatgcctccgctgcagccggcatcttggcagcagccactctagatgggccactgctaccatcagcatcttagcaccaggagcttgacctcaccacagtggggcacgcggcgtagcctccattgctgtcagaccaaaaccacactgctgtggttttcccaggtgaccaagtgagtatcaaggaaacagtccttttacagaaaggaaaatagccaggcacggtggctcacgcctgtaatcccagttctttgggaggttaaggtgagaggatcgcttgagcccaggaattcgaaaccagcctgggcaacatggtgagacctcatctctacaaaaaatttaaaaattagggcctgggcgcggtggctcacgcctgtaatcccagcactttgggaggccgagcggggtggatcacctgaggtcaggagttcgagagcagcctgaccaacatggagaaaccttgtctctgctaaaaatacgaaattagccgggcgtggtggcgggtgcctgtaatcccagctactcaggaggctgaggcaggagaattgcttgaacctgggaggtggaggttgtggtgagccgagatcacaccatttcactccagcctgggcaacaagagcgaaactctgtctcaaaaaaataaaaataaaaaataaaaaaattggccaatcatggtggtgcacacctgtcgtcccagcttctcaggaggctgaggtggaaggatctcttgaacccgggagttggagactgcagtcaactatgatcgtgccactgcactccagcctgggtgacagagtgagactctgtctctaaaaaaaaatgtaaaaggagacaaaaacacttttctggagccttccaactagatagttctactagccccagcgcgggagcttcaggccctgtgaaattacgctttgagcgacgaccaaaaatctcttcacagtcctttaaaaccctactaagctctcgggaaggcaccatcatgtgccaagtcctgcagccgtcagcaatgaacacactgagcgtgaaacacaaacaataaattaaaaaagaacatacatatttgctccataatagcaatcctcaaagagaattttggaaatatttattttcccttggcaggcacgaggcaatgaacgaatacacttgggaatctattttcgaatgcggagataactccagctttgatatgtctgtctccagacgaagggacactcacccccacgggctgagaggctcatatttgtctttccggagattaatccactgcctgagcttggctgggtcctctgacttagaaagtatcctcttgacctgtccttgagggccaacaatctttttttttttttttttttttttttgagacagagtctcgctctctcacccagcctggagtgcagtgacgtgatctcgctcactgcaacctccgcccaccgggttcaagcaattctcgtgcctcagcgtcc

SEQ ID NO: 1887079 - DNA, 4001 bp, Homo sapiens
ttttttaaaaagacaagaaaaacagcttctgctagatttgatgtgtacttgtagtcccagttacttaaagagctgaggcaggaggattgcttgagcccaggagttcaaggctgcagtgtattataatctctcctgtgactagtcactgcactccagcctgggcaatatagtgagaccccatctccaaaaggaagggaggaaggaagaaaaaaaaaacagcttgtgggtagaatgttatcctctgtggaaaattgtatagaacgtctaataacacacaggggcagtactgacttattattattatttagaccgagtttcgctcttgtcacccaggctggagtgcagtggcgcgatctcggggctcactgcaacctctacctcccaggttcaagagattctcctgcctcagcctcccaagtagctgggattacaggcgcctgccaccatgcctggctcattttttgtatttttagtagagacggggtatcaccatgttgggcaggctggtctcgaactcctgacctcaggtgatccacccacctcggcctcccaaagtactaggattacaggtgtgaaccactgtgcctggccagtactggcttattagtgaagtcagtgggctagggaataagcagggggcaaaaaggatgccaaaatgttgaaagatagaaaaataagcttttttttttttgtttgagacggagtctcactctgttgccaggctggagtgcagtggcacaatcttggctgactgcaacctccacttcccgggttcaagcgattctcctgcctcatcctcccgagcggatgggactataggcgtgcaccaccatacccagctaagttttgtatttttagtacagacagggtttcaccatgttggccaggctcgtcttgatctcctgaccttgtgatccgccctcctcggcctccaaaaatgctgggattacaggtgtgagctaccacgcccagccgaaaaatcatcttaaatgtctgctctgaacccttcattttataaatgagaaaatagcaaagtaacttgcctctagttctatttccattactgttttcttatgtagttagacaaagttatagatgatatttaagccattaagagtcacacatgtggaaaaaatgtaaattcttttttttctttttgagacagggtcttgctttgttgcccaggcgagtgcagtggcacaaatcacagctcactgcagcctcaacctcctggactcaagagatttgattctcctgcctaagcctcctgagtagctgggactacagacgtgcactaccaaacccagctaatttttgtatttttttgtagagacaaggtctcgctatgttacccaggctggacttgaactcctgagctcaaacaatcttcccgccttagcctctcaaagtgctggaactacaggtgtcagccaccacacccatccaaaaatgtacattcttcacctaaaattaaagtttttttatgttttaaattaatatcactaaagttacaaagctagtcaactaaaaattccctctgaacacaacatggtagtatggtacagaaaaataaaagaattcggatacatggtagaaattctagtcctagtatcactaaccagctatgtgtccctaggttaagtccctcatttctttgggtctctcctatcaaatgagttggaatctaagatccttttcaatactaaaattccattatttctttatactacaaataaacccatttgtcaaaaagaaaagttaccttcttctaataaattaaaaatttacatttaagcctcagattttaatgtttatagtgaaatctagttccttgttttcttcctaaagatgacttttgcttgtttctgctacatactttctgcagcctgcccattgttctttccaaacaccaaaaccctataagcaatattgcactactcagaactatttacacagcagagacaatattgatagggttctaggatctggtgataaacagaattttttttagttagatggcagaaattcactaagcaattatgataatctaaaactcattagtgtctgataaatcgcgcaaatttgattctgataaacatcattcacagccctttcagttacaaatcagcctcctggaagccttggaaatcagtgaggttattgtttaactttttaggggcaatggaatatttaaaataaaactagtgatttttgtaaagcccaagatattcgtatttcagaaaccagttttctctaaaatcagtaataaaaataaaggggaaaagttttatactgatctgaaaagtggtatataaaatacaaaattaggtgaaaaaagtctatggaaatcatcatgaaagcaccccaagggaaaccaggttacattctgccagttagatttctgattttttcctcctattttggaatatttgcataataattactggttgagcatccctaatctgaaaattcaaaatctgaaatggtccaatgaattttggattttggagcatttcagattttggaattttggattagggatgctcaaccagttgttttgtttgtttgttattttttgagacagcgtctcactctgttgcctaggctggagggcagtggcgcaatctcagctcactgcaacctctgcctccaggctcaagcaattctcatgcctcagcctcccgactagctgggactacaggcacacgccacaacgcctagtaaattttttgtatttttggtagagatggggtttcaccattttgcccagactagtcttgacctcccgagctcaagtgatctgcccgcctcggcctcctgaagtgctgggattacaggcatgagccaccgcgcccagcctgttctagtctagttttcaatatgaccagtttaaggctttaagtaagtggcacaaggtattccatactactcaactattaggcagcaaggagaaaagaatatattgcggttgtcacaatatactgtgtggtcctcagttttaaaacacttgctttttacaaacaacccctagattctcattgccaccgtatgctctcctacaaaggaccagtgcccttaaagctctaaacacatcctcttatgagagaccttatctcaacagcattaaattacataaagtgaaaaaaagtatttcagtctcacctatggtgggctaggcatagagaagagttggtagacaggtgtgttctggacttactaaacaggcttagaaatgcattttccggctgggcgcagtggctcacgcctgtaatcccagcactttgggaggctgaggcgggcggagcacgaggtcaggagattgagaccatcctggctaacacggtgaaaccccgtctctactaaaaattcaaaaaattagctgggcatggtggtggatgcctatagttccagatactcgggaggctggagcaggagaatggcataaacctgggaggcagaggttgcagagagccgagatggcgccactgcactccagcctgggcaacagagcaagactccgtctcaaaaaaaaaaaaaaaaaaaaaagaaatgcattttccatagaaacattttaagggagaattaagtatcttaatggaactagtttggctataatcaaaaaacctacttttatttttatttttaaattttttttgtttttgagatgagtgctcactatgttgcccaggctagtctcgaaatcctgagctcacgtaatctgcccgccttggcctcccaaagtgctaggattacaggtgtcagccactgcacccggccagaatctactttttgtacattttcttctcttcaatgtacatttagaaacacctttatctactctccttttactttgttcatggctttggtttaccatctactgtattatattttaatctatgtttacatggtaatgtcgccacatggtttcaaacatcttcctggcaagagatcgcttttttgtatccttagtttttaatatacagcctaatgtgcagtgacaa

SEQ ID NO: 1887080 - DNA, 4001 bp, Homo sapiens
gctaatttctgcgtttttttgtagagatgggcttttgccatgttgcccaggctggtctcaaactcctgaactcaagcatcctcccaccttggtctcccaaagtgctgggattacaggcatgtaccaccacgcctggctaatttttttgtatttttagtaaagatggggtttcgctatattggccatgctggtcttaaactcccaacctcaagtgatccgcctgcctcagcctcccaaaatgctacgattacaggtgtgagccacctcacctggcccagtgtagctttttaacacaaattttatatagctcaggttactggaaacactgtaaaatgccacctactttttcttttcacagctgacacttctcccaactaacagaaactggcaaacattgtagaggaagtgtccactgagtgaatgagtatataatttatgaaaacagaaaagtgctttggaaaaaaaaaaaaagacaacaggagtacatacagtgaaccaaaaagagtgtaccaggaggagcagaccctgaacagttagaactatggaaatcgctatgctttgtgttgtcacaggagttaaaataggaataccctgcatacaataaatatttattggataaataactaagcctgatacccttttcaatgcgttatacagactctatcatcacaccactaatctaagttctcagaagttaaacattacaagacttcagaacaacataggcgtctttggctccatttaacagaagaaggaccatagtgatcatttaatctctatgagtctgtcttatcttctggaaaaggggcctaacaccatttccttttgcaaaaaggtagctgccttgcttccagttctaccatcctctagcaacccatctttctcttatttgatgtctctgatcagctcctcttccagcacaaactggagaaaggggatcctttctgttttcttggaggcttctgaactcaattacaggtctgcattaaaaatgtatggagaaagctggtgatcagtttgtacatatggacaagttcaaggcagtatggtctacttctgggaaggcctggattccatttgctcctgatggaaaaaccctagtcccagcagtgtttagaatgaactggagaaggcagatgggtaccagattcaggaagaggtactgatagaccaagaccagttctttctgttttaaagatgtgttatctcaatctcctccaatgctccctttggaaattcacagaagattagggctccccacagaaacagcagctggcctgggctggtcttctgactaactggagctgaatacaaaaagtctgatgggttgactgagtcggtgactgccaattggagcctgaagcccccaaagtcttctctagacttgatgatgaagcaccagttacagttctcccagctcgccttccattgcccgcaccatgacatacagctcggccagacccaccacagaggcgacgatcaatgcagctagcacccgctggagatggggagaaccaggcttaagggatgcaggccaacaaccagctctgtaccccagcaactttaatgaggatggagagccccccaaccaccctctaagttgggggaggggaagaaaagagaatgtggcttctcctggggttattacctaacctcccgtgactgctggaaagctctaatgctccccttattaatggcataaatatctgttcaatacctaacctgtgcaaggcactttcacatacgtcctcccttacccactaacacccccaccaggggcaccctgccctgcccagtgcctactcaccgaggccatttctgtgaagatatattggcttccaaggtaagtgcagacgaaggcagcaaccaccgtgacaatgaaattgaagatggtgatgaccagagccttcaatgatctcactttggggaggagccagagagggcacctttagttcaacattctctaggaggtgctcttatctcatggctcccccaccaactgggtttcagtcaaacaacaagcctgagtgtcatgacccatctcaggaaaaggttttagaagcctgatctcctagtacctcaccttgctttcccaggtcgctgagagtcccaccatgtcttgtatcctgggaaaaagaaaaagaagatgattcagaatagaagcagctcagagagcatccattgacagtctggctcagccctctctattccccaacatattaactctgccctccccatggattcttttgtctggaaccattttgactcttttctggactacagagcaggcatttcggagagaggacataggctgccagtacccatctactctcctgttccagggtaggagcatgccatagagtagtagggagccctgtcagaagaaatgctcgaatggctgggcacagtggctcaccttgtaatcccagcactttgggaggccgaggcaggaggatcaccttgaggctgggagttcaagaccagcctggccaacgtggtctctactaaaaatacaaaaaattagcctggcgtggtggtgcatgcctgtaatcccagctacttgggaggctgaggcataagaatcacttaaacctggaaggcggaggccgcagtgagcagagatcctgccactgccctccagcctgggtgacagagtgagactccatctcaaaaaaaaaaaagaagaagaaaaaaagcctccaagattcattcccacttatttatttatttatttatttattttgagatggagtcttgctcttgttgctcaggctggagtgcaatggtgcagtgttggctcacagcagcctctgcctccgcctcctgggttcaagtgattctcctgcctcagcctctcgagtagctgggattacaggtgcccgccaccacgccaggctaagttttgtattttttgtaaagacggggtttcaccatgttggccaggctggtcacgaactcccgacctcaagtgatccacctacctcagcctcccaaagtgctaggattacaggcatgagcgccgtgcccggctaactcccacttctatgacgtttaaaacttggtcaccatctcagcccagagtctcagtgaatgagatgggaactgtgttgtttgtatgcagacttcctatggtccctgaacagtatagaaaccaagtttccatgttttttctaaactctgtatcttcttccactgcagggccctactctgaggggctacctagaccacgtactgaagagcatgtccttacctgacaagtgacgttgcgggtgatccgtttatattcctcattggccagctgtatcttaatcttctccagccgggcaactagttctgggttctgaagcagaaaaatcaaatgagaagaatgatattcccagcttgttagaaagcacatcacaatcattggttccaggggtaaagcactgctaaaggtatcaggagacccacatactagtcgtaactccagtgctttgaaactgttttttttttttttgatctcaattttccaaacagctgatggggaggacaatatctggctcccccagatcccaaagatttcaaaaacaatttttcaagcctaaaagttgatttataagttcagtgtatcatggataagcccaactcagtcaataaccactctcacaaacatatcccttacatacccgtggaggcttcacaacctctgggagatagatttcactgccttctaggagctcatggaggtatagtttggaatctgagaagaaaaggtttcacaaacacaatgatccacgagctgaggttgaagggttaagatcaagaggggtgtagcccttctttctaccaaaataaaacagggccatctctacattaatccatttccaggatcattttcaattgaaaagaattttggataattccatgtaggtatctcccagtgctgcgcaggtgactttagctgtcagctctcaattatcctgccagtgttataactaacaagtaagccatttacttgtgcc

SEQ ID NO: 1887081 - DNA, 4001 bp, Homo sapiens
cattatacttccccagggtctacgcttttagaaacaaatctttctagaaggcagcctattttctctggtgggtagcagagaatatggcagaagggcctcagagttgtcctgccatgcaggtagggcaggctcctggttccagcctctcccgcttcctgctggctgccccattcatgtgtgcacccagggcaggaagtgaggacctggcaggtccctaggatcagcgctcaaagtcatccactgacggcatggcccttctaacttgaggccccttggcgcagcagacctcagtcttcctagccagcagcgtcaccctagaggggatttcctgggtcccaaagggagggccagagtctgggagaaaggactgtggaggataccagcactgagtcctaagtggcccctttcctcaatctagaatccacagtagcccttgagaaagagtcgctgtggatctgctgggcaaccaaagtcattttcttggcatggtgaccacgcaaaactttcctggtatgatcacatcgaaagttactttttgtttttttaaaaaaataaagacaagagtttcaccatgttgtccaggctggtctcgaactcctgagctcaggcaatccacctgccttggcctcccaaagtgctgggattacaggtgtgagccaccgtgcccggcctagagttagtttttaagtttaaatttgctaatgcattaaaccccaccacacacacaggacacagagggcttcatttctcccagtttcacctggccctgctggcccctggaggcttctgctaagtccctcattggaaccaagaacccgcgcttctgtccccgcgccccccccccccaactcccctgaacaccagcaccagtggactagcacctggagtgtccggtgtgtgagtaggatgctggtttggctaacagggaacgagctgggactccctttatcaacccagtcaggaaacagaccagaagcaaaacccacaaagacagtatgtcctcctgctcagctatgcaaataggtggcagctgtttctgcggctgctttcagggggacagccccacctgtcagttccctgctgactctgttctacctgctctttgagatgagcctgtagccagtatatcccaacacatgccacccactgattccaggggcaccaggccaaggtcctgcccacccactctggtctgctaacctccaggctggtgagaacagctggatccaccagctcctgaaggcatctggcctcccatcctgcaggccaggaccattcaacaacaggaaaaggaaccctcccagcaagagagctcactgtcattcagccacgggcttgacaagcccaacagccactttgaccagtttcctctacctctggccaacgaccttgcaggacagggcagtctcaacctcggactgcatatcatcacctggggaggtctttacacatctcgatgcctggaccacaccccacaccaattcaatccgaacctctgggggttcagcccagacagcagaagcttacaaatctccccaggtgattccaatgcacagccaaagctgagcccactgttttaggccctcgtgcaggttcttgagcttttttttttttttttttaacttttggtagagacaaggtatcactatgttgcccaggctggtttaggactcctgagctcaagtgatccgcctgccactgcctcccaagtgctaggattacaggcgtgagccaccatgcctggcctgttcatgttttaataggtcagaaataaagtcatgaaaaggaatttctctgtgacagttcgcaaagaattctaccaatttaaaataaaataatctaggataaactctggccaattcaaagctaaaagaaaaaaacatttttactagaagtttcttaaagcctctcaacgcacagggactagctgaaccagaaggtacttcattttctaatagataatgtacacgaagctcactcctggttcagttcattttgcgtggcttccaactgaacgcaagggcagctcagggccatgtaaaatctgagtctactacagaaaccctcgccccacccccaaaacacctctaaatttcagataagttactgctaatccctactcggtagggttgccaggtttagcaaaaacaataaaaacaaacaaaaaacccaagtaggacacgcaattaaattggaattacctgagcagctctttaaaaaatcccatgcctgggctacacccacaacaatcaaaccagaacgtctgaggattcagtctaatcatcagaatttttaaaatctccccatttcaaatatgtcctggccaggcatggtggctcatgcctgtaatcccagtgctttggcaggctgaggtgggaggatcacttgaggtcagcagctcgagtgaggcaacacagtgagaccctgtctctacaaaaaataagaaaaattagctgggcgtggtggtgcatgcctgtagtcccagctactcaggcagttaaggcgggaggatcgcttgagcctgggagttcaaggttgtggtgagctatgatcataccactacactccagcctgggcaacagagcaagatcctatctctaaaaataacatctgtcccatgtattagatagaacatatttattctaaaattattttctatctgaaattcaaacttaactgggcatcctgtctactacctcgcagccccactactgaggggtaagggcagaaacaaagatcaagctcctaccacctaggctctgggacctgccaccaaggggtctgggatctgccaggggctgtggagctgggacacctggggcatctgccccctcaagctagcttttgagcccagaagaatatttttacaaacatacaccatctttaaaagccaagcaacaagccaggttttacaagaaatgtattctggctgaagaaagtaaggttggacttgaggtgtgtgtgagctggaattcagccccccatttaaaagccaggcctgctccagaggcccctctggcactgcagcaggtcccgggggcctttcagacgccggctccctccggagcctgttcccatggcgccccttagagggaggagcctgaagcacgccccaggctgccagctgcttccgcccacctttcccgtggcagagattccttcccacgttgtgactcaggctgtgtaacccaggcctctgcagccttctctgaaattccaatgcagccaaagggcagataacattttacagataaaatactcaaccctggggtaaggcccccacgcaccagtactccttctgacctaacacccaggccaaagctatgtcaggatctgtcttgttcctttcagccgtggccactccttcctattggcaaattctcaagagaccctctcctcatgccttcttccactgcctcttcgcagaacccttgggggagcccaaggagacccgcgtcctaaggggctgagaaactcctagaagaccgactgcctagcctagtcttcccagtgtgggtggctccaaagtcctgggtcagaccagtgcaaccccattatgtgcagcatgaaactaatccccaacaaaagattaaaaagaagccacgagatccaacaaatgcaaaggctgattggaatggaattgaaggttggtcctggccacagccctgcctctgtcaagcaggtgtcacacccaagtccccagatcccctctcctcaccctcactgccctctctttctgcaactccccctccaccgcccttcccaacatgcccaaaccttccttctcatactataagatgtgctgaagaaagcaagaaactgcagggggaagaataagaccacacacgtttatatatatttggattaagaaaatgaatcacaagccatataaaattgagataaattggaaaactctaaggtaagtaccatgtctattcccagctgcctagaacaaagatccattaaaaatccatggtgtgaatttccaccatgggtcagaa

SEQ ID NO: 1887082 - DNA, 4001 bp, Homo sapiens
acttgggaggctgaggtgggaggatcccttgagtcctggaggtcaaggctatagtgagctgtgatgaagctactgcactccaggctgggtaacagagtgagactgtgtctcaaaaaaataaaaaataaaaaaataggtctcagaaaaatcggattcagccgagcgcagtggctcatgcctgtaatcccagcactttgggaggccgaggcaggtggatcatgaggtcaggtgttcgagaccagcctggccaacacagtgaaaccccgtctctactaaaaatacaaaaaattagctgggcatagtggcagacgcctgtaatcccagctacttgggaggttgaggcaggagaatcgtttgacctgggatgtggaggttgcagtgagctgagatcgcgccactgcactccagcccagacgacagtgcaagactccatctcaaaacaaataaaaataataataataatttaaaaaaaggtatttctgcttctcgacaatcccccaggacctccaaaagccttggctggtcaaaatagagtcatgtgtcacttaacaacggggatccatcctgagaaaggcattgttaggtgattttgttattgtgccaacctcacagagtgtgcttacataaacctagatggtgaatagcctgctgcacacctaggctaggtgggggagcccattgctcctaggctacacatctgtacagcacgttcctatcctgaatgctgtagacaattagaacacaatggcaagcgtttgtgtacctaaccagaaaaggcacagtaaaaacagtgttataatcttatgagaccactgtcctacatgcggtccctcgttgaccaaaacatcgttaggcagtgcatgactgtatctgcagggtggggctggatagggcaggggtagggagacctgctgagaatggaggagatccatgaagtgaaataaggatggaggactttcagtcaaggaaaagcaagctccagggtcacagtagagggggaaagaccctcaattcactgttctattttcaaaatggctagttcactgggtctcagacagacagtggattctgaggctccttctattttattttatttattttttgagacaaggtctcactgtgttgcccaggctggagtgcagtggtgcaatcttggctcactgcaacctgcaactcctgggctcaagcaattctcatgcctcagcctcccgagtagctgggactacaggcacacaccaccacacccggctaacttttgtatttttagcagagatggggttctgccatgttggccaggctgccttctattttaaaatacaatgcaagttcctgcgcagatagatgcctcctctactcctgcctcaacttctcaggaaaggttggggggcatcttgtccagcccaactctgttgcctctaacatcactgacccggaagatgaccttccttgggcactgcacgtgcagctaggctcttccaggccttcactgcacacaaaccagggagttcctgcaccctcctgggctccaacctgcacaggaatatcttgatgtccagccctcccgaccctcagccactccaatcctccaccagaagagaagatgctaaaaatgcacgcaaacaaaattgttttaataatcagcaaatccccattcactcttattttggacgtacattccaatctgaccccaggaagtcccggtcctcccagaagggccaggtgggtgagaggcaggttgctggccgctgcccgatgcacactgcaagaacaataaggatttttaggggcattatgactgagtcagaaaacacagctgcccctgaaagtccctcatttttcttgctgtccttgaacactctccaggtgaggaagcagtcgtctgccacgcccagatgagccgaggtgaagctggtgttccctcacccgacactgacgccttccccacagcccatggaaagctccctggtgggtgggaaggctgcagggtctccagagagacacaattttctccgatgccgggcccagctgcggccagcctcgccgccctcccaaggcatacccaggaatgacctgggttccacctaaagccaactcagaacccagcgccttctgcctgcaggaaactgcagaccagcatcctggtggaatcccaatgtggagagcagcccccaaaactcgggaacgtggcaagaactatactatagtctgtagcccctgtgttcacaggaggggcgtggaccatctcagagagacaatgatggtctcaggcctggcgtgacacatgaacacaagacagccagcctccaaccttcttgtaaccaggcctgaggccaggcctgattcaggcaaagagaagaaaacaccaggaagtgcccagaagagcaacccaggcctgaaaacccgggagaagagctgccccgactctctccagcccatcttaaagaacggcacacagacaggagattccaacaggaatgggcacgggaactccggttccgcttctctccagcagtcgcggccttggttactctgcctgtaaaatgggcctggaaggagctaagctcccaccaccctctctcccatttcaaagggaaagccaaagaggaaatgagactttcagctctgtcacagaaagcaaaggggctggaagaggctgcaacctgtgagaaacagcacgccctggggtgctgctgaatggatctcaggcccgcccaccaattctcggccatatcccaccctgcccttagcaaaagagcaacagcttcacattggcctgagtgggaaggcaggtcctcccaatacccttctatgaaaacggcctacaatgggcaacaaagacaagtgtgaagacctctggaatgtcctaggtggtttctgggttcaaatcaacaagcccacaggctctgctgggaagcacaggctgaaagaaaccaaggttgggtgaaggagatggtgagacagtggccaaaaagaagggaagagactggtggccaatttgttttttgtatgggaggataaaaaacaagagcttccagaatcagagactcgtagaggattctccttaatgggacaatcccttctgtcccgaggcccaggtgagcctccagggcagtagagggtcaaccccagcgtcagggcatcagggcccagaccaggaaggcccctagggaatgaggtcctgcatgtgcctcccacctgtggaatgtcacccagcaacaggaaacgtgtctcctgaggccaggccactttgcccaaggccccggcacagctggaatctgtccagcctggcactgcacctgctctttgggggccccactgtccatgcaggaacctggcctgtcaggacacaggttgccaccgctgtggtgaaaacacatccccacaaaagacagccagctgctggcaccactacctgctaacttgctgtatgacctgaccctgtgtaaattactcggcttcccagcctcagctctcttatctgtaataggaataataagcccacctggaagggcaatgtaaggatcgaaagaaagcaaagtgtgtagcaggctcctaacaaaagtggatcccctcagaccccaagggcaggggctgggccatagcgaattcttcccctctgggaagggggctgggtcagggtgccagcccgtgcctcgctgcaccctgggcactgacactgcatcttctccccaacactccacgctccttccagttcagactgtgaggaagtgtgcctgctatcccgattgccagctccagcctcagccctctcaaactgacattctggcacctgtcatccacccggagctttctgtcctaaccaagatcacagacatattctccaccaacaaagcagaactgaagcagtccccccacactaggttctgcatcatctgaaccactgaacagcacacctgcatcactgtgctgagctgctcccgctgcctggcacaccttaccccacgtggtgccgtgcaataagcaggcaagacctagctcac

SEQ ID NO: 1887083 - DNA, 4001 bp, Homo sapiens
ccccttcctgggagtccagcgcccctcatcatcctcatttaataatggacaatgatgatggtggtgaccatctggtgaaccagatcctgggctgagggcttgacctgtgctatcttgctattctcattttatgggtgaagccattgattcttgcacaggttaagtaactctgcaggcaaaagcactacagctaaagtgaaaggctcaggttcaaatcctatgtccacaatccaatggcttgggtgaccttgggttcaacctgtcttagtttactcactcgtaagctggggggtaacagtagtacctattccataggcttactatgaagactaaatgaatgctttaaaaaatttttgcatagggcatgacaaagggcaagtgtgcaattaatgctggttattattatgattattactgcccaagtcacacagttaataaatggcagagagagaacaagaacccagtttgttggattccagtaataaccacaacacaatagcaactgctattcgaaccgccaccagttacacaggaattattttgtgtgaggcgctataataaacccttcacaaatacttctcaaagaggccttccctaaccactttctatccacagaagcagccctcccccgttctctctctcacagccctcaatttctctccacactaacatatctcccagtttgtgattactccttctttgcttggggtagcctatcttaagaagcagcgctgtgccggttttgctcactgattgcttagccaatggctggcactaagtgggcacctcataaatattacttgattaagggaggactgaatggatcaatcaattgctcagtcagtcacttcattgcccagcctccaatagctgcggggaagagatgggaccaggagagccttgagtctccccctccttcctgccccactcctcgtagcgcccacctcagaagaagtggacagcgagttgtccaggccgaggctgctctttcccggagggctcttgctggtgctcaaggagtcgctgctgccggctgtgggagggatgtcacaggctgcagtcagggccagtccggacttcagggcacgggcctctctcccgggctgggcaggatcccctcaccttggggaggcaggccatagggcccagggacagggccgttggcggcaggcagggcagcaggcagggcagggaagggcacagagagctgcacgttgagaatctgcagccgctcctttttggccgtcaggctcaggatctgctcttgcagccgctggttctccttctgcagcgcgtgcagcgccttcagcatctccacgactgcggagagagcgaggaacctgagggaggggcgagggggcggaggcggggccaggggaccgggggcggggcctggaggggagccagtgctcagcccttgaaaaggcggcgccatcctaaggagggacacaggtgagctctgagaagagaggcgggacttggggagccacaggtgtgaagacctggggcggagcctgaggctggggtcgaggccacacgggtcaggagagaagggcggaagttgcggtttggtaaggtcggggcccggaggccacgaaggccaaaggtggggcgctgagggaccagggccggtcgtgtggcctggcagggatgggaggtgaggcccggggtggccgagagtcaaggctggggcggggcctaagggcggaaccttaaagaagcttggggacctcggggagaaaggtgactgttagggccctagggcaggcgtcccgaccggcgccacccctcctcactgttgacgccggcctccccgtcgccctgcttctccagaagctgctccatgttagtcgtccctggggccgccgggtctaactggccgcccccacagggtgcagaggctgtctggtcgaagagtgcggggaggctgctgatgggggacctgcggccagagggaacctgggttcagtcgacccgaccactccaggctcctctggcccttctcccgtatcccccaggggttccagcccacgccggtctctccgtccctcctccctcgggtgtccctcctgcccccagcccctcctccaggctgccccttccctcacatggaagacagactctcctgaggggaggtcccccgacaccggaagctgcagtcctccaggtctggctcttggaagaagggaaggctgggatcagcgtggaggagtggtagctgcctcagggtccccgcccccagatggatatgggattgggacctcaccgcagatccctttccccaggaatccccaaccccacactggcagttcaaggccagcgctgagggccctggcttggaaaccctgcccctgggaggcaaaccccgggcatctgctctcttcctcctctgggctgaaggctccactgtctggcttctttcagatccaccgcccaattcctttcctgggatcttcagagttatagaaatttgaggtcaagacagacctggattgaacttaaacctgacatcaacttttgtgaccttgggctcctaaccagcctctccgaagtgactgttattaagattaaaagaaggtaataaatgtgaagtgtttacctgaagggtttagctagcatgtagcaagcccttaatgactgcagctattatcataattagctctgtatgactttttacattcatcagatcccttatcaggaggcaaaactaaaactcttccttgggccacagaatcctgatctgagttttaacaaatatatcaccctactctgtcgttcttaaacgtggaatcatatttgtcccctttaaggcttacctgagtcggcagcctggctgtaggccccgcctcccagcctgacaggtggtctccctgcaccaattagctttctggggctgggctgactctccagggagagggcggggcgcttgtgacccgcccccttaactcgtaaatacccggagaggttgagacctccgtaagcgctgatcccaagacacactacgaagccaaggggaagcacgctacaccggtgaaagcactgggcttggagtcaggagaacagaatctgagctttaggtctgccatttcctgccttgagcaagtcttccatctctgcctttttcttctgtgagatggagcagtaacttccctgccctgccttctcgctgggttctaacttgaaagtgtaccctggtttgctgtgtgtggattttttttttttttaagagacaggttctccctgtgttgcccaggctagtctcctgagtagctgggattacaggcgggagccactacgctgggattttgtttgttttgagacggagttttgctcttatcgcccaggctggagtgcaatggagcgatctcggctcactgcaacctccgcctcccacgttcaagcaattctcctgcctcagcctcctgagtagctgggattacaggcgcccaccaccacgcccagctactttttgtatttttagtagagacggggtttcaccatgttggccaggctggtctcaaactcctgatctcaggtgatccacccgcctcggcctcccaaagtgctgggattacaggcgtgagccaccacacccggcctgtttgtttttgcagggagggcaatggccagagggagggggcagccagaaagctctcccattctttctggggtcacatgcaggtgatgggtgtccgacctttgggaagaaaggggagaggggatcagatattcacatacctgtgtggctgctctcagcttgggagaggaggggattaacggcacccatgggggttccaaagatgtgggtagaagggaggctaaaggtagagccagccagagaaaacacctaagggagggaggtagaatcccctggcggttattcttggatctagagcacaactgtgtgtaccggggtgcagggggccgggtgtgctggggagcagaggggtccagagcccggagggtggtctgatggcaactcagcccagttgctccaattc

SEQ ID NO: 1887084 - DNA, 4001 bp, Homo sapiens
tgatcttggatcactgcaacctctgcctcctgggctcaggcagtctctcacctcagcctcctgagtagctgggactacaggcacatgccactatgtcctgctaatttttgtattttttgagaaacagggttctaccacgttacccaggctggtctccaactcctgggctcaagtgatccacctgcctcggcctcccaaagtgctgggactacagcagtgagcctgcttttcttttaagtaaactttattcaaatacatttaagtaaatatttaataggtattttgtttgtttcttttctttttttttttttctgagacagagttttgctcttgttgcccaggctggagtgcaatggcgctatcttggctcaccacaacctctgcctcctgggttcaagtgattctcctgcctcagcctccagagtagctgggattacaggcatgtgccaccacgcccggctaattttgtatttttagtagagacggggtttctctatgttggtcaggctggtctcaaactcccaacctcagatgatctgcccgcctcagcctcccaaaagtgctgggattacacgcgtgagccaccgagcccagcctgtttctttctttctttctgttttttttgagacaaagtctcactcttgtcgcccaggctatagtgcagtggtgccatcttggctcacagcaacctccacctcctagggtcaagtgattctcttgtgtcagcctcccaagtagctgggattacaggcacccgccaccacgcccggctaatttttgtatttttagtaggatggggtttttccatgttggccaggctggtctcaaactcccaacatcaggtgatccacccacctgcctcggcctcccaaagtgctgggattacaggagtgagccaccgcgcccgggcaataagtatttttaaaaagccataagaactaataagtgaatttagcaagcctgtaaaatagaaggttactatacaaaagcacgttcttatctattagtagcaaacaattggaaaattaaaatttttaaattttatttaaaatagcatcacaggccgggtgcctgtaatccttgcattttgggaggccaaggtaggcggatcacctgaggtcaggggttccagaccagcctggccaacacggtgaaatcccatctttactacaaacacaaaaatcagtaggtcgtggtggcgtatgcctgtaatcccagctactcgggaggctgaggcaggagaatcgcttgaacccaggaggcggaggttgcagtgagctggtattgcgccactgtactccagcctgggcaacagagtgagattccgtctcgaaataaataaataaataaataaataaataaataaataaataaataaataaataaataaaatagcatcacaaaaaatacaacatttagaataaatttaacaaaagatgtgcaaaacttctattctgaaaattacaaaacaggtcgggcgcagtggctcacacctgtaatcccagcactttaggaggccgaggtaggaggattgcttgagtccaggagtttgagacaagcctgggtaagatggcaaaaccctgttgctacaaaaataaaaatagccaggcgcggtggcttatgtctgtaatcccaacactttgggaggctgaggcggggagatcacttgaggtcgaaattcgagacaagcctgagcaacatggtgaaaccctgtctctacaaaaaatacaaaaattagccgggcgggtggcgggcgcctgtaatcccagcgacttgggaggctgaggcaggagaattgctgtccgggaggcggaggttgcagtcagcttcgaccgcagcctgggagagcaaaactccttctcaaaaaacaaaaacaaagggagaagaagaaaaagaaaaagaaaaaagaaaaacatgccaaaaacacatagtaactgaagggaaaggaatctgccagcttcccactatgggaaaatctgccactgtggaagctggcagattttaaaagtttggcaaacggaagctgatggaatttcgatttgatggtttctatttagcttcgtaaaataggcctggcataaggggatttgctgtgagtcaaggtctgaggaaagcgccagtttgcaaagccgttttggaaaactggagcgtgggggtgtgtgcagggtgaggggaggaggcctagtctggtccaccttaggtctagcagagactacgtggagctttgagccgaatgccctggtgagctgccatggcaacacagccgtgggcacaggcccacggcaacccatcactgaacagagttgtggcgtttcaacagagagtctgggacatcaggcaacgtggcgacccgaagcagccaaaatgagacctcgacagcaaaggcctcgacagcggagcccggacctttgcaaaatctgcaagtaacgccaacgtcacaaagcgcgaccgagccctgtacgtcatcgttccgcgacgccgacgcggtgagatgacgccctcccggaagtgacctctagagcggtggtgaaactggcagttgacggctcctgggactagatcccgcgaggtagcccccgaactatttctctacgttttctcttgatcctcccgaaatcttccagatccgcgtagtgaggaatcgtctccaccgtcatggggggcggagacctggtgagtggagggaggcctgggcgggggaggactgaggccgggacggaaattggcagggggtgggggtagaggaaggagtggataaccatggcaacgcagctttgctttcgccgggaggaggccgttgccctgaagaggggatggatccttagggcaatggaggggtgggactgagatttgggaaagtccgaggtgtgtcgcgaacagtgacaggtggtgtttgcgtgtttgttgactgcggctctaccggctgtaaattctgggaagaccggggagggggcggatggagccatggctaggaaaggaggtagatatggaggacgtgtcaccacactttgttttgtatatcttgtcttgccacacacctctcttccttgggtgagagttcagagtcatgtcctggactgaagtaggggtggtttgtgccccattctccctaccctaagccatgccctggggtcgttttttattttttatttttttgagacggagtttcttgttgcccaggctggagtgccatggcgcgatctcggctgaccgcaacctttccctcctgggttcaagcgattctcctgcctcagcctcccgagtagctgggattacaggcatgcgccaccacacccggctaattttgtatttttagtagagacagggtttctccatgttggtcaggctggtctcgatctgccgacctcaagtgatccgcccgcctcggcctcccagagtgctaggattacaagggttagccacagcgcccggccctggggtcctttttaagcctgaagggatcttcctgtccatctttctgacttccacacctccttcagtgctggattctgatctgtagtggcagagcttgcttttgaattcataccacttaatataagttatgtggcaatgtctcttaaactgaaacgttcatttgtaaagcgctaaggccccaaatagggtaaatgtacccacaagagcatggggcaaggttgggaaaatgctagcctccggaaagtggagctaattgaaccagcaagtagatcagcttagccgcctgcccagtaaacctattagtttgtcatgtgttctcaatcacagtgagtgccaggactccatctagtttcatccaatttagtgtattcttcacataactgcatttaaggacaggaaagctctaatccagggtttctcaacattagcgctcttgacagtttggcctagataattctttgggggtgtgtggtagtggtggtagttgggctgtcctgtgcattgtagaatgtttagcagcatcactggcctctagccactagactggagctatccactaacacccg

SEQ ID NO: 1887085 - DNA, 4001 bp, Homo sapiens
gcctggatactgacaccattgctgttccttcctcatggggggcagtactaggtttcagggacagtctctgaatgggtcgcttttgttcttagacactcccttagggccgcttcccctctcaggccagcttccctaaggctttcagtacccaggatctggaaggaaagggccaagctgggctgtggcatccactggaccctagagtctcattgggcagggcctcagaatccacaaagactccccagtgctgttcctcttccaacgaggctggaccccttccagccatctgggaactcaagcaggaaggaaggttccttaggacaggttcctggcatggcaggttcccctggaagtggtcggagggccctcccacctcttgatgccagcagaagtcaggccttccctgctccctgaggacacatcagggcttctgcggacttggccttctggttcacactggcacgtccagacccaggtactctgggttctctgccgtaggtgtccctttgaaggtgctgggtggagccccccgctctggtgggtcctggtcccagtaatagaggttgtcgaaggctgggctgaaggcaggaggagggtggggctgaggggcagctcctccctggggtgtcaagtactcggggttctccacggcacccccaaaggcaaaaacgtctttgacgaccccattcttccctggggagagagtcttgggcctttccagagtggcaccagcaggtcgggcagcaggcagagggccctctcggggcgaagggggctggggccgaacatctggctggttcacatattctgaaaggtcaagagaaggtgacccattaggggaaggaaccccggtgtctctgccactccctctgcccccacagtggaccctgggctgaaggtcccacctcccctgcccatcagtctctctgcttagactggactccataccaggctgggggctgcaggtcaggggggcaacgtagccatcagtctcagagggcaggggtactgtggggtcctcactgtaccgctgtagagggctggggtcatgtgtggggaggctttgcagccccttggctgcccccattcccaggtcaccatcaaatacatcggagccagccccttcggagggtgccagtggagacctgggggcctcctcttcagagggctccagccctagtgtcaggtccccaccgccactctggggacaagaaagaaagtcatgatgggggtcactcacggatctgggatggggactccatggaaggtgacagggtcacaggagaaaaacagaggtcacctttggggtatgacacagtcaccgtggagagaatggggtcacaggggttggaaggcagtaagaattttttgtagggataatggggtttccttgagaggtgacagttgagggaacatcagagaaagggaccctagtccaccggggttgggggaggtaagcagacagccacacagtgtgaccgagggcactgaccctggtagatgagctgcggtgcctgtggtggaccatgcccccagcgcccggggcagggtctggacagaagaagccctgctggggtaccagatactcctcagcatccaccaggtcccccatgtcatcgtcctccagcagtgagcggtagaaggtgctgtccaagggactggctgggcccaagtcctcattctgtggaggaaggagaggcaggatggtggcccctccccagcccagcatgcagccttccgtgaggggcctggcatactggactcatctctccttcccaccctctgcaggagggtgctcttagccacaggcagggatggggcacagaggcccagtacctggatgaccacaaagcgctgggggtccctggccatgcgggagaattcagacaccaactcccggaatcttggccgacattcagagtcaatcatccaacctggggcaggagggaggtcagcatgctagtcccaggccctgtgtgcttgctgcctctcccctcccactccccctccagtctggtctagacagtcccaagggacagcccaaagccctcaggtggtagagaagtagcaccagactctggggtcttcagccagaacctttggcatctcttctagtttcccttttaattttttttttctttttgtttgcttttttatttttttgagatgaggtttcgctctgtcacccaggctggatttcagtggtgcaatcatagcttactgcaaccttaaactaggctcaagtgatcttcctgcctcagcctctcctgagtagctgggactactggcacacaccaccacacccagataatttttttattttttgtagagataggatctcactatgttgcccaggctggtcttgaactcctggcttcaagggatcctcccacctcagcctccaaaagtactgggattacaggcatgagccactgtgcccagcttaattttgtacaagagtgttcctcaagagtggctttggactttgactgtaaaagggatacaagaaggttttgaggctcctaacatactagggctcctgggtctacatacatcctggtcccctttcatgccccttgtgggctcctccacccaggacctcccaccctcctccaggcagccagcacagctcagccacgcacatttgaccatgatcatgtagacatcaatggtgcagatggggggctggggcagccgctcccccttttccagcaggtcagggatctcccgggctgggatcccatcgtaaggtttggccccaaaagtcatcagctcccacacagtcacacctaaggcagagacagggtcaggagtgggagggccagagggagctttagtgtactgagccagaggttctgctcaggagtctagcatcatggcaggtagcagggggagatgtgatgccaggagacagaccctacccggtctttccctaatcctgggaagtgcacagaccctgcaaggtggggcacaggcagccccttccctcccttcacatgctgaggtggccccgtaattctccccatcccagctctcatcctccctccagccatggctcctcacccacccctcccaacaccccccatcacacaccataactccacacatcactctggtgggtgaaccgccggcggagaatggactccagcgccatccacttgatgggcacctgggagggcagaagaggaagtcctccaactgtgtgttgtggggaggtggccactcagagttctcccatgggctagacaccactccacccagcctcctctgctccttggtccttcacctaaccttgcccccatctgcatggtactctgtctcgtcaatgtccagcagccgagccagcccgaagtctgtaattttgacatggttgggactcttgaccagcacgttccgagcggccaagtccctgtgtacgagccgcacatcctccaggtagctcatcccctggaatgggaagcacccatgtagaccttctgggagggcctgggcctggccacatgcccagcaagagtccccatcctagccccttgtggacataggggtttgctccggagagacctgcaaagagcccaggtgcataccttggcaatctgcatacaccagttcagcaggtcctgggagcccaggcgtccgcggttttcccggacatggtctaagaggcagccatagggcataagctgtgtcaccagctgcaccgtggatgtcaggcagatgcccagaaggcgggagacatatggggagcccacaccagccatcacgtatgcttcctggggacaagggtacgctgagagggtatgggagaccacacacccccaaacaccacacagcctcccaaccatcacaaaccacagccatggcccacagcctgtgaaggctcaaagtaccagcctggacaacatggtgaaaccctgtctctactaaaaatacaaagattaggccgggcacggtggctcacacctgtaatcccagcactttgggaggccgaggcgggcggatca

SEQ ID NO: 1887086 - DNA, 4001 bp, Homo sapiens
catccatttctgtatttgtatccatttctgtatccccagtgcttcatacagtaggatttaatatatgcagggtgatgagggaggttaagtgacttgctcaatgccacactgaaaatttagcacaaagccaggtctggagcagaggtggcttgaccctcattcaaggcttttcaaatggtgccacagactctcctcagcagggccccacactgtcttcccattacagtgatgacactgtaggaaactatgtgccctatctggcttgatcaccttgtaacctatggtgggaacctgtgggtgctagacggctggggctgaagtctggcctatggaatagaattctcaccagggtgtcaattaagaccttgtcaattagcacagtgcctcaacccctacactcttcatacaagccaccatgctggtttgagattcctcttgaaatcacagaaacctatttctccaacacccatttcacaacagtcattctaatcatcttacctagggttaagtaaaccagtccaagggcctaattgggcctttcacctgttttgcaaataaagtttttctggaaaacatccatgctcatttgtttatatattctctgtggctgcagatttgagtggagaccctatgtccagcaaagcgtaaaatactatctggcctttatagaaaaagttttgcagacctttggatctagcccaaaaaacagggaatcaagactgcaaacagcccctcccttctaccaagggactggctgcccctactctggaagttagtgaaccaactggcttttgaatgaagtcatttctttttttagccctggttacaggcctgggatccaggaggagattttgcctgtcagaggcacacagggacctgcaacacctagcacatggcctggcacataatggcactcaattaatgtttactgaataaataaacaaagacatgagaaatcagccaggctgagcctcgaacaaaagtccatactcctcctgtcagtttcaaggtggccagtcacacaggtacctggcagcagccgggtgacctagatttgtcagaccttatcttattggctttcctttctcgtgtatttacccagcacctgcccccacgatgctcagagcaggttggcctcttgtttttatagagaaagagatggacagggaggaactctcctcccacacagacacactttgtgttttttctttttttctcccgctgcgggaagaatcaagaaatatgggggcttcgagcttcaaaaagctccatgaagtctagtttcactggcttcctctctcctcaggcttcctaggtgaatgtttctggcatgaaccttaacggccctctcagagttgtacctgtcgtttggaacatttggcatctgaaggggaaaggccagctgtggataaagctggcagctttcagaaggtcaggaatgtaaacaaagcagcccccacccagtggggagaggcctggtcctgagaatacagacattcctccaaagatgcatcagagaacaaggggctgcccgactcggctgggctagctcaggccgactctgcaggggaggacagggaccatcagggaaacaaaaggcacttcagcctctcatgaaaattaggcaaactgaatggaaagcactatggaaatgctggtttttcagctgccccggataaccttaggggccaggctcaggaaggagatccttgttgctgctgccaccaaccgctttttcaggtgctgggtcttccaggaaccaaagggtaccgtgtgacaggctcagtgaaggcaaagcttgcatctgtttgccactgtaattcccagggtctaacacgtaagaggagctcacacaatgtggaataaatgacagggccctctgcaggagggtttgctcagggattttttgttttggtgaggaaacacttttctgtttcctcatttatctgctgggacgctaaggtcacagttagcttcccaacagataaatgaggaaacagaaaattgctcttggtggagccaaccctaacaagaaggaaaaggagctcctgggcccccaaagatagagaattttccttttgatgatcataatttaccccttcaaagacccaaaggtgtcaggggctaaaggggaggggagaactagtgccacctgctccacctcttgacatcactgtagtctggaggggagggagtttatggactgattagatgttgttgtttctagcggcagctggcagagccatctcctcctctcttcctctccccctcctcctccaactcactgtccagccaccagcaataagccagggagaggagggaaacagctaaagctccccttggctgggcagcccttaccccagagataatactctgggtcaccaggtcaaaccctcctctcagcagctttgctgagtgctttggaaacaaaggttatcagagattctcttttggttttgttctttcaagataaagaaagtggtttctttcaaaagattcccccccacccgaagtgtcacagaaggaatcaaactgacaagcaactctcagctccagcttcactctccaggccagggacttctcttccagccgcctgggctgctgtgtcacagccaactgaggtcctcgggtgggtcagaggcacagtaaccacctgacagactaaaagggaaggaggcagggacaggcttttccatttacattctagagaggcttcgctgctgcctgcaggtaaggccccagaaagctgtggtggaaggtgctgctgctatttcatcacctcctgagacctgctggtccccctgggataaggaacaagcgattccatgaggagaggcctcaaaagacgacagatgacaactgtagggctcaagggcaactgctgagactctccaaaaacaagggcaacaagcaagagtgccaggcttgttggggtgccaggccctagttctgtcactttccatttggttttctttagtgactattcatagaataacactagcttccaacatttattgagcacttatcacgtgccaggccctgtggtaagaacttcacatcaataacctcatttaatttccacaaaaatcctatcaggtatctaatattactattattcccatttgccagtgaggccattaagacgcaaaggcggatgggcgcagtggctcatacccgtaatcccagcactttgggaggccgaggccagtggatcacctgaggtcaggagttcgagatcagcctggccaacatggcgaaaccccatcttctacaaaaaatgaaataaacaaataaataaataaatagccgatgtggtggcaggcacctgtaatccagctacttgggaggctgaataggagaattgcttcaactcgggaggtggaggttgcagtgagctaagatcgtgccattgcactccagcctgggtgatagagcgagactctgtctcaaaaaaaaaaaaaaaaaaaaaaagacacagagggattacttaatgtacacagctactaaatgaataagccaggtggttgggctcggagttataccacgagctgctatgttatatggcctcatatcatcttatgctactacattagactcagaagacgcaggggggaagtagaaggaactttaaagacagtctaacctattgcactcatttggataaatgaagaaaagggagagccagagagatgaacagtcttgcccaagatcacagcgcttgacactgtcaatcttccagatgccagccctctcccagggctatgtgcaccagctatgtgcaaagtggtgtgtcgggggaggtggcaaagtgcaaaatcaagaggccctcagtttctctctgggccttggtttcctaatctgtaaaatgaggagttgaactagaaactccaggttcaaaggtacctccagccacaaagttctgagcatctatgactccaggacattgagaatcttgttaggaagcaagacaattatacataaaaagtgcacgcaaccataac

SEQ ID NO: 1887087 - DNA, 4001 bp, Homo sapiens
gtgtatagtaggagcccctgggacctggtccataggaggattccctggtatctggtctgtatgaggagcccccaggacctggtccataggaggattccccgggatctggtctgtatgaggattccccgggacccggtccataggaagattccccgggatctagttcataggatgagcccctgaagcctagactgtagaaggattccctggaatctagtccataggaggagcctccgggacctggtccataggaggattccctgggatcaggtccgcgggagccccccaggacctggtcttcatcagaagcaaggctaaggctgctggctgcatcacctctgcctgccccttgctttcctggtgtctcctcctttgtgtattgaagccgatgccccaccccacccctccatgggttgttggaggcttaaagaagacacagtgttggccaggcgtggtggctcacgcctgtaatcccagcactttgggaggccgaggcggacgatcacctgaggttgggagttcaagaccagcctgaccaacatggagaaaccccgtgtttactaaaaatacaaaattatctgggcgtggtggcgcatgcctgtaatcccagctactcgggaggctgaggcaggagaactgcttgaacccaggaggcagaggctgcagtttagagcacaacatggcaggcctgagtctcctaaccttgtgttttccttagtcacactgcccttaatgtgaagacgtttcccactatgtccacattctgcagacctgtctaccttcctgcagttttgttactgaatcccccaaatctcttggtgacagctttcaaatcacaacttccactcctcacttgtggctggatcaataattaaacacaccaaagcagacggagtgctctgtattagcacagagggttggggatcattctcacaacatcttcatcaatgactcaatggggaaactgatcaaatctgcccatgacccaaagtggggagggtccattctgataacagaatttgggttcacagagaagccagcaggctggatcactgacatccccacagagtaaaagtcactttgcacagtgacatgtggaattcaagtgtggcctgagttcccacaggaggggcgtggctgcttacatctgaatctctcccataatgttatcattcaggtgacattatgggatgactatgatgtgtaatcagtatgataatgacactgtggctgtggaggagaatgtcattctcaggacaggcctgctgatgtcttctgagctgtcacagtcgctgggatgtacggtacacacgcacacaaagagcgcatgtgcgcgagagagaatattccagagcagcaacagctgaacctaagtagaaggaatacaggtgtccaacgtatccttttccaatttggggggatgtatgtacattttcaaattaaaaatctgggaaaagaaaaatcactgtatgattagcgtagggggcaggtctggatgaccagcaatctcaacataagccagtgacctggtgcccctcaaaagctaccagtgtttccagctacaccgactgaaatggcgtgggtgacagttaggtctagggacttgggtagaccacatccaagttcctgcatttgattctgagtgcagacggaaagatggattgtgtgaacggagggcatgaccagagggccactgaccagtgaagaagctggacgtcatcgcagcctcttgggacagtgtggtcaaggagcaggcagctgtttccagcagcagaagggctgacaagcagaaggcagggaagatccgttctgttttgctacctgaaggcagaactgatcgatgggagtcacagacaagtaggagtcagctccctgcggagcagaacacactagccattgctcagcgtccagcacacaacaggctccaccaggcctgtggagcagcacacaccagccatcgctcagcatctggcatggaatgggctccgccagaggcctgcggagcagcacacaccagccatggctcagcatctggcacagaacgggctccgccatcgtttgtcagggatgctaaggacagtgttcttcacggtgggaaaagcaggccagtggttctccagcccagctctgcttcagaatcacaggaaagcttattttaaaaagcagattcttatgctatactctgggagagtttttcccccagtaagtggggtagggctctggaatctgtttttttttttttttttttgacagagtcctgctctgttgctcaggctggagtgcactgacgcgatctcggctcactgcaagctccgcctcccaggttcacgccattctcctgcctcagcctcccgagtagctgggactacaggtgcccgccaccatgcccggctgattttttttgtatttttagtagacacagggtttcaccgtgttagccaggatggtctcgatcgcctgacctcgtgatccagccgcctcagcctcccaaagtgctgggattacaggcatgaaccactgcgcccggcctgttttttttcctaacaggtttactgagatacaattaacataccataaagttcacttgtttaaaacatataatgcgatggttttggtatttacagagttgtgcaatatcactacaatctaactttagaacattttccttaacccctaaataaacctcatcctcatcagcagtcacttcccatccatcccaccccaactccaaggcccaaggatccactttctgtctctgtggatgtgcctacggaatctgtttctcaacacacttctgggtgattctgctcctgcaggtccacggtcgggcattcaggaaccagtggaccagactgttccaagatcctttcctagtctaagctttcatagccggaacaatgaataccgacgaagtagcaggtgctttgcttggtgctggggttgtaaaagaaatatggtacaccctactcttgagaacctacagtcagtgggaaaaatggaatcataaatgactaactttaatacaatgtgagaagcgctctaacagcatgtgcattcaaaagaggcccaggatgcagatgaggtgattaatttgcagccaggagaagttggagggggaagggaatgctgtgttaactgctttccatgcatttcatgtactgctcatcacaattctgtgagctggatattaataccactatcatcctcaagtcagaaaaaaggagacagaggcctagagggcaaagtggggagtggcagagttgggtgtgagcatgagtagtcaggaccctaagactgtgtccccactccctatgctagcctacacaatggccaggggacctcttagagtaggggctgctgaatatcccaatcttagcacacagtaggcactcagtacatttttgcttgatttggactgaaaagggcctcccaagtaaagcacaaagccatggaagcaggaagacgtttgtcaccttcgggagtcagcagaggagcaatgcgagtgacgccaagaggcttccggagctgttgactcttatgtgaatcatgagcccactgtccattcacacacgtatctcttgaaggaagagtccagcgtcttcctcatgctatccatggtgggcaaagcaacatggtttctaccatcatggagtttatattccagtagggaagacaggccagttccatcccagcaagacaagaggaagcagagggttgctacggtctaaatgctggtgtcctccccaaattcctatgttgaaattataacccataggtgatggtattacgaggtggggcctctagggaggtgagtggatcaccatgtgagaacacggttaagaagctggccctgtgcaacctgaaagagcgccgtcaccacaacctgattgcgctggcaccctgatcttgagcctccagcctccagaactgtgagaaataaattcctgctgtgggtaggccacccagtctaaggtattctattacagcagcccaaacggact

SEQ ID NO: 1887088 - DNA, 4001 bp, Homo sapiens
aggaaggaaagaaaaactgcaatcgtcaactgtttgaagagtcatcgtgtagaggagagacgggggtcaccctgcagtcattgtccaggaggcactgtggagatttaaattctttaaggacgtgccaagcaacttgataaaacccaagtccagcacatcaggcatgaatgaaggcaactagaagtgaatggacaaaagaggggcagtgttgggtttaacaaggtaatttctttttttgagacggagtctcactctgtcgctcaggctggcgtgcagtggtgcgatctcggctcactgcaagctccgcctcccgggttcacgccattctcctgcctcagcctcccgagtagctgggactacaggcaccggccaccacgcccggctaattttgttttgtatttttagtagagacagggtttcaccgtgttagccaggatggtctcaatctcctgaccttgtaatccgcccgcctcagcctcccaaagtgctgggattataggcgtgagccaccgcgcccagccgaggtaatttcttaagtgacaatatctcctggcattcctccctcatcactggctgttcatccccagtctcctctccttcctgtaccctcgttaacccctggcatgcccaagacttagctctgaaccctgttccccttttctgccttctgctctcaactcctccccaagtaactgtattcagcaccacaacattgaatacccttcggtatagaggaatgactcttgactttgaatttccagcccagacctctcccctaagccaaagacttctaaattgaagtgatttgctgacctctctgatggtcaaaatataaatcctgatttctacaccttcccgcaaatcttctgttcctcctccagtctccccatctcagtccaagattcagttacacaccagttgctcaagcccaaaacgtagagtcatctagaatcattcttccctaactccctacatctaacccatcagcaaaccctgtcatgagacctgttttcttctctacttcccctccctagctaagccaccagctacctcctagagttcttgtgaggattaaatgcattgcttttcaaagaatgcctggcacttacgtgagctgtttgtattcttaacatcattgtcattgtcatcattgtcatctcagtgtcatcatcatgtccagtctggactatgaccacaaactcctcactggtccccagtttccactcttgcctctccccagaattcattctcaacagccagaatgagcttacaaaacatgaatcaaatcatgacactcttctgcttaaaacccttcaatgatgtcccaactgtccttctcagtaccacagcctgtgaggcaccagcgatcctgctcccatccctctctcccgcattccccaccctcctttcttcagctaactcagggccttggttcttccctttacctcctagaattttcttcccatggttcttcctataactggtccttccctgtcttctaaatctcagaccacatcactatggaaggaagaggccttccctgagcagctcattcctccagtgatgactttccattggatcaccctatttgtttcctgcagagcatgttccactacccatagtgatgcatgtattgtgtattgcctgtttcctccaactccttgtgagctgcacaatggcagggacctgctctttcttgttcatctctgtgcaccccatttctagaacagtgcccagtacataggacaggctcaatagagttgaagaacacatgaatggatctcactattagctcttcaaaaacaaaagaggctctcttgaaggtaataagttccccatcagtggtaggatgaacatgtggtaggcatattgcagaggggtctgtggctcgatgggataggaaggagggatgggccagatgactccgggtccctgccagtgttgggggccacttgtgtgtggatgactgcacactcatgtggcccccagcactggcagggacctgaccacagtcagaaggcttcatcccagacagccttctctcgggcaccaaagatcaacatccacaacctcaggctgcaccatggccagtccctgctcctgaaatgcaagggatgttttcttggtgctggtgaaatcttggggatacaattgaagtttttttaaagcaaagactatagattccaggtcatacagttcagacacaggttcaaacaaacatttcatactaattcctgggtattggcatcagagaaaccctaagggttgaaatcctggcatgttgacaacacattccgtcctctgtacctcccttgtaccaccagggtctcagcatctcataagagcctgtaaaatccagagccattccttgggtagagattatgggttggctgagggagccacgaagattttaaaatgtaaaacatgaacccataaatgcagaaggtctcccgtgttttctaaaatctggccaaaagctgagccacagacaaggaaattgtctggtgtccttgccaaaatgacagtgtcaccaaattgataaacaagtctgggatcgttttgaagacagcgatgataggagaccaccaagggctcaggttgggggctgctgagactggcaagatttagtttctctaattttcaacccaaagcattgatctaattcctcacacaacctattgatagtcatgagtttgctgttgctgctgctgctgctgctgctgctgctgctgctgctgtttaaatggaaaagaagagtagtaagtggtcatcttctcagcgtctggtgctggtcccgcccacacactgtggcagagcagacccacctgttgtcactgggaaatgaggggctgcaggtactgcccttagacaatggaggtggccaaggacgtttggggacagattacaggaaagctcaacaattcccttcatgctttggtgttgagcactggcctcctttttaaaaacaaaagtgattcaaaaaggggcacattttttgtgcctaacacctcagcatgaaaaagtttatcaactaccttttcttctgagacaagagaggactttgtgagcagggacaggccctgagagacagattttactgaagacaaactgcctgggtcctgcctcatcactgaagctgatgaagaccagccaggggccagggcaagccaggactgtgcccttctagctcttgggctcccaagccgcctgtggcttaattccagtattctgacccattctgctacacgtcaggtccacacaaattaaacaaaaagcaggggaatgcttgtgagaacttggacttgatatttggatcttggagacttcaaaacaaaaagcactggttcattcaatagcagggcaaatgttttgcctgaatcctttgggtcagtagattttaaactcacccatagggtcttggggaggaggcttggcacacccctccccctcaccagagccttccagattgtatgagtttgcaaactaaagctccaggaactggcctcattcaaagcgacgccatggaccctgcgtgccatgccccagggctccactctcttaatcaaggcagagggaacctacttactactcaaaaccaattttctaacataaaatgttcacagttattttctgattgtgaaaataaaagatctcaatgaggaaaacaggtaaggcagcaaaagaaagaaaacagccaaagtgataagaatcccgtcacccaaaataatcactgaaaatataccgatgcatttctaccttgtacaatttctgatatattctgccttatagaggcttctggactgtcactccaacttggaatcaaatggaccactgagaaacccgtggaagacagcaggtctaaggaaatcacaaagattagaaatgcatccatgtgcacccaactccttcctagtgggggtggggggtacctttgagatggtctgtgattctacttacccctcactctctgttcccactagtctgccctgccctctgtccct

SEQ ID NO: 1887089 - DNA, 4001 bp, Homo sapiens
ggtttcaccatcttggccaggctggcttcgaacgcttgacctcaaattgtccgcccacctcagcctcccaaagtgccgcctgactatccgctaatttaaaaaaatttttttgtagagaaggggtttcaccatgttgcccaggctggtctcaaattcctgggctcaagcagtccatgcaccttggcctccgaaagtgctgggattaatatgcgtgagccaccacatctaaccctctcttttttttatttttttattttttttttgagccaggttcttgctctgtcactcaggctggggtgcagaggcacgatctcagctcactgcaacctctgcctcccaggttcaagtgattctcctgcctcagcctcccaagtagctgagattacaggtgcccgccaccatgtccagctaattttttgtgtttttagtagagacagcatttcaccatgttggccaggctggtctcgaactcctgacctcaggtgatctgcccgcctcagcctcccaaagtgctgggattacaggcgtgagccactgcgcccggccaccctctcttttttttaaagaggggtcgcactgttacccaggctggactcaaactcctgtgctcaaaggatcttctcaccttagccccccaagtagctgggactacaggcatgtgccatcattcctggcttccttctctttcacataccctcagaaactcctgattggtccgaagggccacgtgatctcccagatagcacaggaggcaggccatgacctcatggacatcttcctctgcgatgttgacatccgcctctctgtgaagctcctcaagtgaccaccctctactgaccctcccagggcattccagctcaagctgctggcaggaactgaccagttctgtccttggctggggaccctccaggcactggtgagagacatgaacactgactggccactagctggcctggccctgttgagtctgcacagtccctgcccagctgtgtcttctgttggaagaaggaacctgccttagctcagtttccaggtggttcctctgcctggcaccacagctacaaaggtgtagctaagaagatggcccattggtgggagcaatgtcaccctgcctccagctagctatgggcccagagtttctccctgagtcgctgttgctagcagggagatttctcttcctgccctcacttctttcaccttgaacttggataagaactcgtgtctcctgagtgaggtagcgcctcccatctgctccccaattcttgatctctcccaccccatccctctccccagtcttggatactaataaaatataagcattctggttctcatctttattccttttatttatttatttttattttttaatattagggactgagtctcactatgttgtctaggctggtctcaaactcctgggctcaagaaatcctcctgccttggcctctgaaagtggtgggattacaggcgtgagccactgtgcctggcttatctttatttctttacaacaggaaagagaaaatgtatctattccctcccctacccccaatcccacgcccccacccctgccttgtttgagctggagtctcccttccagtagtctgcttcagggtcctgagttctcttcctggcacgttttctgggtatagcaagagaaccattaccattactaaactcagtaatggtaacggtttccttgccattcccaagtgccctggcagtcagtaggttgtgacaggctgagcagagagcttcttgggcttgcagcatctctcctgtcctccttgtcaggctccagagctgggggtgcccggactagtacatcatctatactgtagtgtctcatcgcaaacttacagtatatgatgatatcccagccagggccccactgggggcacaggaagcatggcttgaaaagcactgtgaggggctgggggcagaacaggacaggtcagggctggacacacacagcttcctgctccctgctctacagctccctcgcaggccagcgtctccttgattctgtggtcaggcacagcccaggtgggttatgggaaggggactggagctagggtctgttaagatctcatagggacccagggccagtgttaaacaagccagagatggcgtaatgatgcagaaggttccctttggtcacactaacaagcagacaggcagacagacccagagaaggtgcacttacctggagctggaactgcagactgaggaggcctttggatgcagggaggatctgtccctcaagctgcttgccttttatcataccggtccctcccctgggtggggcacttttcctggccctgcctcttaacccttgccctgctagagtccatgacaagggtcactggcccctttccctagaaggccttttctcacatactctctcatggaccatattcacccttcactcccatctccaagaagctcatcatctctgccgggctgggaaggagaaagaacagcctcatcccatccaccagcatttaattgctggtcagatccctagtggaaggtttctcgtttttgctttttttgtttttgtttttgttttgcagtggtggtaggcaatgttagttgaatctctctgtatagggcaggaagggtcctggcaactggatctccagaatctgtctggcagccgagctcaccctacccgtcagcctaaatttctattcccagcccctgcccctgtgtttatgatgagcccaaggaggccagacctaggcaggcagagagactctgcctagcactgccctggcaaggtcctcttgggggttgctctactaggagatttgagagcagctgaatccccagctcttgtgggtctgctcttcaaagctcaaggcacctccagtgagagcctagcactgtttggttctttgcctctggggtagaggagaggctcctcaaagcaaggcctctgctgtttagaatccccattctgggggacacgcccttccctcttccctatcctagacaatctggtctgtgtgctggaaggcagttaatactcttcctctgcgggggtagactagaccaggatggaagtgggagaagagacccaaccttttctgggtcctgtggaggtgttctatttcctgaggtcacagcacgctggcacatgctctaccctctgcttagcatggtcttccctcctttcttgtctagttagctcctagcccctcttcagagctctttttttttccttccttttttttgagacaatttaactctgtcacccaggttggagtgcagttgtgtcatcatggctcactgcagactccctgggctcaggtgatcctcccacctcagcctcccaagtagctgggactacaggcgtacaccaccacacctggctaatttttgtatttttagtggagatggggtttcgccatgttgtctaggctgctctcaaactcctgggctcaagtgatccgcccacatgggctcccagagtgctgggattacaggcgtgagccaccgcaccagcctccctcttcacatctctaagtgttacttctgcagggaagtcttcccagactatttaagtctccctgatagggacttatttatttgtgtgattattcacattaagtaaatagtcatgagggccttgtttattcactaatatatttctgtgtttttgtttttgttttttgtttttttttagcgagagtcttgctctgtcgcccaggctggagtacagtagcataatctcagctcactgcaacctccgcctcctgggttcaagcgattctcctgcctcagcctcctgagtagctgggactacaggtactcgctgccacgcccagctaattttttgtatttttagtagagacaggctttcaccgtgttgcccaggctggtgtcgaactcttgagctcaggcgatccgcccgcctcagcctcccaaagtgctgggattacaggcgtgagccactgcgcccagctcactgatgtacttctatcacataattaacaact

SEQ ID NO: 1887090 - DNA, 4001 bp, Homo sapiens
ggatgaattaatgacatgctggcaggagcttgagtaaaggaagaagagcagagggccagggcctgaagtttgggtgtcttaccacagagctaaagaagagtgggcaatggtagactaaactagagaagaagaggagagaaaggcacagaggaacttcagcaacggaatgccagggaaggcaagggagctgagggtttgggcagttgcatccagtgtagggaagaagatcagggagatagacaggcaaaaagccatggcaacaaggaagtagttagggactttcagaggaagtatgagaaaaggagaggaaggtcataggtctgaagtttagcagtgcagtagggggcactggaatactatcttgggggtatgagtgagtgctttttcaggggtcctacttgggagaaacatagatagacattcatttaatattcatccatttctttccagcatagtcatcattctgacatcatctaaaagaaattagtatctgcattgcatccttaaagaagaagggacaaaagacatgtccaaactgtctgtctgttctagtggaataaaacattaatttaatatgtattttggacaaccaccaacctagagattggaaacttttctcaaggatatatctctctgtatgtgggctactggctttgtggcttttctgtaggaaaattaaaattctagttttgttctcccttatcacccagtgtctgtgtggcttaactggctgattagcgcgtgcttggaatgtgtaaattcattttaacattggcctaggggcctgtgtggtagctcacccctgtcatcccagcactttgggaggccaaggcagggggatcacttgaggccaggagttccagaccagcctgggcaacatagcaagactgtgtctctaccaaaaaaaaaaaaaaaaaaaaaattagccaaagcagggtgacactcacctgtagtcccagctattcaggagcttgaggtgggaggatcacttcggcccaggagtctgaggctggagtgagctatgattgagccactgcactccactgcacagagtcagaccttgtctctgaaaaacaaaaacatttgcctaggtaaaatgtatcgaggaagacaaattttaaaattactcattccaggccaggtgcggtggctcacacctgtaatcccagtactttgggaggctgaggtgggcggatcatgaggtcaggagttcaagaccagcctggccaatatggtgaaacaccgtctctactaaaaatacaaaaattagccggctgtggtggcgcatgcctgtagtcccagctactcgggaggctgaggcagaagaatcacttcaaccgggaggcggaggttgcagtgagccgagatcgcgcctctgcactccagcctgggtgacagggtgagactctgtcttaaaaaaaaaaaaaaaaaattagtcattccaaagtccaatgtcagacatagattatccgttgttttggatgtaatcctcttcctggaaaactggcacaacccaattacacatgaaatcctttcaactctggtattggaggtatagggaaggactttgttttaggagacccatagtctacctctattgttctaggagttaaaccacgttggtttacatcctgactttgccacctgtcaactcagaccttgggcaaatcaaaggtctgagggaggagtgcaggctcccagcgttcccacgggggtggggacgtgacgtattcatcagttcatgaagttaatgatatgtattgaaaaggtttgttcaaggatttaaataagacgatgaatatattgaattaataatgaatgcaaggccttaaaggtgttttgagggtggtgaaacttgaatctctcatcaactgtgcaatagttatattaacttggatggctatgagttttgcagaggaaagctgggcttaaatcccaatgctagacctggtggctagaccttgattgccaccgggtctagcattgggatttaagcgacctctaaaaaaaaaaaatcacggaatctctctttggccttccttttttgtttctcagcagtctaccaagctacgaagaacctgaaaatcggaggtcgtgtaccttattttttctgagagcttaagctgagagcacagcctccccaggagattagcggcagagatccgcgcgctgggagaaaggctagccccagggcgccctaacttccaactccgggagcaatccaaacccggaggccggcgggggaggggacagctgtagggggcggtggggatgggagtggatgctcccgggtcagctctggcactcgccagctgagcccagcgccagtctaggtgagccccacggcggtgagggacgctcgccagacggcccagaggagttagatgacgtcacctccaggaggactcgctttttcattaatgaaaccggccggcgcgggcgcatgcgcggcaggccgccttccctctcgcttccccctcccctttcccagccgcgctctcaatctctagctcgctcgcgctccctctccccgggccgtggaaaggatcccacttccggtggggtgtcatggcggcgtctcggactgtgatggctgtggggagacggcgctagtggggagagcgaccaagaggccccctcccctccccgggtccccttcccctatccccctccccccagcctccttgccaacgccccctttccctctccccctcccgctcggcgctgaccccccatccccacccccgtgggaacactgggagcctgcactccacagaccctctccttgcctcttccctcacctcagcctccgctccccgccctcttcccggcccagggcgccggcccacccttccctccgccgccccccggccgcggggaggacatggccgcgcacaggccggtggaatgggtccaggccgtggtcagccgcttcgacgagcaggtaaccggcccgtggcgggcgggaggtgggagcggagtgggggtggggacagagtaggtgaggggaggtaggagcggccgcctcccccgcggctgcctcaggctctggaggaaaggaagggaagggaagagaagggaaggggggataagtgggggtggccaaggcgggaggtgaggggtaggaggggacagctgggagcttgggcaccctttccctcctaagtcggggggtggggccttgtccctgaccagcctccgaccctccatcccctttatcccagcccttccgcttggaaatggggatgagtgacctgggggcgcctttaggggcgcgccatctggatttaataattacccccttacttttgtttttgagcagaggtgggtaacgtttaggggttctctcttcctcttccctccgtgaccctcctaactggggacgagcgaaccctaaggcctgtcttatataccctcaataggagaacgataacattccgcccctcccccagtttcttcagcttcctctcctggagggggaagagcagaagaaagcaaggaaggcacaggttttcttactttctgctccatcgtctcatcctgccccgagagcttcaagtgcacactcactgcacatctttgtgatgccctacaacgtcgtcccccatatcctgatgacacagactgccttttttttttattgccgtttgcagtggaaaccgtggttctgaaatatcttccccttccttgataattgcagtctcttccccccccccttttttttttgccagcggtctgaggatgtgatgcattctcgagtgagaatgttggggagtaaaggggagaagggtgaaaggaaagtgagaaactgcttcagagccaccgacaacagagcaaagccagctgggatgtggtcctggagcggatcattctgctagtgtttgtggttgtttttgactctctcctggttgacaagagaactttcattgagaatatttgggatgaaaaaaaagttttgtagcttgaggaggtgactttttatcgcctgagtttcacacaat

SEQ ID NO: 1887091 - DNA, 4001 bp, Homo sapiens
cctgatcccataaactcagttacttcctccctgcagtatcagcatcattcatagcactgtcatagcccttttcatcctgaagttaataattccctatgtctgtcacccctactagctatctgtgtacctaccatgtatctccatgtatctgttaatactttcctatgtctgtcatccccaggtgctatctgtgtatctcctatggccagcccatgatgattcagtgagtgtctgctgaaagaccgaataattaaactttttcaacttctgtcctgatggtaagtataagaggagggatgaagattaggctgtaaggccaggcgcagtggctcacacctgtaatcccagcactttgggagcctcaagcagggggatcacgaggtcaggagatcaagaccatcctggctaaccggtgaaaccccgcctctactaaaaataaaaaaaattagccgtgcgtggtggcacgcgcctgtggtcgcagctactcgggaggctgaggcaggagaatggcgtgaacccagaaggcggaggttgcagtgggccgagatcacatcactgcactccagcctgggtgacacagcaagactctgtctcaaaaaaaaaaaaaaaaaaaaaaaaaaaagattaggctgtaagaggaactggtaaagtggaacacagcagggcaaatgtgctagtcaactgtcattgcttaccctggaaatttccccaggagcggagtcatcaacttacagaatgttaccaccaaggggactttcaagatctggtcacctgaccaaataccagagacggtaactgctttgcccaaggtcacactgctggttaggggcagggctggggctagagtccacgtagctctggaaaaagtttgggcagatgctatctcatcccatgaacttcttcccttcctacccattctgtctccccaaaggaggtccctgatgccctaacatggtcagggaactacctgggctcactcacagctcttacagcatttgctgggaccttggccaggtggagttaccaaaatcctgtagactggaggcagggggatccaactatcaccatattagagattggcaaactgaggcagctagctaaccgcagagggcaagatttgatattgagtactgtgttcctcctgtagaaagacctgagaagcccaaactcccacatatgcagagtcactattcacaataatcatgactgctgacttcctaatgtcagggaaatcccctcactcccaccagttcctcctgaaacagagcctccctccatcttgcacagggtgtctgacttaggaaacaaactgtacacccaccctcctaagccacccaggcctactagatagatcacctccgagtcataccctttaatggggaaatcacccttctttgtgccaggcacttgacatcgtcactgctcacatcagccctaaggttagtactacagtctgcgatggggaaacggagggtcccagataagtcactactaatccatggtcaaagcaagaaagtggcagggctgggactcgaacttaggtttgcctgactccagcgggtccccgcccaggcgggaggccctcccagctgaagcctttcgctgactagattacctgggggaaaatgacttaacctcttcgaacccccagaaggtcagaagctttgcttttgggggagaaaatggtgtgcaaacgagacgcgaaggaaacgcaaaccctcgggcgtcggcgcagcctcttccccgagcctgggtctgtctaatggcccagagggagaggtcgcacccccgacccctggcacctgcgaaaccaagcgcccggtcggctggcagaaacgaaacctcaacaccctccagcctcccccgcttggttcccggaaccggcgagccaggcttcgcggaaacttgcccggcggcagccgcctagggccccgggatcgccctgaccgcagcccgcagctccgggccgggaggtgcgggccggcgcggtcgggcccgagcagcagcgcgacgcgcgcttccgccccgctcggctccggcggcggccgcggcggccccacaatccccttctggctccggggacgggcggggcggggcgagcgggcggaaataattttctgtttggtcgtctctgccccagtcccttcgccgcgggacgcgcgagacgggagaaggtgcgggaagcgggaagcaggagcgggagcgcgcggccctggcacgcatagggcggcggagagggcacgagcagggattgagcacctactgtgtgccttcacgctttacaaaaggattttcgttcgatgttcactacagcccctgcccgggggtactgatgccccatttacagagggacaagccggatttcggagaggtgaagtcactcgccgaaagtcgcaccgccagggtctgcgtgacaccctaaagcagtgttcagttaccccggggagagcgcgatgaacttgaaccacttgttggctggttcctgctcttgctcgttttttgcggatcgacacatagtgggcgctcaggaaaataaatgttggaagcttgagattgaacttgacagctcgaccctaggtacccgccacgaatccagcccagcccgcggggcaccgggtttctccagacctcgcagggaacatttgcggatgggctggtagaggaggctcggacatcccagttccgcacccgcactcgaccaacgcgtggtagcggaacccctgtcgtagcgaggcacagactgggttcaagtcccgactctgccgatttcagcctgagtgactttgagcgagtcactttttcccgtcgaaacctcagttgctccatccacaaaatgggaaatatgaacagccaccctaaaacggtgtggggaggattaaacgaaacaacgttcccaaaactctaaacttacaaatgttgtctcccgtccatcccataaacttaggcgacaaacctggcgcagggtgacctgagacaaaggcttcccggcccctgtctccaagtcgtccatccctggggcgtaggcacgttttagtgagccctgtccggcgaaacccgaaactgcggccaccttggcagcggtgggccccaaaaggaaatattcaaatattctgaaactcgtgcatgatttaggactgacatttttacgtttaattttcttgcagttttattcttgctagtaaaggtaattcgttagaaacccttaagtgcagtttctcctctgtgtcttgtttaacttttcgtgttagcgaaattcacaaatttgaccaaggaaccggagcgcggccgtcctcgccgggattccggtcatcgcaataatctggctctcggcccctactcccaggcacggaggtcgaagagacgggcttcccctacaccgccctgtgtagatgtagcctcttcgtcccggcagccctccgagattccctgtgtccaccggagcgaggagaggtgtggggctgcagcccagaactcagcttcctggacctccccaaactcccgcctctccgggattaagggagtaaatccctgacgccaaagaccaggtcaaggacaagttctcccccgccctactcccccctcctgggcggggattcatctcccttccggatgaaaggtactaaagagccgacggggggccgcggcgggccccaggcccttgatgttccggttgaacaggtgctggtgaaaaggaggcggacccggcggaagagtctgccagggggcagtgcgccgaaggggaggcggcctcctccacccccagtcccccggcccgtcttcccttctcctctctgtttgcccctcccccgcaggaagcgttcccggccgcgaggtctttgaagtgtcgttgaagcccccagggctgccttctcccctacgccacccgaactcccgctgtggggggcgggtgacctttagtccccacgagtcgtccccctttaggaagtttttgggggtcagatctcacccccccttgcccacacaggttgggaagaagactt

SEQ ID NO: 1887092 - DNA, 4001 bp, Homo sapiens
cttatgatgcctccatagccctcacttcagaggcgtcctgtccccacaaaagagagtcacagaatgggacccaggagcccggcttctgggcccagctatgccatagacccctcagcatgtgacctgtggcgagtcagagctgaggttccaagggacacacatggctccaacagtctccaatctagcccttctcctgtcctgagcagggtgaggtgtccctgctgcctgttgtcttgtgacaacagaggctgattttctctgtacaacctcaatgcctaaagaccaccaatagtttttatttttatttatctattttctttttttgagaagagagcttagggcccagcttctctgtcaacggagcttctggggtcagggggtttctggatagtctaggccctctgctggttcccatcccgaggctggggctaaagaaggatggaatgaggacctggactttccccagcccagcgatgactcccgactctgctgggcctcaaaccagaagaaatggtacagggccagagacaaaatcaaggacaggggaaggggcagagtctaaaataagaatacagagacaataagaaactttgtgagaatggctaggatacatggaatgggccgtccacctgtgactggaacaaggctgctggactcgaagcctgacgtaggctgccaccacccagatgcgtggcctgtgtgactgaccagcaggtgcctgagggaagagcagccagtgcctgcatggaaacacacatgcagacacagcggcccagagagcccaaaacattcagacacagacacgctgtcgccgacacaccccgcagtcctgtacacacacctagaggaggcctatctacactcctggacacacctgcgtcctccccaagagacacagggagggtcacctgggaatctggggccagtgcttgacagggtgactggaaggagctgggggtggattcagaacataagtacctctgtgagagtggcctggctcccactcctgcctccaaagccacctgttgcctgagttccccaggatgagaaaaaccaaacccttgatgtctttgtggagagaggagttcaagttgatacttcaaactccgcctccttggcggccgatccaggttcaagcaggctgtcactgggcaaccttggctcacttggacttgctgtcaaaagtcccccacggccctccctggttctgacattcagattcttgctcagaggaagtagggggcgggggcggcaggaacaaggtgggaacagcccttcatcaggatagagggatctgggcttggaatcctggagggctccaggctcatggtccctcactgccacccccaccttaccgacctgggggacaaccatctctgtgtgccaagctgaggctgtgggtaggcaaaggtgagccggcagagaaaaggacacaggacctgtccttgggcactcccagcctgataggcagtgtgtacgagtgtgtgtgtcagtgcaagtgagtgtcttgtacccaaagcaggggcagagcttcaggtctgatggggacacttggttcctacttctagtgagcactgaatctgagggtgaagtagacacacacatctacatttaacatagtaacggcaacaggcacaaggccatcccaggtggcagttgccagggcccaaggggctgggatgttggatgctgtagtagcaaccttagagtcacaggagtcccatcagagaaggcttcctggagaatgtgagtacaggtggaagagggtttagaaggagagattgggcaaggaggagaaacagggagaaaattgtcttttgaaggcctaatgcctgtaaggagagcaggcccagagggtggaagaaatgacacaagctcattgtccgcacatgaaggcagaaaagaaaaccaacccttccctgccatctgcatgggcctggggccctcactcacaggcaggcaagcagccagtgggagatggcagcccagataacctgccttacaaagagccaacaagagagaagccacagacttaaccactcacaaacaggaagtccagaaggcagagcagacccgccctccagtaagctacagttggggacaggcctggccacaaaggagggaaactgagcccctagcattgcaaaatggggctaaagcaaattggagtcaatagtcccaaatgttgagacccttccccatctccctggaggggcagccaagggaagcaggtgccaagagaggcaagtgccttaagaacctaagacagcccatgtcccctacagagatcatctcagcacctcagaagatctgtctcatctcagagccttgggagcacaaggagtgctaaagggcctccaggcaaggagggcgggcaaactggctgcccctcagcccctgcctgctcgtaccagactcccctaggtttaatttcatactctcctgctctactctgtctggcaaggggcagctccaatgcacagtggcccacactaggaggtcacttcgcactggggcagggttctggctcagatctcctgggatcataagacccaaggacttttaagcagcaaggttaggcagcaactggtcccgagtcaggaaacagagctgcaagcccagagagaggcagaaggcagcctgaggtcacaaaacaagttagggccaagttgggttctttccacaacatctgggaaaaggcaggacgggctgggtggaaagggggtgtgggtgtgaggaaggctaccctgaccactgctgtgggagtggccgtgaaaccagaagctttctcctctgggatcttctggggacacaagtggagagatgaaagctccctctggactctctccacacacaggtgctgggtttaacttgcatagctgcacctgctccagttccaactgctgcaaataaattgtgtgtgtatgtgtggcggggacagggagggggtccaagagctggttttctgcctggaacccactacaatccctcatcagccccactccctatcccaacatcaggatcaccaagcagaggataaaattaagtgtcaagaaactaggggtctaatcctcaccctgtgattatttatggtacaattctgggccagtcactgaatctgcccctaaaccccagcctgtttcttcacctataaaaatggggagggagttgaccaaaagacttgtttgtgctctaggaagtccccaagagcacaggagcccagagacctcgcaggaggaagcagcagtatctgtgttccaaatcctgcccagcccccaggcagccatggtatcttctcagctggctcgagggcacacctcccaaaatgcagagaaggcagggtggctaggaatggctctagtagaattctccccttatcttgtctggaaacaaggggcaaagagctatctatttcctcctgccagcctcctgcccccaacaggattcctcacatcccaggaccagctggaaaaggtggtgagagttggaaagagactgctcagtgaggactgccctgcgaaccagcttggattcatcccgttcacctccacgttctgcactcggggccgagggaagggaggcagcccaggcagctagagaacttgatgaaacacactcaatctgaatctcgcttgatcgtcatgctgacccagtgaggtaagtgatggtatccccatctcagagatgaggaaccggaaactcagcgaggttaagtttcaccttcctgaaaatcgggcaccccgtttctgttccccagagggagctcaattcaaagtccccaaagaacaggtcttctgtgaagacctgttctcccctcacaaccccgttggaaaaagcagtgggagcgacccagggcggaccctctggcccaggcttgtgggttggggggcagaggggcctaactgggtggccaggtggcccgcagagtctctccagcagcagatggcctccccagccctttccttcagagcctattaagcagtcaaatgggggagggttgg

SEQ ID NO: 1887093 - DNA, 4001 bp, Homo sapiens
agcttctgtcctttagtgtatgtacacccacaatgctgcagagaagagaatcagcatactgttgggacacagcaggtaccactgccttctgaagtttctagaggtgctatgccttcattgttttcctgcacatgaacattaacatccacatcaggatctggaaacctttacagaagctgaagttttaaaaagaaaatgaatgggattttattcaagataaggaaaggataagagtgaatcatcaaatgaaaccatgaggccacttcacaaatattttatcaaaaaactcacctgagaaaactcaaagaatcacagtaataagctgtctatgccatattttttttttccttttttgaaaatgccaagaagctactactaagaatgtattcaagagacggaagttccaagattcatcacagggtcaggtgggctcaacttagtttcctgggccctctataacacttcatgttcagaattgtctccaaataaaagcaatttaagggaacattcaatatgggtgtctttgctgtgcttgcagtcttaattctgtggacactgatattctatcaatggaaaattgagcctttagtgaacttgaataccctgttccccaatcactgcccagagagcagtttctgagcagccaacatgtcagaggcaggaaaacagcagctaaaaggcaaaggagaaaaatggaagacacctgcctttacacgtgtattttaagctaaataaccatgataaaatatcaccaacacccattttttgtaacttcttaattgtcccacatcaaagataagtatggacaactgtaattggttcttatatatccctaaattcctaattgaaatcaattccaataaatcgttggtgctcagtagaaaaatgcaaaatttaaatatatatattcagtagaagttaccttcataacttgtggggcattatcaaaatataattggaaacccctctttgtaaccaactaaccaaatgatcttttcttaaaggcacaaattaaaaggtggcaaaacaaccatatatttagtgtgtgggatcacattctcctaaagagcatcaggaaatgtaggtagaagtcaatgttgtagcctaggttagaaggccctgcttgctgggagttaactctggttattggattgtggggaggtgtggcagggaaggtggtcaggggaacacgggcactccagaagctcggagcagcagctcatcagctgtgaggcaccgtcagcatccttgcgtcctgtgtggctgtgaggcactgtcagcatcctcgcgtcctgtgcggctgtgaggcactgtcagcatcctcgcgtcctgtgcggctgtgaggcactgtcagcatcctcgcgtcctgtgcggctgtgaggcactgtcagcatcctcgcgtcctgtgcggctgtgaggcactgtcagcatcctcgcgtcctgtgcggctgtgaggcaccgtcagcatcctcgcgtcctgtgcggctgtgaggcactgtcagcatcctcgcgtcctgtgcggctgtgaggcactgtcagcatcctcgcgtcctgtgcggctgtgaggcactgtcagcatcctcgcgtcctgtgtggctgtgaggcaccgtcagcatcctcgcgtcctgtgcggctgtgaggcaccgtcagcatcctcgcgtcctgtgtggctgtgaggcaccgtcagcatcctcgcgtcctgtgtggctgtgaggcaccgtcagcatcctcggtcctgtgcggctgtgaggcaccgtcagcatcctcgcgtcctgtgtggctgtgaggcaccgtcagcatcctcggtcctgtgcggctgtgaggcaccgtcagcatcctcgcgtcctgtgtggctgtgaggcactgtcagcatcctcgcgtcctgtgtggctgtgaggcaccgtcagcatcctcgcgtcctgtgtggctgtgaggcaccgtcagcatcctcggtcctgtgcggctgtgaggcactgtcagcatcctcgcatcctgtgcagctgggccaggacaaactggctgaactgcagctctgcttgcagcttgctagaaatacaacttggtaacaacaggagattgtggacacactatttttcgttagtttattacaaaactacagatacaatacacaaaattctaattccgaaatccttctacattttttttttctgagactaaatgccctcaaagcccgtctgcttggcctgtattacaacctgactcctcggctcctggatgcacaggtcagatgttccaacaaccctgaccatggccagtgctatggagtcactccaaaggtggttgagccctctgtgaaaatttaaatggctgctaagtcattctaaataaatagtgaacggattgtttctgcccctaagatgaaatcccacagatcttatgctcaagctcaggtcttcctactgccgccttcgacatctagaaagtatggtgggatcttcactgatttgttaaccctgggagtgccccttgtgatccagatgagtcaaaacaaacggccaggatctcttctaaaaagcccatgatggcccttctggctgtgtctccagttggtgcctggatgctgcccatgtgtttaagggccattctgaccatctggtctctttcctgtgggctgtggggtgctccagtgtcatctccctctgctcctgattttaaaaactgtagaatataggactggaccatattcccactcagttcaagggtttctttcatacaagggaggtccgaggcactggccaagctcaagaggtgaatcagtgcctggcagatttgggtccgtaggctgacacagtacttgaattccaaaaagtctatggtgtcttcactcttctgtaaagcggtgaccaatgcattccagatccgagcatactggtcaacagacccgtactgctctctcttccccgggacggaaagggcagctgcagatctgatgcgcactttgaagttcttgcatgatgtcacgaccgatgtcagggcattgtaggcctgggaggtccatggggctgtccctagaaagaatccacagtcactaaaacaaatgcaggcttagaactaggtggggtgagagggagaggggtggaaggaagcttaaacactagtgctcaagacactcattttatgtgttcacttcattctcacaatcatcctgtaagacaagggtggtgactgactgtaggatcctaggtaagtggccaggtgccaatccccaaacctccctctttccctacctcagcctgccacacgcttagagcctctgctacccaatataaagcctttggtgactcagaaaaaggcttcttctctgggaggattctgtcccgttggggtatggctttgtgggcagagcgtggactgaactgcaaccccacctatcctctcagctgggcacttctgagctgtgtgcaagccacacactgcatgctcacctgcaacagcatccagacactgctctggccatagccagtcatgcattttattgcaaagaaaaagaaaacttacaatttcaagaataagatgcccagatttctatcttttctccacacctgtaggccctaggaaatcagcctgctttcctccttaccagagctactgctacccactccactttggggtgtccttactcaagatgggtgacagagtagaatgcagcttctcttaactctcccagcccttcctggcttctctgttgcctctgaagaccggcaagcaggccctttccatttggtggatgccagtgccattgacaatgggccactgctagagctatgagacactcacaatccgacccgtcagagtcctttatcagtttctagctcccttttcttatgtggctcttgatagctctgctactggatgctttctagttctcaaacttcctgcctctttggagcttccctttccctccaagtcatgcaggtaaacttctctctctagtaggctgagggcaagggccatacaggaaggctggtaggagccaacca

SEQ ID NO: 1887094 - DNA, 4001 bp, Homo sapiens
acagtcattttctttccagctttgctgattattagaaactaaagccacccggagaaaaaaggtatggatatacatttatccatttaagtatgattcgtggaaacaggagtccgggcgcagtggctcacgcctgtaatcccagctcttgggaggctgaggagggtggatcgtgaggtcaggagttcgagaccagcctgaccaacatggtgaaaccacgtctctactaaaactacaaaaatcaggtgggcgtggtggcacacacctgtaatcccagctactcaggaggctgaggcaggagaattgcttgaacctgggaggcagaggttgcagtgagccgaaatcacaccactgcactccagcctgggcaacagagcaagactctgcctcaaaaaaaaaaaaaaaaaaaaaaaaaaaaggctgtctctcttacttcgtagtcatgcaggtatgtttcactttttccagattggtacaacggaggaaaagcaacacaggaaatgaggaagaataaaaaatgtttatacaatgaaaaaaagcagaagaaaacaaaacaaacaaaacccaacagtgaatgtgatgtagtcttgtaggctactgtcctagttcctcttgttaccaacttgctgagtaactttgtgcaagttacttagcttctctgggtttcggtttcctcttttgtaaattaagcagtttggatgatatcatctcccaactccaccagtacacacttattctgaagctcatgatatacatctattatttaaaatccagtgctgtgaactctatttcttcagtcagatcacacttgagtattgtgaggctaacataaaccaagtaacttgcgtttaatcataggattaaagcaatatactacaacttttatttgtccttttgtaatttttcattttcaaacgcccctagtggctaaacgatttagcctgtttaggaaaaaccagtttctcaactctgtgatgtggcttctgatgtgagggaacttggagctaaataaaataagtatgtgtcactcaaacattaacgattttccattagccccaccacccttcatccctaaggttatttggaatgtgtttctttaatgagataatcatttgttaatataatcccatctaagaaaatataaatcaaaaccagtggatttgaaatagattcaatatgaaaaaccaaattaaatgacaacggttaaaatatctacggagaacattctaaaactcacagaaacaaatgcctaggtctggggcatctggcttattttataaagtgaagaactttgcttgactggtgggaagcagagaggggaaagataatgtcccaagtaaaaaggctgacgtccagacaagaaaactagagtggataaatacgggcacgccctactcaaacccaggcctttcctctggaccctgtgatgcttctcaacactggcaacttgtcagtgtacctcagagactattctaggcggagattaaattcgtccttggcccttaatgtactggaaacaagttggtcaggccaggtgtcaggctgagaaagcacacaagtcgtggagttccaggtgtcgagtttggcaaaggtaaatgaagcgcctcggcaaaggcgcgggaactgtagcgtgcggtgtacctcctccttagcaaagctttctcaatgcctcttaggttagacccgccgcagggatgaaggggttgctggcggattgcaggtgcctgcagcacagggcccagaactaagaaccgacaacacagattcttaagccctgcttggagcactgctctgagctggcattagaaccgaacctagctgtactaagtataaaggcaaagtagttatgacactgttggcagtgaaattatacttggaactctttcgcagaaatcgctagggcctccctagctctgggccccttctcctccaggcgctccagtttcatggaaaggcttccctatgaaactgaaaacgcgctggtaagaaggagaaatgcgaccggactgcaattcccagaagccgtcgcaggccctcagcatccgggacactagcagcaaggatccctgggtattgtggtcctgtgctttgccagcaaccctctgccgacggtaaaattccagccggacatagaaccacaactcccagcaacccctgctgccgtgtggggggtcttcacgttctcgtggcgcggcgcaggcgcactgggtcctcggcgcggaccgcgcagactgaataataaaaggggagcggcgaagaggcaggaagacaagaccatgtcgaagggccccgggcccggcggctccgcagcttcctcggcgcccccggccgctaccgctcaggtgctgcaggcacagcccgagaaaccgcagcactacacgtacgtagagcccccccccccccgccgcgcgcgcacgcctgacgtcagcggccagcgtgagtcacgcgcgcagggagagcgcgaggcggcctcttcctcccccccttcctcctccggcccggcccagaccggttccaacctgctggggccggtcccaactgcctccaactgccaccaacctctggtcgggctgtggggcgggaaactcggtcccggccgccgagtggggaaggcgggagctcgggatgcagagtgcactctccctaggccaggccttcgaggcctaactgttcctcagaccataaaaccacagtagtaggctcctttggggcagtgagaagtccaagacacaaccaagaggagttccgtggggtccagccccagaacccacctatgaatgatgattaacgtgaagtcctgtcaggagattccgtgcagtttgcgcaggaagccttttgtgtccctaaggctcgtaggttgtccacgagggccacacttgcttgaattcacagtcgacgtagataaacatgcaaagatggaaacgtgtccgtgcgtgcccatgaccgtttccctcgcgggctgtgcggagcctgagtctgggagcccgaaggtgatgggttccaagtatgtctgcaggctcagcagaaatgtagcattagagggagccccaaatactgacactacaggagtccagcaggatgggaaaacctcttcctggaagtcttgcatctgtgtgcttttaggtcgctgtcttcatttccttcaagccacgttaagcattccctagagttaggtgatgtgggagaaagatgaataaggggcggtttctcctgttaagcaaaatgttgctttccattttccctgatgctctgtgaatgcctctcatccccatgggctcctgagtgatgtgcatgtttaaaaggatccccagctgcgagaggttttggaacctggggggttgaacagctcttaagttgttcagtgaacgaagaacagaatcatctgttggagtagaaagaactcaaaccagtcaggaggaactcttgttatagaagaccttgggaaactgttctggggttggggaacattggttataggaagtgtatggtttctttgtgggattctttgttgttggctgaaatcatttaagcttcttgactacagtctgactcacgttaaccattccttttctgatatggacattgctttcctggtcctttcttactggagatctttcgcagtctttccattgattttggtgagatgttcttagctcaaagactactgatgagttgaatggtgtagtcttgattttcgaatctggaaacttcacgtaattggaacttctttataatctctggttgctcagatcactgtttttagcaaaataaacacattttgagtcacgagagtcttggcttcagcaacttgtgtttctgtgttgtgttgtcattgagcatactatggaatctgtaatagaaaggctttcttattttggaattgacaggtgaaacaagtgaacagctgattaaatgtcagtatctgagtctttgtcctcttgatgctcatttgtttaaaacctgtctttcctgccgggcgtggtagctctcacgcctgtaatcac

SEQ ID NO: 1887095 - DNA, 4001 bp, Homo sapiens
aacatacaaaaattaggcgggtgtggtggcgcacctgtggtcccagctactggggaggctgaggtgggaggaacactgaggctggaaggttgaggctgtggtgagctgggatcgtgccgccgcactccagcctgggtgatgaagcaagaccctgtctcaaaaatagcaataataataacaataataataataacaataatggcagcgagcactccggaggcgctcactctgagctgaagagggttctgagggctttgacccagtgaattgctgcaggaccctatgaggtgggaacttctctgttgccttttcccagctgaaggaaccgaagctcagacacggtgagtgacttacccaaggtcacccagccactaagaggccaaggggacaagagaactgagtgtaaggaggaaatcaggaagagactgacaggaagtgagcaggggacagtgcgcagctgtcctcgtgatgggcccagccttgaaggcagcgttccggctcccagagctggcagcaggaagacattgctggagggagcaagaggtggggcgggcaggagggccacctgagccctgagccctgagccctcagcgggctccttggagagtgacctggaccttaacattgaccctggcaccccgcctgctgttccccatgacgccccacgcccccaccctgcgtctgctcctgtgacttgaggaaacggaccgacctcctttaaaggaggggttcctgagcctggggagcgtgacttccgagcctgtccgaaaacaccaaacgccaaagacaccgaagctgttccacagaagccgcagccgatcgaaagccattgctgcacgggattttctttggaattggtttttggttcaggtattttttggattagcatcatcaacactagaactcaacatgagaaatcctcctggcaccctcagacccccaggatccacccgcagcgccccacccctcgggggtctaaggacggggccacgggaggtgctccccacgccttagctagacgcaaggccctcccgcaggctcccgcaagcccatcagggctgggcgtttcccaccccttcccaccccacccatccaccttccgtccaagcaggagtgcagcctgcttgggctcagcgtcccctcttctgagaagcagcccggccccatcctgagcgcccctgggcccacaatccctcctcacgtgtgtggggctggccgttgatgtcgcctgggctgggggtgcacctgcagcgcaaacacgtgactaagcatcttcctgtcccgggccctatcagcgttgggccccaggcagcccctccaggggctacagtcacccacccacctacaaagcccctcatctgcagcggtggcttcattcccgggacgcgccccaggctctgctcagtcatggcccccagaccctcaggagcccccgaaacatgatgacctccagccacgtgccagctgccaggaggaggcttcaagaccccagatgagcacccggctggccatgccccagggacagaggacccagtgtgacagaatccggcctgggccacagccacccacacagtccatcccagttcagcccgaggtggacaagaaaagtcccaccagggactggagcagatggggcgggctccggacccctgcctggtccaccatctgtcttgccagtcggtccgtctacccaggcagcccctcctcccggcccaccatctgcccggccctgctaggccctcctcctggctcctccagggccctcaggaggagacagagctggagccagggcccagacctccactgccttgggcccgccccatctggcacctccagaagaagggggcggcaagagcttggccagggcaggggcactccagggcagccgaaggcccttgccagctgtctcatgatgagatgagcagagggagggggaggggaggaagggagaggctctgggaagacaagggcccctccgctcctcctcccttcttcctcccctgcccacgtggcctgggcgggagggacacgccgatgggaacatcccagctggtccaggcctctgctccccccagctcctcctccctggcgggcagctcttctgggctcctgaggtgctgcgcagccccttccctggccctgggacccccagtgcctgagatgaaagaggagttgcttccatggacggtcccagtgcaagctggggggcgctggcctcaggacaccaggcatccaagacatagggacaccagaagccccggctctgcctctgaggtccagcagccccaaagcccctgctcagaagccagcgatgggagggcagggcctgcctgtgggacccatcatgggcgcagcaatcgccaggccctgggcagacagcagcacagcctgtgagtccagggctggggtaagtcggcaagtgcacccccggaggtggaatgacaggagctcctgtggaggacgcaggcgacccccgcccctcactccactgtgaggcctgaggatgtacaggggcagctctccctggcttatgaaacgcccccaccctgctgcccctctgggtcctcctcaccctgtggcctgcagggtcaggagcatgactttggtgtcaggagagaggctggctcctgcctgtggcgggtgttgggggaggagtggggttcattataaattacgctcccctcgaacccggctgttaggtgagggcagggctgggattcaccctgctctctgcaggggagggtcagcccccaggtgctcctgggtgggtctccacggcaggccaaaagggcaggccctgggcatgtccaccccctgtctctggtcccacagccccctacttgccacctgccctgagcagcccccaggagagcacccgcagggaggatgctgaggtgctggagggcaggagtcccagctgaggctgtgaccccagctgtgctccccgttccctcttaggaccagcaaagacccaaggacaggcggccaatcagggcccggtgtttacccctcctcccccacccccatcacgggcctcccgcaggacccccaggaagagcagcttccattgaccaaggtcgggggacgccctcccgctgacactcactctccacggatcctggagcccacgagtcccctccccacctccactgcactgggccccccgcaggccctggtgggggtggccacggataaccacacaaacatgcattttccttgtaggagcaggcaggtgacaaccagtgtcctactttcctgcattaaaacacccaaatcaacaggacggagaaggcccggaagaggggacctgagggagccagccgggcgctcagcctgcttcgctgggatgcttgtcgaggtcgggacggcaccaccaaactcacctctgtgcgccctgcggggcccaggagactcggtcctccctgggctcccccaggcctggggtggacgttggaataaagtggggacaacacgatgagagaccccagccctggaggtgccctcggccaaagcccgagatcaaagctgggagattcgtggctggacagcaccacctggtggacacgttggagattaccaaagccgaacagtcaattcgttcttggttctgggattttcttaattgggtcttagctgggccttcctttctctttccccagtagcaggggctttgtgactatcagaaacacctgccaggcctgggcaatatggcgagacctcatctctacaaaaaaaaaaaaaaaaacacaaaaattagtgaggcgtggtggtcccagatactcaggacactgagatgggaggatcgcttgaacccgggaggtcgaagctgcagtgagtcgtgatcatgccactgcactccagtcagggtgacagagagagaccctgtctctaaagaaagaaaaggccgggagcagtagctcacgcctgtaatcctaatactttgggaggccgaggcgggaggattacctgaggtcgggagttcgagaccagcctgaccaaca

SEQ ID NO: 1887096 - DNA, 4001 bp, Homo sapiens
ccggggctctgaggagccggcctggggtcctagcgcgatgctggggacaggagctggtcccgctggggctggggaggggggaccacggtggattcagaagaatgggccgaaagatgcatgagggggatgggagtggggagaaaaggaaggttattaaaaaaaaaaaaaactcttgagttacaatcaataaaattactcgcttaattagcatggttattcggttaagcggaatgcagtaaaagctggacctcggcatgaggtggggagagggggagagctagtgtggaccccaggccttttcctccgagacacctttgggcagcgggggaggggagagggtgtgcgtgtgagtgtgtgtgtgtgtgtgtgtgtgtgcgagtgtgcgtgatggcttcgcagatttgggtttttatcacccagcagagccagcagcctcttcgccgcggcgccctagctgcagggacccgcggggacgagaacgggaggcggcgagcagtgcggctgggttcccccggctgccccgggccaagcgtggccgggacggtgcgtgcgcgcgcggggccccgggtgctgggctgcgcgcgcgtgcggcggggagacaccgagcgccccggccccgccacccggcctggccgccgctcgctcgggccggcgggggtggggggtggggggagtgggtgagcgggcggggcggggacccccgggcgagccgagccccccagtcacccgtgtctcctctgcttttgcctccacagaccatggacccgcacagcggccgctggctcggtgcgcggccgcccgccgagaagcccagtcctcccgcgtgctgaccggccccgccgccaccaccgcctgtgaccccggacgccgccgcctctgcgccgcccgcgcgccgagccgcccccgggccccggccgcgctgctccgaggaagcggcggcggaccggggccggggcccggcatggatggccgcgactttgcgccgccgccgcatctgctgtcggagcgcgggagcctgggccaccgcagcgccgctgccgccgcgcgtctcgccccggctgggcccgccgcgcagccccccgcacacttccagccgggaaagtacttcccgtcgccgttgcccatggcttcgcacacaggtcagtgctcggccggggcgggcgcgggacgggagcgttcgagagcggaacagggcgcccacccctccgctcccgggagcagagaagctttggtttcatttcccggccccggccgcggtggctgcctgggcgctgagcggggccgcgcgtcccgccagccccccaagctgcgtcgccgcggcttagagaggcccttccctggccaccctcccccgggggtctcggaggggcagccccggagccggctgaaattaaagcctttccgcgcctcgccaccctcccccgccccctcctgcagatctaaattccacggaaacctcttttctgcattctgcattcacctccctaagacgttccggggctgggacaacgaggcgctttctgcggaaacaaaacggctgttgtggcggggggaggggaccagggtacgccgcggcctcgcggattagagtggtgtgtgcgccgggcgagcgttaatagggactgctggtgtaagacgagcaaatcctgtttctatataaagccttaaagtgtcagggcgagaatgggtttgcagggatgcatttgccttaacgagtgcctctggtatcccgctaaagccggacaaagcgtggccagagtgcggcccagcctctcagcctgcggcccggggaggagggcagcgcgggcgcgggctgggggtggcgcggggcggcgctcaggatttcggtgcaggcgagagtgcggcggatttgctccaagaggagagcgaggcggatttgctccaagaggagagcgtggggcgccgtgctgggcctcgcagggacggatcctctcgggcggtcccctctgactccctgcccgagaggatcagtccttggcagagcgggcccaggcctccagggcagccctcttcccggtggctttgatatgagtgtcgagggaggtcagggtaggggcagctaccacgcctgaagccctagaggtcaccaggcggcgcgggtagattcgggggaagcgcgcagggctgcgctagggacccgccgggtcaccctggtacatgggtggcttttgtttacagtttgttctaaacatcagaaatgtttgtcgcttttaaaaacaaaattggcagtaacagttattattggtagcttgatgaactgtgaatactaataaaattatatctgctttaatgggattacaattagtgtgtggattaaaacggatggcagagacggggctagaaaggaaaacgtcggaaaaagggagggcactcaaagaaaaacgtacattttctagaaaaaaacaaacttgaaattgcttaattgctaacgggcttccagcatttgcagcgccaggagattggaatgggggagccgcccagtggaggggtctccccagcacttcccgggttggcccacacccgcttccctccctgcctgggcctttggcgaggctgcccttttctctctgttgcccttccttctttttctccctttcttttttctcctctagatttgtaactggaaagagaaggagaaaaagcacttgcctgagcgatgggtgatttaaaaatatctcttctgctgtccctgtggttatcaagcttgtcttcctgcccctgcatgggagctgctgcccacccggctcaggtgcacggggcgctgaggctggggccgccctggcagaagggacagctcgccagcctccccaccagcccctcttctggctgaaggctggtggcccccactgggggtagggggattgtgtgcaccccacctccactgtaccgtgccctccagcctggcaagtaacagcacgacagagacaggggcccctgacactgaggcttgcatgttggtgcacaggcaggctggggctgtcccctccgggaggcaaggccaaattccccatcaggtcaggtcagcactctccctgaccccatgccccagctcacatcctggccaggtccaggccagctgcattctcccccttctgcccttacttccaggtctaggcagcacccgggtaggtgggcgcctggtcgggtggcctagccctttgtcttgctcattctaagtttggccacgtggttcttggcgtgtaggccccggagggctgtgagaaacggctctgggctctggcctggcctgtgtcctccctgcttcttcttgatcccaggtcctcccagcctccccaagcgcagggtgctctagagggcgctggaggcccctcggggctgcctctttcagggtctgaagggtcatgtgtccccgtccctggaggccccatttcctcccccctgcggaccgaagagaacgcttgtgctcggagatgttcaacccatttgtgatgggcaacttggtcatgcagacatccagctagaagcatctgtagctgaaagaaagccttttgaaattgttaagagccagaatattgtattggtttttaaaatttagctgcatgtatttttttaaaaaaagaattataccccagatcactttgctttggtctgtgtctatatatgatctagtttagagagaaaaaagcataattacgttaaacaatttttttgcgtcttgtgtgcggacttccacatggctggtttggctgccttgcttcccattttcctggatggcttcagtccgcaggccacagctgcagccagcccgcccctccctctgctgactgccccttggaaaggaaaattgacccggattcttcccgcctgtctgggagtagaatccaaccatcggggatggaggccctggcctccatgaggctgcctctttttgctgggctgctcttcctgtgcctgtctggcctggcactgccaccccggctggactgaggctgttcctgctggctgccggggctgccttt

SEQ ID NO: 1887097 - DNA, 4001 bp, Homo sapiens
atagaattgtcacagttggtcagaagttcctaaaatgctgtggtaatccttccaagaatgtgaatttaggttgcctgagatgctgttattgtatttgatgatggaagtcccctggttatttatataaatgtttgaggaccccactgcagtgtttccagggatatggtgaccctgaactagttgatcagtaaatctcaatccacctgtaaatcaccaagctctacctgatgtctctcccagaagagaattaggagatgggcctttcccactactcagttcagggactccactctccacactccatccatcctgagtgagtgtaaaacttcgagaaagtgagaaccctaccaatgggttggggccccgacctggattcttatgaagggactcccagaaccccttcccctcccgtcccctcttctgttagtctctctgatgactcctttcctaacctcttctctcttttcttcagggcccagataaaggccactgtgaaacgcaaggtatatgaagattctggcatcccccttccagctgagtcacccaagaaagggcccaagaaggtggcatctggtgtcttgtcacctcctccagctgcccctcctcccagcagctccagtgtccctgaggccgggggtccccccataaagaaacagaaggctggtgagggctgtggagttgctgcctaggggttaaaggtcccatctgaggtttagtgagagaattgggcctgggtcaaagaagggtcagtctctcttcctgtccctgtggaggttcccagagaggggcagaggggaggggagaggaggcacaaagctttgggaagcttggggctgggggagaggctgtcaggggaacctagaacctagcttatgcccccttcccagatgtgacactcagtgctctgaacgactccgatgccaacagtgacgtggtggatattgaagggctaggagaaactcctccagctaagaaactcaacttcgaccagggtaggagtcctcctcctcccacacagctgacggggttggggagaaagggctcacctggatggcagggcacggtctccgcaggggcccctcccttgtataggggtttcagaagagaaggtgctctcatacacagcgcagggcattggatcagtacgtagcagggtgtttcagggaggtgggagtggccttggaagcacactgggggctcgctccatctcggcccattttacttcctgttccagacagcctgaccctggattctggccttctcatgacctctgctgatcctcctctcctctcctgctgagccttccacctctgacctctcactgttcatgccggacctgtggatctcctgggactccgagcaaggcctgcacgagagagggctgaaaggctgctggggctgccacctcgctattcccgcataagcatctgcccccaacccctttgaccttcatctgatggacatttttatacagaaaacaataaagatttccctctcagcttcgtgctgtctgcttaacattattagcaggagaggcctgttccctcttctctcctcggcccatgggggctcagcccctcctcggtagttttcaccaccctgcctggagcagcacagccaatattggcagactcgcttccctgtgccaatatttctgtgctgctagagccagggaagctgggtgtgggcaacaaagactccactttgttctcttgaggcagaacttactcccagggtctctggccatcagtattcttgaaactgccctggagattttagaggggtgcttacataccccaccctctccttgcccacctggcaagaagtttgtcacaaggccccagatgttttttgtgtcacttctccaggatggcctcccagggccaagcctcggcggtgcctcccccaccctcgctctaacaccacagtgtggtttggacgtggccacagtgccgtacaaaccacagtgtgctgctggggcgggagcaggaccggggtgggttgaaaggaagagagcacatagcagtgctgggaagaccccagcaccacctccaggagcggggggatagagaagccttaaaaggcaaacatggcccccaaaaacgtttgggaggaaccagggacgggctgagcaggcaactggaaggcgacggaccatggggatgagctcacagtgtagtaagattggaccatcttccctctgtaggaactcagctcaggggatccctagggtggggtcagaggcagaagaaatagggaatgactggaggggccaacacactgcctcctgtctcagcaagggcagggacccaaggcttcctgtgtccgtccttcctctccctgggtcagaacccaagagaaaagcaaggagagacagagggccaaggccagcagggttgggagttggcagtccagaggtggtggggccggaacatggttgggagaggggggccggaagtcgccctgggccctgggcctgccacaagatggaggccaaaggcaggaaatggagaccagggggaaggggagcagcagagcccaggaagagggccatctggacctggggggccaggtattcaacccccagtgctgttcccactccccagggcccctgaggacccgagccggcccccacagcaacctccatcagcccatccaccaggccagggcaggcgggcccaccccagagagccacgtttaagctgagacaaacatgcctctccccacccccaactccaggccttccctcagcccttttctcctgtccaggacttgattttttaaaaacacccctcagaaagcaaaatccaagggccaaaactccttttgcaaatcaaaatatgaccccctaaaatccagaagttatcttcctatatcccatcgcatcttttaccaccccctcttccgacacaccccccaaaactcttagcaatctgaaagatccaaggtggtgtatgtaagcagtctttttaggcccccgaagatgccagacccctcccggacacccctatctgccctccatcaaatcttgccaaggcctcctgctcctccaccaccctccatagcccccaaactaacagttgcccccagctcctacctcggcagagcctttgtggggggtgaaagagaaattaaacactatcctaacggctggggatgttggggggctctctggtctcagcctttggtttccgtctggggggctgcagtttaggggtataagagaaagcctctccaatcatccccccaattccaagactgacaaagccaaccccaccccagcacgcacctccaaacctcccccccaaccgccacgtctctcctgaaaacagaggacacttccctccccacttacctcagctactctcccctgagatcctggtcccctattttgaaaagagcaaaatttagggtgcatccctcacatttggggtgcaggagaaaggagccgccccagtcgcatcgctggcctccttcctctcggctggctcagggactggggagtgccctggggagggggcacccccacaagagatctcaggaggggttcctccactcccagtcagaattggggacacccccccaaaacccgtcccagcccatccgtctccaactcggcgggagaggcagctgcaatgccccagtcagattcacccaacactacattcctcaccccatctagaggggtcccggggtccccaaaaaatcccaaaaaaatctaggatgttgggaggacggtcctggactagctccccaaatttggggtcctcagatacccccgttttttcaggaaaattccgtcttttgcctgcctcccgccagccctgctctgtcccgatgccaattttggaagtcactccctccttcctcctccccgtctctccaggccccccccaccgctcgggggctagggtccaggacacctggcttccagaccggggggaatcactcctcaaagggctaggggccaggaggtcaagctcattgcccctgtcttaagg

SEQ ID NO: 1887098 - DNA, 4001 bp, Homo sapiens
tcgcttccctgtgccaatatttctgtgctgctagagccagggaagctgggtgtgggcaacaaagactccactttgttctcttgaggcagaacttactcccagggtctctggccatcagtattcttgaaactgccctggagattttagaggggtgcttacataccccaccctctccttgcccacctggcaagaagtttgtcacaaggccccagatgttttttgtgtcacttctccaggatggcctcccagggccaagcctcggcggtgcctcccccaccctcgctctaacaccacagtgtggtttggacgtggccacagtgccgtacaaaccacagtgtgctgctggggcgggagcaggaccggggtgggttgaaaggaagagagcacatagcagtgctgggaagaccccagcaccacctccaggagcggggggatagagaagccttaaaaggcaaacatggcccccaaaaacgtttgggaggaaccagggacgggctgagcaggcaactggaaggcgacggaccatggggatgagctcacagtgtagtaagattggaccatcttccctctgtaggaactcagctcaggggatccctagggtggggtcagaggcagaagaaatagggaatgactggaggggccaacacactgcctcctgtctcagcaagggcagggacccaaggcttcctgtgtccgtccttcctctccctgggtcagaacccaagagaaaagcaaggagagacagagggccaaggccagcagggttgggagttggcagtccagaggtggtggggccggaacatggttgggagaggggggccggaagtcgccctgggccctgggcctgccacaagatggaggccaaaggcaggaaatggagaccagggggaaggggagcagcagagcccaggaagagggccatctggacctggggggccaggtattcaacccccagtgctgttcccactccccagggcccctgaggacccgagccggcccccacagcaacctccatcagcccatccaccaggccagggcaggcgggcccaccccagagagccacgtttaagctgagacaaacatgcctctccccacccccaactccaggccttccctcagcccttttctcctgtccaggacttgattttttaaaaacacccctcagaaagcaaaatccaagggccaaaactccttttgcaaatcaaaatatgaccccctaaaatccagaagttatcttcctatatcccatcgcatcttttaccaccccctcttccgacacaccccccaaaactcttagcaatctgaaagatccaaggtggtgtatgtaagcagtctttttaggcccccgaagatgccagacccctcccggacacccctatctgccctccatcaaatcttgccaaggcctcctgctcctccaccaccctccatagcccccaaactaacagttgcccccagctcctacctcggcagagcctttgtggggggtgaaagagaaattaaacactatcctaacggctggggatgttggggggctctctggtctcagcctttggtttccgtctggggggctgcagtttaggggtataagagaaagcctctccaatcatccccccaattccaagactgacaaagccaaccccaccccagcacgcacctccaaacctcccccccaaccgccacgtctctcctgaaaacagaggacacttccctccccacttacctcagctactctcccctgagatcctggtcccctattttgaaaagagcaaaatttagggtgcatccctcacatttggggtgcaggagaaaggagccgccccagtcgcatcgctggcctccttcctctcggctggctcagggactggggagtgccctggggagggggcacccccacaagagatctcaggaggggttcctccactcccagtcagaattggggacacccccccaaaacccgtcccagcccatccgtctccaactcggcgggagaggcagctgcaatgccccagtcagattcacccaacactacattcctcaccccatctagaggggtcccggggtccccaaaaaatcccaaaaaaatctaggatgttgggaggacggtcctggactagctccccaaatttggggtcctcagatacccccgttttttcaggaaaattccgtcttttgcctgcctcccgccagccctgctctgtcccgatgccaattttggaagtcactccctccttcctcctccccgtctctccaggccccccccaccgctcgggggctagggtccaggacacctggcttccagaccggggggaatcactcctcaaagggctaggggccaggaggtcaagctcattgcccctgtcttaaggaagcaggaaagcccgttcctcccttcccctcccccctggctggtcaccgtggtggtttaggaaagcctggaggattggaatctgccattgctgttgcacaggcagttttttttcttgggttgggggggtgggcggtgggagggagagaggggaggagggccgaagagagaagggacccaggcgcgaagagctggcctggcttaccctgtagccccggctgccgtggggaacccctccccgccatctcacccacactcccagtcctctgtctgctttctgtttggggctcatcctagaaaatcagggtgcaagaatcacctccttgtaccccaccagcacccctccttgccacagttccaacagcactgccctggtcaggggtgcccacttggccaagggacaccccatttttctccaacttcccccaaactaaggggtgctcccttaagaaattgggattcagagtctgaaaccgccttttctccctctcttctccctcaagccacataataataaaaggagataccacaccctttccaagtttctcccttcaaatcctgggcttatttgggggttcactaaagaaacttctagaatctggggtgagagggcactataagcaaaagacatcccaaaccagggtccaaattaagtgaactcccaaatcagtctcaccttatgattatcccttagcttcaccaaaagcagccagagtgacaaaacacccccaaaataagaacaccccagaactttagtctcctgtcctcgcggccctcaccttgtttctcccctggggaaaaagcttcttgggtatccatggatacacaggaataccccacgtctttccactttgtggaacgtgagtgtccacaagactcaaatataaaagtttgctcccccctcccaggacccccaatcacagaaagcttcgaacttgctcccagcttcctataatgttccacctcaaactaatttttaaaactccaaattgaacttattccccaaatctaatctgagccttgaaacttagatggcaccccaaaatagactgcacccccaaatcagcatgagtactttggttctgctgatagtccaagatgacacaggtgagcacaatctccaaattgtgggtgtcagaacccccagaactaatgtaacttccaagtcagccccatacctgaaacttaccatataggcctcaaaggctgaatgcagccaccggtgctcacaatcaaatcaacaccccataataaacagacaccccacaactgatcaaataatactccatcctgatgccaaagggagagcccctagtctaattctcatctccaagctgggcagagacctaaataaccctcacatgtcaaagccacctcatcgtcctgaatttcccagttcccggtttctcagctgttctttcatgcattcaaataaagacacactccggtctgaaggggagggccccgggcctgatatccagccccgtggaccatggtcggccattcctggccaactgtacactctccccagcccaaatccggggagcttctgccttgcagctggattcagctctagcaccccttctccaaatgagctttgccttgcctgcccgcaatgtctcccgaaacaaaa

SEQ ID NO: 1887099 - DNA, 4001 bp, Homo sapiens
tggattttcttcaggttttgagaacgaagagagacattcatagtcctcttctggccttgagatcatgaacaccacagagcatcccatccaggggcctctaaggcacaccagtgagtcagacccctatgcttgtaaaacaggagaagtgtgtgagtgctcctctggggagaggggccagaacttccagagacattggggttttgagacccccaaaaagagaatcacaacataaaggagaaaatagagacccaaagaagtggagtctgaggtggaacagccacagaaaatacagactgccccagtttttagtataagcatatcccatgcacatttgggaaatactcatactaaaaaaattatttgttgtttatgtgaaatacaccctgtatttttattttttgagaccgagtttcactcttgttgcccaggctggagtacaatggcgcgatcttggctcaatgcaacctccacttcctgggttcaagcgattctcctgcctcagcctcccaagtagctgagattccaggcatgcaccaccatgcccggctaatgtttttgtatttttagtagagacagcgtttctccatgttggtcaggctggtctcgaactccccacctcaggtgatccacccgcctcggcctcccaaagtgctgggattacaggagtgaaccaccgtgcctggcccccaacccctcccctatttttttttttttttttttgagacagagtctcgctctgttgcccaggctggagtgcagtggcacaatctcagctcactgcaacccctgcctcctgggtttaagagattctttcctgcctcagcctcctgagtagctgggattacaggcacgtgccaccacacctggctaatttttgtatatttagtagagacggggttttaccatgttggccaggctggtctcgaattcctgacctcaggtgattcacctgccttagcctcccaaagtgctaggattacaggcatgagccaccgtgcccagccaaactgtacttttatgtgctacatctggcaacgctggtttgaggtggtcacagcccagaccacacccccgctctcccagtcccagaggctgaactcatgctctctccacacacagccattaagagtcacaagcttcattaaagaaaacaaacagaaccaccccaaacctgcccatgtgaagaagctgcgtgagtgtaccgacctccaccctatagagccaggaatccctccggtccacaatggagctgccaggggtccaactcaaagacccctggcacaatgacagaacaaagaggataaagctggggtgcagcgtgttctagcctttcctgcacttaacatacattccagagctgcttccactgttctgaagacagaagagttacacatcagagagaaaaccagaaaccctaagaccccagcagcccctttaagccaaaatcaggagcactggggacagctaaaggcagggagcgggacctgacaccactcaccagggacatctccctagagcctagggaaggctgagctgtgcttttctgtgaccattttccgaaactctgtggcaatgccggtgctggggtgtcctgaggtgaagctagtgcagggccagctcatctttcctgcacagagctgcagggctgtgtgtgggagaaaagctgccctctcaccgcagctaaggacacatccacccccatgcccgccctgccccactgcccctcaccagtgtaagcgcagtgcgtggagaaaggccgagaggccctccatgatcaggaggatggccacggtcagggtggcaaaggcagtgaagaagaagaacagcaccaaacctcccgccaagctcttcacgctcaggccgatgtggatcaccatggtccaaagcacctcagacagctctggggaatgggagacacaaaatccagtgcagtttggcaagaggcagctgtaggccatgaattttgctctgccatccccctgctctagggttccctggatcctggcttcccactgccttagtgggaccaccatgcagagctaacctggcacaagtgctgagcctcctgtctgtactcattctccttgggttcaggaacctgaataattccagaaccttcatgtaatttccatttgacttaagccccccaactgacagtgcgcccacagagggggaaactagagttccggagcccggagagaggtactcacgcgcatgagcgaggctgagggcccagagccgcaagtaggaggcagtgttggagatgcagcccaggcagtactcgatggtgtggatggcctggtggaccatggtgtccccaaagtcaaactgtcgtgggaggaaaccagagagaagatataaggctaggaggggaacgtgcaggcattctgagttgtggctacttggcgctttgaacctgggccagggcaggggactgcacttcccatggatggcacctcaactctggaggggccagaagcacccagtgttgagctcaggtggtgatttcggcaatgccttccccaaaaatcctgcctgacttagccctcacctgggacacctccattcccctcaatacattacattttaattaactacatcttaataagattcttttcaacacatttgttcttctccctctggggctctgtgctcaagagaggagtgtgtgctgagttgacggcactctgttgagaaagtgactgtctgggtctgggaccctaaggacctgcaggagggcaggaagggattttccccagagtgcgcttcaggagacagactctcaacccggacactgtcctgagaagactaggcctctatggccactttacttattctttttacagccttttgggagcaagataaccttctttttcttttgtgacttctaaagagattacacggtgaatttttttttccctacatgatttcaccaccatgcacagggaaatcctgacaaagtttacaaatttccacatgggttaaggccaaacagcatatctgtttgggttaagactaaatagcatatctccagtttcttgtttgttttcgttttcctcaagctccctttgtcccagttttcctttcaataccaagaattatttccagaataaaggaatgggctggaacaagctcttgggagtgaactttcaggtttgctccaagcacagtcaggggtgaatgtgggcttctgaatttggtatattctggaagccccaggtactttccctgggcctctctgtcaagctgaccaaagaccaggaggcgctcccttatggggcttccccccgcagagcccagaccagaatcttctgagctttcagacactcctgagggctcagtggcctccccatcggcccctgccctcaggtcagggtctatttttcaccgcagttcctttcaaaacccacgtgattccactcccaaaggacaccagaaatgccttgggaaatcactgagaacatggggatgggagaaagtggcttggctggtaaagccacaacagcccaggccacaggggtgcagccagcgtggagggggctggctccaccatgccatctctgggcgaacgtctgcttctccctcacctctgtcgacacctagcctatttctgggcttttcttccggaacaggctcttcaagcttccttacttaccctgaaaactagggtaatcctagttccctgagttccctaaatcccaacaccgtggttaagagctctttcctaccactgctggctgccgccccagggcccgcattgagaggaagaagtccatggctcccaggagtgctgatctctactcctatgggctgggagggcagtgaccactgggctcccttacagccaatcccttcagtgtttttattctacctcaagtttctcccaccgaataaactgcaggacaggagagaagcctcgcttccaggccttacccttgccttctctccttcattcccagcttcctgcaggtgttctcaggagaagcaaggactgggtgaga

SEQ ID NO: 1887100 - DNA, 4001 bp, Homo sapiens
catactagcaaataaggaaaaaggctattaaatgactcccctgatgctggaagctgacaaagcttttatgcaatttagcctgtaactaaaaattcacctgtatcaattcattctgactcctgcaatatgaatagctcattataaagaagggccttctgattccccctgcctcccaaattaaataaaaaggaacagtcatttgttttcatggaaaaaaaaaaccaaacaaaaacaaaaaaaaaaccagaccatcttaagcaaagttttacatgacattatataaaataaagtacaatttccacttaattcagtcttcaaatattttttattggaaggccatgcattgccttcatttattgtatttcaaatcactgtacatttacttttgtgaaaacactgcctgcattttctagtacaaaaaaaacctaaaaattgtttcaggaatgtagagaaatatccaacttaaatagcgaaaaagtgcaccataattactgctgcactgcagtcatttctgcaattcccatgtttcttaaataactatcttgtcagataacacacaatataaagagcaattatgaaaaacagacatttacatatacttctaaagtcttattgggaatatcctgttggcattggataaccaatcataggtgcagctgcagtagcaggatatgcatatgcctgttggttcataccattgtgcatatttggaacattacttccgtattgctgagtgctatcataaccattctggtaagtccctgttggattaccagtcctaaaactggtctgtataccagcagacacaaaattacttccaaagctcccattggtgtaatttgcagcactgtaaacaccattctgagtttttgccccaaaatctcttttaagcaggctagagtaacctctgtcataattttccctgtctctaaaggtattaaatccaccccttttgcccgcagagtatctgtcccgacggtcatccttcatgcctcctctacccctggaacgacctgtcaagaaaacaattgcaaattgatcaattatgtctatgacacaaatcattgtggacagaaagaaacagatctattcatggtaggcgtgaaatgtttttacaatttttcagcttaagttttcacattcaaggttttactcaccctccaataccatttaaatggatttgtagacaacgatgtgactcgtaactaccaacatttcctatcagtcatccttacctgaacctctgtcttcgaccaactgaagcaacttgggattaattgcttgattagcttcacgaagcacagagataaggtcgctcacttgctttatgttattaggtgtaaagaaagtgtatgctgtgcctgttttggtactgcgagcagttcttccaattcgatgaatataatcctctgaggagttagggtagtcataattgatgacaaatttcacatcttccacatctgtaaggtgttgcagtgtggcaaaatagcaatgtacggagttttgcacaccacaacagccagaccaaaaataaaaagttagacaattgtattcccaagaaggtacgggctgcaaaaaatacagttaaaatggttatccatttcctgtaggaataccattgaggttgaaaaaagaaaaaaaagcacatgtcatctgtataattcatcacccacccagtgacagaccctgtcaaaaggaatgtgtgttccctaagcacattcccaaatcagcaagttcccttacagatcatcaagtgacatctgaatgcttctgcgcagtagggccacttaaagtttcacagcaacctcttcatgtgctcattttgaggaccttgaaacaaaaaaatgtacaaggtcctttgcattacacattcatcagaagttcaaaattctggccacactgcttgtcttgccaagaccttacaaccgcagctgcaagaaaacatacctgtcccccaaaagttgtttttatgcactgtgtctcgtctaggcaagcgcttccaagaagccaggattcacttgagaatgtgtctctctctggcaggtctcgacatgacgactactgtgtaggtgagggaggaactttcaaagcactttcttttcccacttactatgtgtgagaagttgctcctgctctagatctcatgtgccagtactcaccaatttgtaaaaggcttagtaccttttaaagctgctctctccatttcaaacttgaacaaaaatttcattgaacattgaagtttggaactacttcttcgacatttcagcaaactcactgaaactcaaagacccacagatcacagtgaacagtttgaaacaaggctgtaccatggcagtcatgcaaagcatgggacagaagaaataccacggcagtgaactgtgaggataacttccattttttccctcggagagaacagtttacggggcagaggtgatatgttctgccttttgaagattactggcacacgttcagctttttcacctctctaatcgactggaagcagccagccgatcactagtcctccatccccctcgagtcctccgattgtcatgcctaggccttgccacaaagacagcacctttatgtgaaaaaaaacttagaaaaaatgcaggttaaagaaagcaataaactttctttaaaaaagttaaatggagatcttctgggaaaccaagccatgaatgcgagtttgtactaacctagccctctggaggccacatctgtagcaatcagaataggagcttttccatgtttgaattctacaaaggaaggcatatacatgatcaattatctgagcagaattctagctaggttaagtaagggggaaaaatacttcatttgaaatatttaccatttagaacccagtcacgctcttgttgactcttgtcaccatggatacccatggcaggccacctaagttaaaagacaagttgtgttattaaactcacattgaaaacctcagactccagtgcttgaccacttttggtcacagatctctttaatttcgccagaaatgaaaaagttaaattcactatcagatatgaaaaaaatccactgctcgtgatccaagtttgccctttcctaagctgttttaatcaatctgcttcaatggaggagctcacacatacccatctctcctcatttttctggtaagctcatcacatcttcttttggtttccacaaaaacaatggttttattctccttctcactcatgatctcttccattagacgaataagtctaataataggagagagaaaggaaaaatcctgagttttaaaagaccattgctagggccacacatttatggtcagcaaaacattaagttcaatttacatggctggaagtcaaagaggaaacgcctgctaatccacttatcgagcagttcgacccttggtccttaagtcaaccaggggacacatgaattccttctataggaaagctataaatggtgacagccattatttgaaggattcaagaaattttcaggattagtaggctaactaaatgaaatcacaccaactgaaataacctaaaacaactcaccaaacaatgatccctcaattttacagcaaagttgttaggaagcaaatataacagagttaataaaacttacttttcatccttttctacgtcatgacacacatccacaatctgaagaatgttgtggtttgcactcagttcaagtgcaccaatgtttatatgaatatagtctttcaggaaatcttcagcaagctgtcttacttcttttggccaagtcgcactccacattagagtttgcctatcaggctaatggattttggggggaaaaattagtatcagactcttaagagtgaaaacacaattcagtttgatcacatatttcaaaggacacttactcttatttgatccacaatcttccttatttggggttcaaagcccatatcaagcattctatctgcttcatcaaggacaaggtaggttgttcttctcagattggtttttccacactctaaaaagtcaatc

SEQ ID NO: 1887101 - DNA, 4001 bp, Homo sapiens
acataaaaaaaaaaaaaaaaaaaaaaaaaagaaaatagtaattcatatttgaaaagcatttgcagttttcagagtactttcataagcatgacgaaaatagtagcgaatgcctaatatgccaaacactgagcttccactccctcgaagaaggttttgtagctcctcccattgtacagatgaggaaactgaggctccaagaggttgcctgaggtagcgcagctagaaaggggcagagctgggattcaaatcagtttcacttgagatgaccttttttttttttttttgagagagagtcttgctctgtcccccaggctggagtgcagtggtgcgatctgggctcactgcaagctctgcctcccgggttcacgccatcctcctgcctcagcctcccgagtagctgggactacaggcgcccgccaccacgcccagctaattttttgtatttttagtagagacggggtttcaccgtgttagccaggatgctctcgatctcctgaccttgtgatccacccgcctcggcctcccaaagtgctgggattacaggcgtgagccaccgcgcccggcggagatgacctcctttgctccccacaacacattggtaagaggagcagatgctcctctaatttcctgtttataggagaggaaattaagattctgtttactgatcttgtccaagctcattcattccaccggtgtctattgtaaatctcctgtgggctaggcactgtgccaggcactgggtgagcaacggatggcagacctagcgtctggccctggccagcgccccagaaaccctggcacttgctttgctccccaggtagctggttccatgcgtctcagggcctaggtcaaatcccccacatcctgtcctctgagtcggggatagtacttctggggtcagctgtgccttcaccagcaagatgtcccctagaacgggggaagtagggagggcttacatcaccacatccacttactttcttacttacttgtctaagccaagttcacatagaggggtgcacggctgtggctgctgggggtcgccctccccagaccccaactcagtagtagatggaaagaagccttgagctttgggggtggcttcagaggcaaagaatggagcatgcgaggtggcgggtacagcagaaatggcccccatccagcattccagtttgggggaaaggtatacgtgtacacatgtgtcgcacgcatgcacacacatttaataaaaaggacttaagtgggatttccgagtagtatctcttgagtgcagattcttgtcaagaaagcaagattctttcttgtcaataaagatcacagcagatacacggggtgtccaggacagcaaaccccagctcggcagacggggcaggtgtcccagcctctgagatgacagcattgcggggtgttctgaggcagcgcctgctcacccttgcagtcatagttctattacttagacttgagatcccatgataagtgcactccagtccatggataaggagagtttaacccatggggaacgctagatctcaacaattttcaacaacgaagcaacagaggctaggtgtggtggctcatccctgtaatcccagtaatttgggaggctaaggtgggcgaatcacttgagcccacgagttcgagaccagcctgggcaacacagtgggacccccatctatatggcaaaaaagaaaaaagaaaagaaaaagaaaaaagcagcagcagagtgagagtgagcaagccagctgtcatatgagattgtcatctggttgtgtggttagataatgggctcaaggtcacactcagctaatgagtggcagaggcagtgggtacagcagaaatggccctcatccggcattccagttttgggggcaaggtatacgtgtacacatgtgggttgcacacatgcacacacatttaattaaaaggacttcagtgggatttccgagtagcatcccttgagtgcagattccaaggatgctactcagaaatcccactgaagtcctttttatttgacactttcccacctggctaagttagagggaatactacaagaagttttacactcctaataaacttgacgtacaagacctaggtttgcatgtcagtgccagtattttttaggtgtgtcttatgtcgctctcctaatgctgggtgctaaggaagttgcagaggtgaaggcaactcaggctctgccctcgagatgctaataatatgactgcagagacgctcgtccacacgggagattgagtgctgccatcctctgtgcctcaataatttctttttgggtagccagcgtcagccagtggggtacagggtttggggctacagagcagctgtaaacccgggtttctcctggggctcactttgcaggggagtgcctgggcagaaagcccgggacatggaacctgtatgttgacagcaatgcagccagatgggcagaggccaacatccgtcaccaacggtcacattgtgcagactgctggttccctgctgagctggggaggctgacaaacctgaattccaccttgtgctccaaagctgaggttcagcaagggctcggggtgcccagtgtgcaaccctttgctgggaatcctttcctgtcccaggttctccttccctcttggccaagagccagagctccttgcagggacttcttcccactatagctggactagaaatgaagaagggagaggaggaggaggagaaagaagggggaagaggaagcatatgaaaggacagcagggagaagatgggatggaaggagaagggaagagaggaggaagaagcgggtggcgggagaagcaaagcaggaagccagggtctcgcctcctgccccagcccagccccagggttctgtcagcacacagcctgggcccagcacagtgcccaccacagcaggctgtcccctccgggtgtctctatagaacataaagcggggaagcagcaacactgagggtgattatggttgagacagttccctgtcttgggaaggtcccccctctcccccacgtgccctgtgccctctgcctaccccaccagccccaggcctggctgtaagtgtgacccttcctcagagccaggccctgtgccctgcctttctctctacttcctaaagcttcccccttgccggggagggagaggtgcccaacaggtgtggcccagaacacagaagaaaaacatgcacacagaacaaacacatgttagatgggtgagtgggggcctggtgaggtgtgcacagaaccacagagcttgaggcgtgagagacaagtctttgatacaggcaggtcggggtgcaggacttccctccacactttccagtcatcagagaaagtcgcttcaccttccaaggcctgtttcttcatctgtaaagtgaggtactctagctgagctctctaggtggttggaaagtttaagtgagaaagtgcatgaaaagctcctacatgtacatacatgtattcatggagccatgcagctttgccaggatctgtgtggggttcaaggtcagcaaaggatatagttaggccaggctagggtggggcactgggtcacagagcccctaacccagcactggaggagagccaagccatgccaggaccttgactatcagctcagaagagactgcagaagccatggagtgtgtccttattatatttttcctttttaattaattaattaattaattttgagaaggagtctcgctctgttgcccaggctggagtgcagtagtgcgatctcagctcactgcaacctctgcctcccaagttcaagtgattctcctccctcagcctcccaagtagctgagattacaggcacccaccaccatgcctggctcatttttatatgttagtagagatgggttttcaccatgtcggccacgctggtctcaaactcctgacctcaaatgatccactgtaagtgctgggattacaggcatgagccaccgcaccggcctatgttttaaagcgatgatacaagtaattaacatttatagcaacaaaaaaaag

SEQ ID NO: 1887102 - DNA, 4001 bp, Homo sapiens
gtagaggccgcctatctacgtgacggcgcctttgcgacagcggtcgtcgcttgacggccaggaagccggaagccgcaggggccgccgtcgtctcctccgcgtccccgcccgccagctgctgtcggaggttgacaggtcgaggcggggaggcggcggcggcggctgcagagccaggcgcccaagacggagaccccatggggaacgctccgagtcacagcagtgaagacgaagcggcagctgccggtggcgagggctggggcccacaccaggactgggccgcggtctcgggcacgacccccggcccgggcgtcgcggctccagcgctaccacccgccgcggcgctgctggagccggccaggctgcgagaggctgctgcagcgttgctgcccacacccccctgcgagtcgctggtgtcgaggcatcgcggcgcgttgtttcgctggctggaagagcggctgggccgcggcgaagagtctgtcactctggagcagttccgggagctgctggaggctcgcggcgccggctgctctagcgagcagttcgaggaggtcagggccggcaggcgactgcggggatggggcagggcggtcgcccccaggggactgaaggaagaggtgggcatttgctttggagaggccaggcggggacccatatgaggtgtttccagcttttcaccaggcgtttgcttcgtttctctttaacctatgttagaggtctggaaagtctgcatcaggccgtccttgctctgaagagctggacaagcccatatgtctctctctgtatgttgtaatgcagacctttgtgcagttgattgacgctactctggagatcttctatcagattctcgaacagtttggagagaaaagagatgtaaggataggaggagtggcgctgagaaccattttttgtattgtcctgtccaggtttttacacagcaccttcccaattcagtgtgggcgccgaataagtgtggaaagacagtagtaacatgctggaaaggctcacattctaaaacctatcctcctcatgcaaaaactagcttttctaaaatacatactggtttgtagatccttaaagaaccatatattagactcatttaaaccttcataggatccgaaactgataggcaaataccaggtttcctgtgaatacttgtaattatgcagttcttcatataatcaccaagatcatgtctgctaagtcattaagagagcaaattgatttggcaacaaaatattttccttggaaggcattttgggagtttatttactgggcgcttcacttcgagttaagaagactgatccagggttacccagtgaatcattagtaaaacagactatcaactagatctcttgctttttttttttttctttctttcaacttttattttaaattcaggcgtacatgtgcaggatttggatttgcagatgtattacataggtaaacgtgtgccatggtggtttactccacacagcatcccatcacccaggtattaagcccagcatccattaggtattcttcctgatgctctctctccctccacccgcaccctattttttgtttttaatgtctcactacctccttcctgggatcctatttcttttaacaccacggtatgaccaaaaaggtacttattttgtgaaaatgagttagccagtcatgtagaatcttcagtggccacgaagggtgtgtacataaagcagtaaaccagcgggtacttgcagtgcctttaaaaggttctgttcaccttaaaatcagaggcttttaaaatattttaagaatgtcttcctgtacatggccagaattcagataatgtagtttgtgtgtttcttatgaaaaaagtacctttaaggcatcccaacccttaaaaataatagtcatggctgggcgcagtggctcacgcctgtaatcccagcactttgggaggctgaggcgggaggatcatctgaggtcaggaattcaagaccagcctggccaacgtggtgaaaccccacctctactaaaaatacaaaaattagctgggcatggtggcgggtgcctgtaatcccagctacttgggaggctgaggtgggacaaccgcttgaacccaggaggcggaggttgcagtgagctgagatcacgccactgcattccagcctgggcctcagagcgatactctgtctcaaaaaaaaaaaaaaaagtcatattagttagtgaaagatctcctttttttttccccccaggaatacacatagtaccttctttctagtatctacgcgtattatgagaatatgaagtagtagtgggaagaaccatgcagaactgttgaaggagatggcactttgcagatttgagcaaaggcaaatggagagaaacaccgtttacattctgagagtttctgacagaaatagaactttatgtagagttcataggagtcccttaatagaaggtcaagaaatacttgaggtgtggtccagaaatcactcaggggttgtggcattattgttcactgagcaaatgtttattgggcgtatatcgagtgccactcacttggatgacagtggacaaagcagatacttgctcttaaagagtatgtagttgtggtggaagagacaggtattaacccattaattataagatatggtgagtgttaaccgagggggaaggtataaggaataaatagcaagtgtatttaacctcacttggggctcaagcaagacttacctgagaaggtaacatttcagcccacaggtgaatggtgaaagcagatagtgttacaggaggtagtaacagcgtttcaggcagaggaaattgtatccacaaaagttcaaagtccagagaatctggaagaagtctggtgtggtgtattagggatacacaaaactttttcaagggacagaaaacctaatgcatcagtggtttaaacataaaaagaagctgcttccttatgaaaatgtccaggtaggcagtccaagattgatgtggcagtgttgtcatcatcagggacctggcttcgtccatcttgtgctgtcatcctccacggacatcttccacttagtaattctgttgactcctgctgtcattttccacattccaacaagcaagaaagggaaaagggaaggagaaggaagaagccatgcccactctcttacgggcatagcttacatcccacaggccaaaattcagtcacatggccgcagttacctgcaggacaggctgggaaagattctttttccgtggccatatattcagctaaaactcagggcttaattattgaggaaggggagagaaaacattgagttatatttggcagtctttgattcacatagctaggtcatacagttctgtgagtgaggcttagccaaggtttaaaaacctgattgtgataatctcacagtggccaccgtctctcatgataatcttgtgatggctgctctgtctgtaagaactagtaagttaggactagccaaagaagataagatttagccatgcatttgattctgtgctttaagaatgtctatccttagacttgaataagtatatacttttgtgcatacttacacagttaattctgcgttgttaatctacgtctaagcttttgagaatatactgctgtattttactgcaagatgaagggcttgtgaagtaatgtctttatagtagcaactaaaatgacaagttgtttccgtcattcgtttttataagagctaacatggtaaaacagatagccacgggtgcgcatggtttattataatgctgagagtttccaagtgttacatgtttcttctttggcttcccaacttacgctgccattggtgtccacgcagctgtcttgctttcacattcctgtgacctcagttatttgaggaggtgttataaagaagttcttggagttggaccatggaccaaagtctgaaacattatcattttatagtacaacacaccttttctcatggtaggtgtggtccagggagaaggtgcgcatggtttattataatgctgagagtttccaagtgttacat

SEQ ID NO: 1887103 - DNA, 4001 bp, Homo sapiens
ggatgtagtggcgggcgcctgtagtcccagctactcgggaggctgaggcaggagaatggcgtgaacccaggaggtggagcttgcagtgagccgagattgtgccactgaactccagcctgggcgacagagcgagactctgtctcaaaaaaacaagcaggccaggtaaagtggctcacgcctataatcccagcacttaggaggccgaggtgggtagacagcttgagcccaggagttcaagaccagcatgggcaacatagtgagactctatctctaaaaataagaataacttttaaaataataaaaatacattaattggccgggcacggtggctcacacctgtattcccagcattttgggaggccaaggcgggtggatcacgaggtcaggagatcgcgaccatcctggctaacatggtgaaaccccttctctactaaaaatacaaaaaaattagttgggcatggtggtgcgcacctgtagtcccagctactcaggaggctgaggcaggagaatggcatgaacctgagaggcagagcttgcagtgagccgagatcaggccactgcactccagcctgggctacagagcaagactccgtcaaaaaaaaaaaaataccacattaattatggtgctggttttagcatatgtccacaaattctttgaaacccctccctgtaggaggcagggcctaatctccctcccctgagtgactcacttctaatgaatagacggtaagcttgtccaacccgtggcccaggacagctttgaatgtggcccaacacaaattcataaactttcttaaaacattatgatatttatgcacagacctttttttttttttttcttttgagacagagtttccctctgtcacccaggctggagtgcagtggtgcaatctcggcttactgcaaactcctcctcctggattcacaccattctcctgcctcagcctcctgagtagctgggactacaggcgcccaccaccacgcccggctaattttttctatttttagtagagatggggtttcactgtgttagccaggatggtctcgatctcctgacctcgtgacccacccgcctcggcctcccaaagtgttgggattacaggtgtgagccaccgcacccggtccttttttttttttttttttttttttttttttttagctcaacagctgtcatagtgttaatgatgtattttatgtgttgcccaagacaattcttcttccaatgtgtcccagggcagccaaaagattggacacccctggaacagagtatggaaagggaaattagcagcttacggtgggtaactctggtagacaacgccttaaccaagtgatcaaggttaacttcaccagtgagcaatcaggtagatatcatgtgccccctaatattatgtgatgagaaggccatttcacctctggggtattctttccccaaaccccaactgcagtctaatgatcagaaaacatcagacaaatccagattgagggacatcctacaaaatacttgaccagcccacttcataaatgtcaaagtcataaaaaaacaaggagagacagagaaattgacatagattgaaagtgactattatgatataataattaagtgcaacattatatcctgattaaatcctggaacagaaaaaggacattagtggaaaaaactggtgaaatctgaagaaagtcgggagtttagttaatacaactgtgcccatgttaatttttgagttttgataaatgtatcataattagtacgatattaacattgggggaaggtggatgaagactacggggggttctctggatttgcaactcttctgtaaatctaaagttaactttagggggtatatgatgtcaacctgatttagctaaagttaactttagatttacagaataattgcaaatccagagagagggaagatttaggttggtgcaaaagtaattgtggtttttgccattgaaagtaatggcaaaaaccacagtttcttttgcaccaacctaataaaataaaaagtttaaaaggaaaaaaatctctcaaatgaagacgtaggtccacacaaggacttgtatgtgaatgttcattgcaactttactcaaaatcatccaaaactggaagtaacccaaatgtccatcaactggtaaatgaataaacagactgtggtatatccattcaggggaatgctactatgcaataaaaaggaacaaactattgatacatccaataatatggatgaatttcttttttttttttttttacattttttttttttacattttttttttaatttatttttttattgataattcttgggtgtttctcacagagggggatttggcagggtcatgggacaatagtggagggaaggtcagcagataaacaagtgaacaaaggtctctggttttcctaggcagaggaccctgcggccttccgcagtgtttgtgtccctgattacttgagattagggattggtgatgactcttaacgagcatgctgccttcaagcatctgtttaacaaagcacatcttgcaccgcccttaatccatttaaccctgagtggacacagcacatgtttcagagagcacagggttgggggtaaggtcacagatcaacaggatcccaaggcagaggaatttttcttagtgcagaacaaaatgaaaagtctcccatgtctacttctttctacacagacacggcaaccatccgatttctcaatcttttccccacctttcccgcctttctattccacaaagccgccattgtcatcctggcctgttctcaatgagctgttgggtacacctcccagacggggtggtggccgggcagaggggctcctcacttcccagtaggggcggccgggcagaggtgcccctcacctcccggacggggcggctggccgggcaggggggctgaccccccccacctccctcccggacggggaatatggatgaatttcaaaaacattgtgttgagcaaaagaagtgagacacaagagactacatctgtatgactgcatctataggaaactttaagaaaggcaagactttagtgcaaaagcagatcagtgcttgttaggaacaggagtggggaatgtggggggtagagagaagtaattgacagctaaaagtcacaagggaagttctaggggtgatgaaatgttctgtatcttgatggggcagtggttacatgactacagtgtgtgtatatatatgttaaaactcatcaagctgtacacttaaagtgagttctattctatgttagctatatcacaatatggccaggtgtggtggctcatgcctgtaatcccagcattttgggaggccaaagtgggcagatcactcgaggtcaggagcttgaaaacagcctggccgacatggtgaaaccccatctctactaaaaatacataaattagccaagtgtggtggtgtgtgcctataatcctggctacttgggaggctgaggcaggagaatcgcttgaacccaggaggcggaggttacagtgagctgagattgcacaactgcactccagcctggatgacaaaacaagattctgtctcaaaaaaaaattatatatatacatatacacacacatatatatattatatatcacagtaaagctgatttttaaaaaatctctcagcccctgctattgctttgtttttatcctcctgagcctctctatagctatggcacttgaatttccttcttcctcttggtggcttttgttctgtcttatttcctgatgccctttctaggtccctaaacattagtgcaaagagggcaccagagcagaggggaacaattctctctacactcaagtggaatctctgagctgagggacccagagaggtggagtagccagcagggccctgatgacccgcacctgaactcccacgggtctgacggctgctgtcacaagagcctggggccgctggtctgagtgtgctggcgatccagccaggctcaggacgctgaggaggaggtaaccgagaccaggcttctcccttgt

SEQ ID NO: 1887104 - DNA, 4001 bp, Homo sapiens
acctcctcctcccgggcgcaagcaattcttccacagcctcctgtagctgggactacaggcatatgccaccgtgcccagctaatttctgtatttttagtagagatggggtttcaccatgttgaccaggctggtctcgaactcctgacctcaagtgatccacctgactctgtgtcccaaagtgctgggattacaggcatgagccacctcgcccagcctgtattatttttttttttcctcagcagtcagatgccctgtattacattcttgccgccactccatttttacagcacacaataaagaagacttgatcatacttaatttgcctaagcatttgaaaaaaaaattaattctcggataagtttttgtaagttcgtaaatataagaatgcaagtctaaaatccacaggaaaaatatatttctgctttgctaaaatgtctgctaaaaataaaaaaccaaactaagtaagcagaaataaattaagaaatgggaaggagtcttgaaaaatcaatcttcccagagtcgatattattaaccacctcagaaataagcagcgcagggaaaagtatgtggctcctcaaggcacttgggtctcttatggcttagaagtcctctgaatacatacatcaaggtttcccaaaaatatgtcaacgaaaacccacataactatttttgtttgtttctttctttctttcttttttttttttttttttttgagacggagtcttgctctgtcacacaggctggagtgcagcttgctcactgcaacctctgcctcccaggttcaagcgattctcctgcctcagtctcccgggtagctgggactacaggcatgcgccaccacgcccggctaatattttatttttagtagagatagggtttcaccatgctgacctcaggtgatcccacctcctcggcctcccaaagtgctgggattacaggcatgagcgaccatgcccagtgaaagcccacataactatttatcttcattttaattctcttgcttcagggttagtgttaaaaaatttgaggttagcatataggaaggaagtcctcttactggatcaatgccaaaagggtatggtccaccaaacactccagggagggctgggttcagctgtagaacagggttcccccgaagcgtctcttcactaccatgacagggaaaaagtcacattatttttgaacaagagagggaaacaacaagggtccagaaactgaccccaaaataaattactgtagctatcttgtctcttcaataaaatgggaggggaaaaataaagaggagagactagcagctgagactgagggatccaaaatgacaaaaagaaaaattaaacacacaaacacacaatcaagtagggaactggggaatctggttttagtttccaaaaaaaaaaaaaatcatttctaatcttagttcctggatacttgctgaacaaatcacaaagcaactcacagtgtggagcatgaatgaggagacactgtcaccacttcctaaagaagtgtcagtttaccacttgtcttaaaaatcagggctgcacatgaaaggaataagctttgaattttagcttcttctgcaacttacgtccaattataagtaaacatcggccgtacactccaggatgacccaaagatattaagagacttggaaaagcaatcattgtagatgaggccagtgtacatggagaacacacccatcaataaaataatgtatcgaccactgaacacagtgctaaacatctgggaaccagaagaaagaagtaatgagaatgtactcactgcagctcacattgtgacaatgttattcagaatatacctgcccctttctccagcactactttaccccatcctgattcagagagcttgaagtaaaaaccaaaatacaatgctaatgagacagtcactttcacaggatgtggcctctatttttttattaggttggcacaaaagttactgcggttttggccatttcttttggcagccaaaaccgcaataacttttgcaccaaacctaaataatttttatttttttagagatggggtctcactatgttgcctatgctggtctcgaattcctgggctcaagtgattctcctgcctcagcctccaagtagctgggactacaggcacacactaccacttccagcttgcacatgtcgtctttggtgttaaaatgaacataacttctctacttccttttgataaattcatggataaaagacttccagatcataattttcataatgaatgcttgggaaattataaaatttcagttcaatgcagatgtaacttaaacattacctcattctcattcttctgggaaaggatccggctctccctcagtaccatccacacagcaaaaagggtcattaaaatgccatgaccgaagtctccaaacatcacagcaaatagaaaagggaacgtgataatagtatacggagctatgaagaaaccaaaaaaagaaaaatacaaagtacattaaaccatagcaattccacaaatattacattcttttccatacccacccccctttttttttttgagatggagtcttgctctgtcagccagcaatgtctcaatcttggctcactgcaacctccatctcccaggttcaagtgattctcctgcctcagcctcttgagtagctgggattacaggtgcccaccaccatgcctagctaagttttgtatttttagtagagacagggtttcaccatgttgcccaggctggtctccgactctgacctcaagtgatccacctgcctcggcctcccaaagtgctggcattacaggcgtgagccaccgtgcccaggcttccataatcttaagatcaatataaggtgacttactccccagctgccagacagataggactctcagagaaaatctttcatggcagaatcaacacatcttcacaaagtagctaatgaaatttgagctactgataactttttttaaaagagagatggggtctttctctgccacccaggctggagtgcagtggtttcatcacagctcactgcagcctgcaacccctggactcaagttatcctcccacctcagcctcccaaacagttggaactacaagtatgtgccaccatgcccagttaattttgttttaaaattactgataaataatatttttttagatggaatctcactattttgcccaagctagtcctgaacttgtggccttgagcaatcctcccacctcagcctcctgaatatccgagattacaggcatgaggcactgtgcctggcagctctgataacatttcaaacaaagaacagtggaaatgaaggtgtaaccttgacaacattggtttgttctctgactctcttgtaactcgtgggaccctgctcccagggcaggccagctgtcttctctttgtgcagcaaccatgtcccagtgatataaagctaaatatcagataacgtacagatggagagagcccagagcaaagcagttcttccatagggctccaactgaaaatgaatactcacactcttgatttaataattaactctccaaatataggagaaatctgtgttgtacctaaagtggccaatacttgctacattttttctgtctaaccttggaacagggaagccaaaaaaaaagccatttaaaaatatcagacatcttagaagaaacattttgcttaaaacagttcctgcaaatgatttgctagagaagtccaggtgttttagggctgtgagggcacatgaaagaatccagtctcatgaactttttttttgagacagagtcttgctctgtcactcaggctggagtgcagtggcacaatttaggctcactataacttctgtctcttgggttcaagcaattctcctgtctaggcctcctgagtagctgggattacaggcatgcaccaccaggcctggctaattttcttgtatttttagtagagatagggtttcaccatgttggccaggctggtctcgaactcctgaccttaagtgatccttccaccttgtccccaca

SEQ ID NO: 1887105 - DNA, 4001 bp, Homo sapiens
cagcagccgtcagacccgtgggagttcaggtgcgggtcatcagggccctgctggctactccacctctctgggtccctcagctcagagattccacttgagtgtagagagaattgttcccctctgctctggtgccctctttgcactaatgtttagggacctagaaagggcatcaggaaataagacagaacaaaagccaccaagaggaagaaggaaattcaagtgccatagctatagagaggctcaggaggataaaaacaaagcaatagcaggggctgagagattttttaaaaatcagctttactgtgatatataatatatatatgtgtgtgtatatgtatatatataatttttttttgagacagaatcttgttttgtcatccaggctggagtgcagttgtgcaatctcagctcactgtaacctccgcctcctgggttcaagcgattctcctgcctcagcctcccaagtagccaggattataggcacacaccaccacacttggctaatttatgtatttttagtagagatggggtttcaccatgtcggccaggctgttttcaagctcctgacctcgagtgatctgcccactttggcctcccaaaatgctgggattacaggcatgagccaccacacctggccatattgtgatatagctaacatagaatagaactcactttaagtgtacagcttgatgagttttaacatatatatacacacactgtagtcatgtaaccactgccccatcaagatacagaacatttcatcacccctagaacttcccttgtgacttttagctgtcaattacttctctctaccccccacattccccactcctgttcctaacaagcactgatctgcttttgcactaaagtcttgcctttcttaaagtttcctatagatgcagtcatacagatgtagtctcttgtgtctcacttcttttgctcaacacaatgtttttgaaattcatccatattccccgtccgggagggaggtggggggggtcagcccccctgcccggccagccgccccgtccgggaggtgaggggcacctctgcccggccgcccctactgggaagtgaggagcccctctgcccggccaccaccccgtctgggaggtgtacccaacagctcattgagaacaggccaggatgacaatggcggctttgtggaatagaaaggcgggaaaggtggggaaaagattgagaaatcggatggttgccgtgtctgtgtagaaagaagtagacatgggagacttttcattttgttctgcactaagaaaaattcctctgccttgggatcctgttgatctgtgaccttacccccaaccctgtgctctctgaaacatgtgctgtgtccactcagggttaaatggattaagggcggtgcaagatgtgctttgttaaacagatgcttgaaggcagcatgctcgttaagagtcatcaccaatccctaatctcaagtaatcagggacacaaacactgcggaaggccgcagggtcctctgcctaggaaaaccagagacctttgttcacttgtttatctgctgaccttccctccactattgtcccatgaccctgccaaatccccctctgtgagaaacacccaagaattatcaataaaaaaataaattaaaaaaaaaatgtaaaaaaaaaaaatgtaaaaaaaaaaaaaaaagaaattcatccatattattggatgtatcaatagtttgttcctttttattgcatagtagcattcccctgaatggatataccacagtctgtttattcatttaccagttgatggacatttgggttacttccagttttggatgattttgagtaaagttgcaatgaacattcacatacaagtccttgtgtggacctacgtcttcatttgagagatttttttccttttaaactttttattttattaggttggtgcaaaagaaactgtggtttttgccattactttcaatggcaaaaaccacaattacttttgcaccaacctaaatcttccctctctctggatttgcaattattctgtaaatctaaagttaactttagctaaatcaggttgacatcatataccccctaaagttaactttagatttacagaagagttgcaaatccagagaaccccccgtagtcttcatccaccttcccccaatgttaatatcgtactaattatgatacatttatcaaaactcaaaaattaacatgggcacagttgtattaactaaactcccgactttcttcagatttcaccagttttttccactaatgtcctttttctgttccaggatttaatcaggatataatgttgcacttaattattatatcataatagtcactttcaatctatgtcaatttctctgtctctccttgtttttttatgactttgacatttatgaagtgggctggtcaagtattttgtaggatgtccctcaatctggatttgtctgatgttttctgatcattagactgcagttggggtttggggaaagaataccccagaggtgaaatggccttctcatcacataatattagggggcacatgatatctacctgattgctcactggtgaagttaaccttgatcacttggttaaggcgttgtctaccagagttacccaccgtaagctgctaatttccctttccatactctgttccaggggtgtccaatcttttggctgccctgggacacattggaagaagaattgtcttgggcaacacataaaatacatcattaacactatgacagctgttgagctaaaaaaaaaaaaaaaaaaaaaaaaaaaaaaaaggaccgggtgcggtggctcacacctgtaatcccaacactttgggaggccgaggcgggtgggtcacgaggtcaggagatcgagaccatcctggctaacacagtgaaaccccatctctactaaaaatagaaaaaattagccgggcgtggtggtgggcgcctgtagtcccagctactcaggaggctgaggcaggagaatggtgtgaatccaggaggaggagtttgcagtaagccgagattgcaccactgcactccagcctgggtgacagagggaaactctgtctcaaaagaaaaaaaaaaaaaaaggtctgtgcataaatatcataatgttttaagaaagtttatgaatttgtgttgggccacattcaaagctgtcctgggccacgggttggacaagcttaccgtctattcattagaagtgagtcactcaggggagggagattaggccctgcctcctacagggaggggtttcaaagaatttgtggacatatgctaaaaccagcaccataattaatgtggtatttttttttttttgacggagtcttgctctgtagcccaggctggagtgcagtggcctgatctcggctcactgcaagctctgcctctcaggttcatgccattctcctgcctcagcctcctgagtagctgggactacaggtgcgcaccaccatgcccaactaatttttttgtatttttagtagagaaggggtttcaccatgttagccaggatggtcgcgatctcctgacctcgtgatccacccgccttggcctcccaaaatgctgggaatacaggtgtgagccaccgtgcccggccaattaatgtatttttattattttaaaagttattcttatttttagagatagagtctcactatgttgcccatgctggtcttgaactcctgggctcaagctgtctacccacctcggcctcctaagtgctgggattataggcgtgagccactttacctggcctgcttgtttttttgagacagagtctcgctctgtcgcccaggctggagttcagtggcacaatctcggctcactgcaagctccacctcctgggttcacgccattctcctgcctcagcctcccgagtagctgggactacaggcgcccgccactacatccggctaatttttttgtatttttttagtagagacggggtttcaccgacctcgtgatctgcacgcctcagcctcccaaagtgctgggattacaggtgtga

SEQ ID NO: 1887106 - DNA, 4001 bp, Homo sapiens
tttctttagtagaatcataccctttgccttagttttggtaattttcaatgttgtttaggttgagcctttgaacatcgtgaccagatggtcatctgttggcagtttccatagcattcgttcagtgggcacaaatcttgaaggctacttgaagaaagaggatgaagttcagatggttcacacacctccagaaacctctttcaactgtgaacaatcttgacttgctgtggtttctgtacatgtagtaaagcatgttgaaggaatggatgccttgacttcattgatacctggaatggacggaattatatcccctcaaaattggtaagttgaagcctcaactctcaatgtgactgtatttgaagattaaagggcattaaaggaggttattaaagttaaatgaggggtcgggcacagtggttcatgcctgtaatcccagcagtttaggaggccaaggcaggtggatcacttgaggttaggagtctgagaccagtctggccagcatggcaaaactgcatccctataaaaaatacaaaaatagctgggcatggtggcgtgcacctgcagtcccagctacttgggaggctgaggcatgagaatcacttgaactcgggagaggtggaggttgcagtgagcagagattgcgccactgccctccagcctgggcaacagagcgagactctgtttccaaaaaaaaaaaaaaaaaatggttaagtgaggttggaagagtagatccctgatccaacagaattggtgttcttaaaggaagaggaagagataccaggagtatgtctgcacagaggaaaggttgtgtgaagacacagagagaaggtggccatgtgcaagccaaggagagaggtcgcgggagagaacaaccctacccatcctcaatctcagacttccagcctccagaattgtgagacaataaactgttgtttaggtcccccagcctgtggcactttgttatggtagcctgtgatatttcgaaatatcacaggctaccatattttgatatttggtcttcctgtttcctggctcatcattcccaaaacccttggaatctaaagcaataaatttctttgtgaatgttaatgagatgactggtggctgggggctcctggatagcctcaggatgggggatggttgccaggggaatgttgtaattagagggttgaaactttcagctcccccactaccaccacacacacacctctggggtggaaagaggagctgaagattgagttcatcaccaatggccagtggtttaatcaatcatgcctatgtgatgagacctctacaagaacccaagactgggttctgacagcttccagagagctgcacacacagcagttcctggaggttggtgcaaccagggatctgggagctccaaaccccttcctacatacctcgccctatgcatctcttctatctggctgctcctctgtatcctttgtaatatcctttgtaataagtgggtcaacataagtgtttccccgagttctgtgagccactctagcaaattaaacaaatctaatgaagcgttcatggaaaaccccaatttatagccagataatcaatcagaggtatactaatcgcaacaagcatttaaagtggggggcagtcttgtgagactgagcccttaacctatgatatctgatgctgtctacaggttgatggtgtcggaactgaattgaataagacacccagatgatgtgtgctggagaatgtagtgtcagaagtgttatatcgagagatgtgtggaagtagagaaaaaatatttttttttctctgacatagcccaagcagactaatacagtgccacaacttcaacatttggaatcagtctgaagaagagaagtttccagaagacattatggctgtttttaaatatctgaagacagtgactacttttaggttggtgcaaaagtaattgcagtttttgctattactttcaatgacaaaaaccgcgattacttttgcaccaacctaatacatgcagaatcagatttgttctctgtgaatctagaaggaaatctagaactggttggaaatgttttaaaaaataaggaatttgtctcaatgataaaaaaggaatttttaactgttaaagcttttcaaaagaagaatgagaatgagctacataacaaaagtgggtaagatcccatctcataaataaccatcgatctggattccgaagcatcacaaagaatgttggactaccaggactctatgatgacttttaagtggtaaaagtaggattttaaaaccctctcatcaagggttaccactaagtagctcattatcttgggcaagttgcccaaagtctcttcatctcagtttccaaaaatctttttaaaaagaaagtacagtttttgtgaaaattgaaaagaatatattagtaaagcatcaaataaatagaaaacattatcatcatcatcatgccattggtgtcatcaaatgaaaatattccaagaaaagaaaaaatatataatgctttccattcatatgatgaaaatatatacattttttcttactttgggtttgctttaaaaatataaatataactgtgcttctcatgaaaaggtaatcatataaaaccattaaaaacccaaaccctggaagtttgccttacatcataagaagaagagcaacaaaaagccttagtgaaactgaacagagtgttctcttttccctgatgggtgagatgcgatctgcacaagctgtgagtgtagagaaacaaatgctagtccttcagctgtaggggtctgggacgaccttcctaactaaggcaaaactgccttttctgtgagtcaccctttgaaggaagggctcgctgcctgggagcagttttactgtttcacatttctttcattcatcacttttcaggccctgcgccgtctggcacagccccagcctctttgtgtggatatctggctctcattgctgcagagaagtgatgtcaggaggctctgactcaggtgagcaataaggagcagatggcgcctccacaaacccagagcctctccccgcaccctgctccttggaacaagagtaattattataaatgggatgggtggtgggataagcaaagatccaagttttctaagaggatctgcaaagctgaaccctccaggaaaaaaaaaaaagtgcagccaccagcatggacaacagaaaggaaccctgattggagattgtttaggaacatggtgctcactcaattgggcgttgtgctaatctgattaatgaaatgacgatgctaagcggggcgttcagcttgctgcatccgtagctaaggcaagttgggcaattccccccagaacatcaattctcagcacccttgtcagataactgtttatgaaaagatgaatgcacgtggcaatctcgggtgaaggaggctgatgcatgtgttgttaatgattgaaataatcagtttggtagtaactggcatgtgcgcttgtcaaatgacaggctggggagcattagcattcctcaggcatggacgcctttatcttcaggctggtgtctgacaactaccaagatcacccatgaataaatatcgggccttacccagacataattaaactgccaatgcagatatacctaaataaaattgatatcttaatgacaccagatagtgttcaagtaatgaaagcagtgtgagagggacctgcacaatgaatggagacatcagtgctcattccacaggggactcttcccccagtaactcctcacagaggttgcttctcatcgtggtggagttttatttctggccttttctcttcgattggcctgccttcaccatctgagaaatctttccttctttctccctagctataccggagagctatgtatctctctgcatggaagaggtttgtgtatcttttgttacactccactgggccacagagattttggttttgtgacatctgaaataaccccactatgcttaggacaccagtgtttgctgatcctggagctgcggctgcatcacctcctccacggagtcc

SEQ ID NO: 1887107 - DNA, 4001 bp, Homo sapiens
agccagactccatctcaaaaaaaaaaaaaaaaaaaaaaatagctgatatatggtgtacgctgggcatgtggtaagcactgcttagtggatctcatttaatcttcccaataatccagtgaagtgggtgttactattgataggaaagaaagctgagctgcagagataaggcagaactcccaaggcctaccagccgccaagcagcagagtggggcatcatacctgcctgaccccacgcaaagaccatcaccactgccagccgctgcctggctgtgctgcaggtggggagagacctaaaaggtagggagggagagaagattcctccagtcactattttctaagcatgtcgggcaccaaagaccaatgctgagttctgctgtgtgcccaccctggagggtcccaaagtgccaccaggcctcagacacactgagattctcagaggaagtgtagactcacgggtgggcaacgcctagcaggggcaaagatacagaggtaagggagttccagaacgagtgtggccagattcagcttcccatccaaccctgggcccccaggaggtggagtcaagaggggccatggcctggggtgtgggcttctcttcgtcccagaacactggcctgaatcagccagctctccgcacacacagccacgtccataggcacaactgtttctgggggcccctgagggcagggggtctgctagggctgtggtttgtgacgtgtggagtgagcgcaggctcagatcagggcgaggcagcttgtccagagaggcagataattcccaaacagaagacccccaaggcggagggccctggggctggactcctggcccccaggaggttgttctgagcttaccctgtggacggattggagggtggacctctttccccgcaagggtcaagagggagtgggggatggtgggaaggcaatctggccaggagaagctgcgcgggagactcccgccatccccagtcccaccatctcagccccgcggcctcttcctccctggagacagccaggatcccgggagtggcccaggatcccgggaaatgcaggggagggggtggcatctttcctcttcaggcgcgggcctggcccagaggcgacaggaagccaggacgccggggattgtctctcgcaaccgcagcccagccccagtccgggaggaagttctgccgggcgctctccgccggtgcctcactggttatagtgctatacaggaaacctggcagcgccggagccgcgcggtcgaggagggagcgcgggacgccgagcccacgcgcgcctgccgggacaagtggagacgaggccggcgagcggacgccccgaggtgcccgggcaggcagtgggccgccgagcgggagttgaggtgggaggtggggtgggggtggggaaaggggcagggttggggagggaagggtgcggcaggtggcgggtccgcacccgggagctccgcgcgcctgctccccttgtctccgtgctggggcgggagctgctcgggccgcatcccacggggaggagaaggtaggcgaagggctgccctccctctggaggcgggtggggagcaggcccaggcccctagcgccgacccaggcgttgacgccgctgtagcttgcgtcgcctgggcagtggacgcaggggacctcctggcgacgggtgcgctctcgcgctccagggatcctctcggcccccaccaatccctccccttctctgtgttcccgcaggttggcgaaggagctgtggccgggtccccttcttatccagcccgagacactgcgctccggtgggcgtccctgcgctgggaatccctctcggagtttttccaggcccggccgggttgctccgggaaaggccctgttgggggaggtgggcccggagctggcaggtctacaatccggttggaagggctcgcagtgggtgattcagggtgccaatgacctccccgcgaacgggaacgcccgcactagacaaccagccccagaccggcattcccagagccgcaggcgggagggacgcagggactccgggacagcaaatccccgggggagaagggaagggggaaggcgggacaggggaggcccaccctccttgggctccgctagcgaccagccagcgccccttcagacgcagccttcctggctccggaccccggctttctgctccggtcctcgtcccaatgccccccaaggtccccagcagaggcattcaggttcctcctcgccccgcccagacgcagcttctttgggtatgggtgacagcactcctgagcgtcgctgtccctattcgctgccgttgccagctccgattccgcgaaacctctccggcaccacctcggaagccccgcccagggcgatggtccgggcctaacctgccggccccgcccacccggcccttgggctccctgaggcccgcccagcagacgtgagtgcgctgcggggtccggggggaaggggcgccggggcagtgtccaccttggggtttgttggctctgggcagctcgatgaccccgcctccggggcccagtgtgcttagtgactcaagtgtataccctttcctagtcgaggaacgcttgacaaagtggcgaaggagccctacgggagtcccggattggaccctgctccttcggtccctcagcctcggcaagccgcggtctcctggcccttggcctgggtcaccttaggaggcaggaggagatgtggtcagtgtgggagcttggaggggccatgcacttccggagaagaccaccgactcatggctttggtggaggggcgccggcagatttagttaagctctcccccatccctgacacacccagccggggcgggagcggggcttgtgaccactccggagagctttgagggcccctgctttgggactccgcacggacagtcactgtctcagagtgcattctccaggggccactctcttggggacactgtaggggtcacagggcaggtgggcagcctctctcggggggcggcgtgagagccggagagcagggggcgggggcgggcccggctcgggctcacgtctgcgttgaagccgctggggaaggggagagaaaccgagagaaccggttcccccgccttgacagcggaggcccccacaccaaggcccttggactaagcggggcagggacagcctccaggtagagctgttcgccggggcgcctgcagagcccgcatcccaaccctgaccccggggccggggcgcaggctcctggagggaggcgtccaggcgggacagggcccggggagcggcaggaaatgggctgctcttcccacttgactgacgggaaaactaaggcacggtcaactatcaagcaagcgtggtgtcgaccttagagcaggtaatcacccctcgttttaaagccaaagtttccctcgcagtcgatttggaccaagactacccacaatctccccaccgcaggactgaagcgaggctgaaatcttagaatcaaccccacggaatgaagaggttgtcctaattccagcactgagtgtaagaatggaagccttgcatgtgattttattcaagtcctcattttagaaatgggaaaactgaggcccgaaggcgaacggcaagtgcagcatcgggactcgaacccaagtctctcctcgagtgctgggctattccgggctcagtggtcttgacttccgcggccctcttccttgttgcctgcaggaaaatgccgcggccgcaatggcggcggatgtggagggggacgtgtacgtactggtggagcaccccttcgagtacaccggcaaggacgggcgccgcgtggccatcccgcccaatgagcgctaccggccgctgcggcgcagcacagagcactgagcattggtggcacgtgcggcgcaagcccggcggccgccccttctacctgcccgcgcagtacgtgcgcgagctgcctgcgctgggcaaccctgccgctgacgcgccgccaggtccccccatcgggacccgcagcccctgagccgctcgcctacgactaccggttcgtga

SEQ ID NO: 1887108 - DNA, 4001 bp, Homo sapiens
atggcggctggtgaatggagagcaagagaccacaccaagtctgtttgtataataacttaatcttggaagtgacatctcatcatttctgccatattgtatttgtttgaagtcactcagttggcccggcggggtggctcacatctgtaatcccaacctcactttgggaggccgaggcgggtggatcacctgaggtcaggagttcaagaccagcctggccaacatggcgaaacccgatctctactaaaaaaaaaaaaaaaaaaaaaaaaaaaaaacattagccggggtggtggcgcgtgcctgtaatcccagctacccgggaggctgaggcaggagaattgcttgaacccaggaggcagaggttgcagtgagccaagattgcgccactgcactctagactgggtgacagagtgggattcggtctcaaacaaacaaacaaacaaaagtcggccgggtgcggtggctcaggaggctgaggcaggagaatcgcttgaatctgggaggcggaggttgcggtgagccgagatcgcaccattgcactccagcctgggcaacaagagcgaaactccgtctcaaaaaaaaaaaaaagttttggattttggagcattttaaattttggattagggatgctcaacctgtactcagttatggccaaaaaagtcaagcttcttgcacaaggaactggtacaaagatataaactttcagtaacttatacctaaatctgggggctgtttcaagttatctattgctgtgtaacaaaccaccccaaatcttagtgatttataataatactataataatagtttatatctcatgatcctatgggttggctgagaggttattctgctggtctcacctgaacttttttttttgaaatggagtctcgttctgttgcccaggctggagggcagtggtgcaatcttggctcctgggttcaagtgattctcctaccccagtctcctgagtagcgggattacaggtgcccaccaccaggcctggctaattttgtatttttagtagagatggggtttcgccatgttgcccaggctggtcttgaacccctaacttcaagtgatccacccacttcaacctaccaaagtgttgggattacaggtgtgagccaccgcacccggcctcgcctagactcttaagcatgcatttacctgtgggtcagctgagctggtgggtccaagatgtcctcacccacgtctggagctgggcagggacagctgggaactcttgtctcgatacagctctcatcgctctggtctagcctgagctttttacttggcaggcatgtttcaagaaaggaaaataaaggcagaggctgggcgcggtgtctcatgcctgtaatcccagcactttgagaggccaaggcaggtggatcacgaggtggagatcgagaacatcctggccaacatggtgaaaccccgtctctactaaaaatacaaaaattagctgggcatgatggcgtgcgcctatagtcccagctactcgggaggctgaggcaggagaatcgcttgaacccaggaggcagaggttgcagtgagctgagatcacaccactgccctccagcttgggcaacagagcaagactccatctcaaaaaaaaaaaaaaaaaaaaaagaaaaaagaaaaatagaaaatatcaaagtgcagcacatatatttttcttgaaccttttattcacttatataaataaactcatatatatatgtattgagtagcaaagtagtggtaaaaatatttcttgctatggggtcatggtgaaagtttgaaagcacttatttagtatatactcaggtgggagtgattacctaccctgtatctatgaagaaactgtgttaacatctacatctagttagagatacaagatgataaagaatagcaattctatgatttgggcagttttattccattctaagaggtttcaaagggaaacttggacaataagatttccttcctatacacccaactccctcactggaatccttagaaggaacaaaatcaggtggcttatgggctgggaaggcttattatgacagaagctagttgatcttccagctgactacagtcacagctctgagggcaagcttcacagtataagggcccacaccacctgacattatataagatcatcatttgtttattgtcagggtttctccactagaaagcagggtctgtgagagtagagcctgtctttctcattgctgaatccccagtggccagatcaatgtccagcacgtattaggcatctaataaacatttgtggaataaatgaatgactgaatgaagggggtagaggtagggaaagatgcctcatcccaagtaccatattttataattattgcttttcactgactgtactttgtaagctgtttccatctgtgttgatttttcttcaaattggttcagaacccaatcctgatcctttttccaaacactgttctcaaggatactttcagattattgctcggctgaacaaactagtgttactgaaaccaaacagcgctgcaaagagagaactaatcactctgcctttggttaacagccttgaaaacatgttattcatgaagagatcaggcagggtttgaggtaggtcagcctattaccatcactagaaacaacaaataacagcagaagaggactgcaggattgttcatttttctcaaaaagggcaatttgttagccagggggacctcaaaatgttgtcacctgagggtaaggaagaaatgaagaaagacacacaggggatatggctgctttttttttttttttttactttgaacattagcattaagttggttaccgtacacatccaaaggcccagcatctcagaaaaatcattaggcggcacacctgtaccagagtctcacaagaataaaatatacaatgctacattgagtggttaaaaatacacaaaaaagtagttttaacaatctataaattttttatacttaaaatcatgattgagttgaaataaaaaagtgcatttcaattgctaaaaaaataatatcggtatagttaacacaagggggaaatcagtacattgagggatctgacaggatgctggaaaaaatgactcagggaagccgggcagcatgggctcctttggagattcaggagcggagctcagttccacctcactgcagttccctggggccaagcagccctcctctccccagtatctttcccatcttaagagatcctgtcctacctacctgtcacctccccaacccaaagactcctctaaacttctttgcagcatgacagctgcctgccctacactgagtctacttgaccttcaattgcgtctccgcagagaggtaggagagggacactgccccattctggacttgacataagtaccccagccacatggccttcatccttatgacctagcaggcagaacagggaccaagcagcttctattttgtcaaactcctttggacaaatattcaacattcaacaacaagctttgtaaacctaacgctaaacaagtcatggcaagcaaactggattttcttaagaaatgaggaaaagtgcaagtgatctcagtactgttggggaaaacaaaaataaaaacaaacaagttgcacctggccacttgctgcctaaaccaatcacagcttcagttttgttttttgtcaagtgttggagttacaagtagacacctctctgtgcctggtattgctcaggttcagacttggctgggggtgaggtggccaggcagaaatcagttaagaaggccattccaggtgtaaatgcctcccggctctacagggggtaatatttactgtcgtcttttcccttcccaggttgattactgacctgtttgttgtgaagatgctgctgcaataagcacaaacagaactcatggccagagagctgatgaccacggataggagcccttagacaagtaactgacagagagggagcacacacagtttctaacctggagtgcccgttgcactggtcaggaggaagtgcctgacctagaggac

SEQ ID NO: 1887109 - DNA, 4001 bp, Homo sapiens
gcccgccaggtgccgccaggtgtcccccgcagagccgttgagaagcttctccacctcctcccgcttggctgggggcaggctgctgtagaggcctccgtcacccttgagggctgcagagaaaccagaggagagtcaggtcctacccctgaactcctttccccaacagtgggcactggggtgagacccaagaagggccgaggcagtgctcctccccatctggaggcctggggccaagacaaggtcctgggtggggcaccaggaagtgaaggcacctggggggactcgttgtcccttcctcctgtcactccagcccaatccctatccccatccctcctctcttcccccccagcaattaatcatggcagaggaggagatagggcttctcagttctagacaactacagcaagtgtcccggagctgggctatgggccactaattagggtacacacttaactacttgttccccagaagtccagggcaagaggctaattgcagctactttgggcaataattagcccccaggggggacaattagcttgatgagtctggatgctccaacttgtaaaagcctccatttcccaagtcgttcctctagagaggacctctccctcccattcccctcggccagcctctccatccatctacaggggcaccgctgagccagccctgccgcccccccgacagtccttcctggagtctaatcttaattgcttctgtttcctcagcctcagctccgcctcagctccccagcgggccgctgctcaccctggcccgaggctgtctgcgtgtggggctgctggtcatgcaggctctggctgtccacggagatgccactgtcgctgtggagtttttctccctctggtgggggcgtctggttcactggccggctgttggctccttgcttgttctgcttgcagctgttccacctggagccagaggacaggccaggtttcagggggcgaggggctgtagtggccgatgcagctgagtatctgtgctctgccgtgtgagggccaggggcatggcgggtgcccaattataaccgccaccccaccatctaaggctcctctttgcacatctgcccccacctaccctgaaagctccatgagggcagaggggccctctgtaagtgttcagtaaatgttcctggaatgagcagtgcagcaaaagtgactgctcaggaactcctcttctcccaatctacccttctaaaatactcccacatgtgggcagtgacatataaaaggatttcctctgcaattataagcaataacaaaaaactggaaaaaaaaaaaaaacaaatgtccatcaatggggactggctaaataaattaccatccatccatactattgaatgagtggttacaaatgatcagctaatctacattcctgaggaaaggtctcctgagggagactgagtgaaaaaagtaagctgtagaatatgtacaatgtgatctcactgatgcctaaaaagccctccatgtttacatgtaattataaaaggtttatatacatgtttataaaaaaagacacacagaaaatagttgggaaggatccatttcaaacagattccaataaggagagaagtaggatttggggagataaaagggggcttttactttttgctttgaaagatattggtcttgtttgcattttcctaaacacggatgtgttactttgatgattttttttttttttttttagaaagaatggaaaatgcatttaaagctttaaaatgccttctgggagttcgtgcacatcctggattcctggatgtgggtgccacagcattcccagtgtgacaagcgaaggggaagagacatatgcacacgcaggtgactgtggggtgaaggaggttggggatgaggacacaagcagttgggggtggggagtcagggagtggtgcggcatgggagtgggaggggctggagccaggacagggcaggagaggacaggacaggacaggtggatcctctcccctcacctcctgctgacctgctgcaccctggagtggggcggcagatgatgagtgaggatgagcttggtttggggttgagttaaaagggtgtgtatgttttcaggtcaaggtcacagcaaagtcttccttgagggcaaacatctcccctctctgtcgccaccgtgccctctcttacctcttgaaggctatgtaggccacaaggcccacaaccacagcagccaggatggagcaatagacagggatgaggttgtcggtggtgcctcgggtcaccacgggctgggagctgcccatcactgtggtcaccacacctgccaccgtgctggctatgaggtcttgttctggaggtgcctcaggctcctgggtgctgggggctgtgctgtccgagccctctgggggtgtggaccgtgtaatccaacggccagggatctctgggagaaaaggccacaggagtgaggacccacttcccccactcctcccttttagctctaacccactgccgtgttcttcctgtgtccccgccctggctccaggtgctcttgtgcccagctgttatgcacagctgggattgcgtgcatgatgtcatgatgctaaagagcaaggcctgtgggcccacagagctgcatctccttcagcttcgccactgacttgctgggtgactctggcccagcccccttttctctcagaaccttgatttccttatttatctaatggggctattaagagagacagtctctaagctcccttccatctggggctatggtcctggaattctattccacctcctgagtacctagagaggcctatctaggagcaaacacacaaagaagcctgaccacagggaggccttgagctggagtcactctgggaaatgtctctctggccccagcttgtccttgatgaccctagtcactcctgtcctaaggaaagaagagggtacacaggtctggtcagagaggtgcttcccccacaccacctccctgagagcactccccgactttttgacctcatgtctcaggctctaggcttgggtggaaaggaggggtgcgggggcagctggattgcctccctccagccagcccttggacagtggccagcctctgtttcctgtcttgcctggctcccacctagcctgatcctgccaaccagagatgacagcatcaggtagccccaaccctccttggtcaggaagcagagagccagtggagaaggggcccatgaggcaggtccagctcaatgcctcagctggcggggggagactgtgacttgccacccacctagaccctctcatgctagctgggcattgccagcctccctggcaggggacccagcccttcctggcaccagtgggtgggattttccattctgccacacagccaggggcagtgctaggggttgtgggctctggacggcctggggatacttgtctgggcaatgttgcctaccccgtccctcctcacttcccacgcctggggcagggagggaaagcaggcaggacatgccaatggggtgaaggggagggtaactggctcccagctctgccctcccagcccccactttgcccacccaagcaggagtagaagctgccacccatcttctggcctcttccactcaagatgaaatgcttcaaaggcccgttttcagcaccttctgaggggcaaagcccccagatgtgaatctagaatccatctggctgccagcagtgaggggctgccatctgtcacccaaaccacccttccccgtctccgtcctgggaggggccagaggtagtgaaggagacagagccctgtcttctggcagccccaggtggagcattggactggggagggtcttctcttgctctgccaggggactgggcaagctggggggcagcccaagtccagaggctggagacacagctcagctcagactgaccccaagccagagggtgaaggagtgtacatgtccgggtgcccaatgaatgagaccatcaccgagatcagagcatggtaggggaaggctgggagggtagcaaggcgtggccaga

SEQ ID NO: 1887110 - DNA, 4001 bp, Homo sapiens
tgtagtcccaactactccggaggctgaggcagaagaatagcttgaacccgagaggcagaggttgcagtgggccgagattgcaccactgcactccagcttgggcgacaagaccgaaactcaaaaaaataaaaaagattattctttcaagttgtttccaaatcacaagcggacaataaatacagaagaaaaatccttacctgcatgcaatgaatagctaagccaggtcctgtatacaatttcttgtgacatatatggcatttaaaatgctttgctttttggtgctgaataaggatcttctcatcatcaaaatctctattacaatacctgatcaatactgttaaggcacaaagacagcctaatgatgacactgcctataataaaaacatatggataacattacaatatgggaacagctaaaaccaaaatggtactgtatagaaactctgctttttatatttattacacaattagggactacacttgccatgttatttcagtattttcaatttcctagaaggccagctctcttcaccaccccaaaaaacacatctcaataatcagcaatatactttgtcaaattcctgtgtttaacagagatgtcggtgaaacttttgttataaatatttcaacatttacaaatgcacactgaggacaggaaagagttcagttaagaaatccctaaggttctgtcaagacaattacttcactagatatgaagacgatagcaataactggattaggaatttagcaatatttagaatctaagagtaactatatggtgaacaataatcacataatttcgaatgaacaatccataaagttgtttccaattccgtatgaatttatgttgccaagcaatgtatttaaattcacagatcaataaaatcaataaagcagaattcttacatcaataaaacagaattcttacctcactactcagattttcctaaaatcacattacaaaattcgtaaccgtatttaagctatttttaaaactgttacataaacgcagtactgtaacaagccgcctttacgtacaaaacagtaaataaaatcaattttaatgtaaagaatattaacgcttccagaaaaagcattaataccacactgtagtaagagttttcctaataagataggcactttttagtcctacaaagttgggtaacagaaactccgccctgtgagaacgcttcctgaagattaaggcgcctctgggtgagacacggaagctagttctcctcccgccccgaaaagaaaaaaaaaaaaaaaaaggttcgaaaccagggttgactaacttggttctttactaaaccgccaattcgaaaaaataaacacaaaacacacataaagtaaataaaaacagaaaaagtgggtgacagactgtgaagctgtccccaaccctccatgaaagtaataagcctatcgcactcgaagaaaagtcccttgttgaatcgtcaccaaaacaacggaaggtggctgaatagtccctaggggacactgtccctggcggaggggtccaggccgcctcccggagtccaaaattcgcaccgaacaagatcctcctgagtcacagagtcacacgacccacaactgcaaaagcctgtcgacctcggaaccccattttcctagaagccttcccaagtccaatcccagccaccaggccacccacgcagacgcctaaatacaaacgctccacgccgtaagccaaatccaggcctcctagtcccaggccccaacaaccggcaccccaacgcgacctcgacttcaaaccgacaaaggataccagcaccacggcttcagctgcttcttcttcttgcgacccataactgtgttctaccggcaaagtaaaagggaggagaaaagaagcaggagaaacgaggccaaaaatccctcactttcccaacccaacggctaccaccacgtcccacaggaagcagacacaaaatggccgacggcctcgttccccgctccgcctcccgtcaagcactgcggtaggaggcggagccaagaaggggagggtcacatgacgcagacctccgccctgagtgggtgggactaagaggcgcgaagaggtggcagccatcttgtccgtttcagagtttttcgctttcgctggctgtgcttgcggagcactttgggtttcatttgtaaaggagccggagccccaggtacgctaaggggcatgcgaatggaaaacagaaaacaaaaaaacggaaaagattgccagtgcagttagggccgatcacaaataaagatagagacagcgcccaattttaattttgtttcaattgaacagtaaatgttgattatgtgcctattaaatgctaaaccaaataagttagtctctgctttgtaactcgcagattggtgacagacgagtacacaatgcagagttctcagtgcggcgttgagggaaatgcgaagtgctgtaggacctcagagagcgggagtcctagggcggctgtagtggtagtggtcgttgggttgtcaagtaaagttttgtttttctttgttttgttttatttttctgagaccaagtctcgctctgtctcccaggctggagtgcagcggcgcgatctctgctcactgcaacctccgtctcccgggttcaagcgattctcctacctcagcctcccgagtagctgggactgcaggcccgcgccaccaagcccggctaatttttgtatttttagtagaatggggtttcaccatgttagcgaggctggtctcgaactcctgggctcaagtgatccgcccgcctcggcctcccaaagtgctggattgcaggcttgagccgctgcgcccgacataagaaaggtttcttgaggagtcaacgggagcaagcaaggtgaaggaaagggtatctccgtaagggagcaaagagtttaagtctttgaggctgggcacgtgaaaaactaatcgtggtaagactggagctgatagccgggcgcggttgctcacgccagtaatcccaacactatgggccaaggccgaggcaggcggatcacttgaggtcaggagttcgagaccagcctggccgacatggtgaaaccctgtctctactaaaaatacaaaaattagccaggcgtagtggcaggcgcctgtaacctcagctactcgggagaatgaggcaggagaatcacttggacctgggaggtgaaggttgcagtgagccgagatctcgccattgcattccagcctgggtgacagagtgagactccgtctcaaaaaaaaaaaaaaaagactggagctgtcagtgaaggtgctggtcacaagagataatcctagggaggctagcaaaggcgggttctggcgaaccctagaagcattctcagaagttggatttcagctgaagtctctgagaaggcacagtggttctaagagggcaactggaggatcatgcaagtgagaggtggttaaaagtccagtgcttgggttcatagtccaccagtgccactgcttagctgcctgactttgggcaaggcagttaaacttcatcttggctgcacttaaaacagagcttagcatataataataactagtaatgtaaattatgttactattaaaagcaaaaaataatagcagacatccatggagcacctaccgtgtgccaagcattgtagtgagttttaacattatttgtctcagcctctggggtaggagccattattgtcaacttgttaatagagatgagataaaagagacttaagagagctggaataatttgccccaaaacacaaagtatgtgtggagctgaattaaatttgaattttaaaggatcagtttgggctgtgcgcagtggctcacacctgtaatcccagcactgtgggaggctgaggcgggtggatcacctgagatcaggagttgaagaccagcctggccaacatggtgaaacccggtctttactaaaaataccaaaaaaaaattagccaggcgtggtggggcacgcctgtaatcccagctactccggaggctgaggcaggagaatcgcttgaacccgg

SEQ ID NO: 1887111 - DNA, 4001 bp, Homo sapiens
aaacatgagccaccgcacctgactgaaaactgtttttaaaagtgtaagctgatctactaagttcaaatataatgtcatcatttcatttgggttcaataatttttaaatggcattggtagatactgagattacaaagatgaaaagactttgtctctgcctttcaagagcccaaagtctaaaagtggggggaatcacacaaagacttcattttaattaaactttgttaggactaagagagaggtgttctttgggatcacaagggccatactaggaagactgggctttattttaaaagcagtcggccaggcgtggtggctcatgcctataatcccagcactttgggaggccgaggcgtttggatcatttgaggtcatgagttcgagaccagtctggctaatatggtgaaaccccgtctctactaaaaatacaaaaattagctgcgtgtggtggcacacgcctataatctcagctactcgggaggctgaggcgggagaattgcttgaacccaggaggcggaggttgcagtgagccgagatcacgccactacactccagcctgggcgacagagcaagactctgtctcaaaaacaaaacaaaacaaacaaaaacaaagaaacaaacaaacaaaaaacagtctctattgggaaccatggaaggtttttaaactggggattgacatgattagtttgtgttttagacatatcatcctggaagctgtttagaagactgatgtgaaggcagcagggctagtatcagagagatgagtgaggagacagttgtagtagtttgggtgagaaatgatagaagcttgaatgaaaagcagtggtgataagaatggagaagaggaggtcagattcaataaatatttgatagataaaactgtaggacttagtgtgatgaggaatgaggaagctggagaagtctaggatggctcgcagatttctagcttggatcgctgggtggatggtggtgccattaactgagaaaaggaatataggaagaggtttgcaggctgaaatgaagaggtagttttggataatacttaggtataaggcacctggaaaaggatggagaggatgtgcccagcaatcaatgtaactttgatcaagctatttaacctctctctgccgcagtttcctgatttataaaatggcagcattgtaacaagggctaacaataataaatatattcggccgggcacagtggctcacacctgtaatcccagcactttgggaggccaagacaggtggatcatgaggttaggagttcaagaccagcctggtcaacatggtgaaaccccgtctctactaaaaatacaaaaatcatctgggcatggtggcatgtgcttgtagtcccagctacttgggaggctgaagcaggagaattgcttgaaccggggaggtggaggttgcagtgagccgagattgcgccactgtactccagcctgggcaacagagcaagactccatctcaaaaaaaaaaaattaaaaataaataaataaataaataaattcatatttatatgtgtaaatttttccccaaattcaagcatttgggatttttcacctaatttactttggggaagttgcaaactatattaactgtttattaaatatgtatctagctctctataagaagacttgccgagtggtattggaggcatatttaaatttataagtgcagctttatgtaagccaactcaatgaaaatacagaagtaaaagaaagatcagatagtgataatctgctgccacaaaagactcagaataagattcttttaattagacattcctcctggtgaatataagccaatttactttggagaaattagacttacataaatttcaaaaataaagatagctaacttttatttttttcatactgcatcctaattaatatttttttttatcctcacaacaattttattgtggtagatactattagccttctcattttaggttaatagtatctaccgcaataaagaaacagaggctaagagaggttgagtagcataaccaaaaccattaatcaggtaagcaataagccaggactcaaacccagtcctctctgactacaaccaagagctgttgttatatatagagccatgtactctgattgtatataaagctgtggttaaatcaatttaatgatcaaaataatcatctggtctgatttatgtggaaattattgacccttcactattgctttcatattcctcttcctctttagcattctcagttaatttctaggttctgtttgtaatctgcacgtgaggtcccattatttccctgtccatcttcccttcctctcgttatattgctctattcagcacacaaattggacatgttcagtaaacaaggcaggccttggcttaaaacagcaaaatttgtgatatcttcagaagagctttcttcaaacccattcctgacctgtgcttgtggagccaggactgctgaaattactgttgctcagcccagcagcccgtcaatacagaaactttacagaggaaagcaaatgcacattcatgatgagatgggttggtggtgctggaggaatttgctgtgtgggaatggagatgtgaagagttgtttgttcttcataagagagcgtggctgtgcttctcccaggaaatggaaaggatgccagctgagcacaggcacctctagcactggagcagtcaagtacataggagaatgagcacagcaggattcctcataagatggagctatgtttgaacgagggcacttctggactcctcagacccacgtaggctatctaggccagggatagtgtctgctcatggttatttgcctgaatagtgaccaaaagttttgagaagaaccttgccgaaggacagaactttaaattaatttaacatgcagattttttgaatggttggactgtatttatcttttcatggtggcaaggcacctcaataatcaggatgcattgtgttcaggatctaatttcccaaatgtcagcatgcaatacatttcaaaagtcattcactttgcaatgtatttttcccattacactcatatggcagaaattattgcaaataatagcctaggaagttgcgatcgtcattatatcagctaaggggtctgactgggctgttgacagtgaaggttatttctactgaaaagagaaagagaattccacactagttcaaaaataaacatatttgatgtcttctatcaactgctcctccacctctctctagcttcatactttcccttgattcctcaagcctgtctatttatagatgcctgaatgtataataacttactattttgcctccgtgtattgcatgtaattctcactgcttagaaaaatctatgccccttcttttctgtatatttccatctaatctttaaagccaaaatttaccttttttcagatgccttccttataataaacacatcccaagtgtaatcattttttctttttcttttccttatctattgcagctttagtctacactacaccatatttcttgacgttactaaaatgtttctttggattttacctcaagttggtttatgggtgtgtgttttagcctccaattagatttttttctctggaaagctcaagggctgtgtcttttatttctttaacatccagaatagtacaatgactcatattagaatgaaataaatgacatacctgtgatatactctcaccagccttatacatttgacaaggataccaagaaagattttattaaagaggcatcaaatcaatttcaaaaggttaaagatgaaatatgaacatccaatctgtccttcatggatttttcatccaagaccttattaaagcttttcttgtttatatttatattagtttcctttatcaaatctcagaataacaattaacaaattgatggaagattctgtcttagaaaacaacaaggtcagtcactcattaccaatttattcttcaacaaatttaattatcccataaacatttattgagcatatactatagagacagcctatagcaga

SEQ ID NO: 1887112 - DNA, 4001 bp, Homo sapiens
ccggcctcctctctccaagaaaagaggtgagtgggatactcccagaatttggggacatggggttccgaaaacaggctgcttttctggactcaccactttgggcttgaatggtggctggatctccctgttctccagtttttcccagtcgatcctccggaagaaggcatgctctctcacgtccctctccccctcaggcccacagcccagccgcttggctgggtgtttggtcatcagctagaaaggaaaaggagaaaaggagaacaatggatgtcaagggcttcccacagacagcaccttccatttgcctagctctgcctacagccctgactttgtggacgcctggacagcatctcagagagctgaccaagacactcagtggcttgtacgaagtgaagccaactcacaaaaatgacattggcaagaatagcccttcctatggtggttttcaagacaagggaacaaggaagcaatctgaacccatggccaaatggaagaagaatttaaacagacatctcacacgttgtctgttttggagacaccatgctatacatgtatctagtaataaaaaaaaaagcatgcaatcactaaaaattgtgtgtgctgaaagcatcacagtctagcatcacagaggatgccataataagcatcatatgtctacgtattgtctgggccaaaatgttatcaatcaaagactcatagattagaaaaataaatgctataacaaggaaggcgactagttaattccgacttgcccactgcaggacacagagacaaacactgtctatgaactctctgaaggcagaagccagttcctcccgatctcagtatctcttccaagtgccttgctcttggatgacacgtgacaaatgcctcacaaatgatcacactcaccagatactgttaagggtatattgtactccatcttactaagcctgaaaatagctttgtgatctaactcttgaccattcaaaactagacaagtcatgaccagcaactctattcctagagcatttcctcaaccaaagtgtgtgcatatcttcaccaaaacacatgccccagaaggttcacagcagttctgtttgtaacagcctcaaaccaaagcaggaacaatccaaatagccaccagaagtagaatggataaggaaacgatggtgtgttcacacagtggaacactgcacagcaatatgacaggaggaactatggccccacacagcaatgcagacaaaatcctcaatcacaatattgagtgaaagcagccaggccaggagcaacactgtaaggttcagtttgtgcagagttcaaaacaggcaagactaatccatgctgtccaaagttggggggcaggttatcttggggcggggtagtgactgtagatgggacaggagagggcttccagggtggtggaaacatggtttcttgagctgggtgcaattacatgggtggattcattttgtgaagattcatttatcagcatattgatgatttgtgccaattgctgtatgtatgctatagctcaagaaaagtgtagcaaagaaagaactaagtcacaccaagtaagacaggagacgagagcacatactttctaagggactctgatgacatctggtagtccccaccacaattttatgaaatggattagaatgaaaagtgcggtacagtcattaggtgactgggccagagtcccaggaagtattgggattccaatccattctcttggccttcactttcgccactgtgccctgcccagtagaatggataaggaaacgatggtgtgttcacacagtggaacactgcatagcaatatgaaaggaggaactaaatcctcaatcaccatattgagtgaaagcagccaggccaggagcaacactacaaggttcggtttgtgcagagttcaaaacaggccaagactaatccatgctgtccaaagttggggtgctggttatcttggggcatgacaccaagccccaaccctcgatggccaaaatgcagtggtgtgggtttgtggtgtttctgccatctctcttagaagtgtggggaaagtatttctcctaccaaagctcttggtccatgatcacaaaaggtatccaaatcgacttactcctttgcagacagaaacagcctccttggacaaggattttggataggaaacgttgtgctccatgatagactgaaatagctcgtcttcatcttcaccatcaaatggaggctgttccggaaaaaaagaaagatgggaaagtatttaggcagagtaattcattcacatggtgcctgaagagccaattcagcaccaaggaacagaccaggtttctcagccccaccacaggctgcacagtttgctcagctaacttgacggtttatttgatcatctttaatgagattgacggttgtgtgtttttcattttttcccctctgtctcgttaattatcttgccctgggcaacccaaacaatctttagggaaagtgtttttgagtaatgtttttaatgatttgcaaataaattatgattaatccattaatcttgtaattatgtgctaaaaatctaattacgatcaagttaggttacagatggctttgtggtcagaaggtgggggtggccggtagaaaatgccaacactttcatttggggtgaaggggacttgagaacgtggcctaagaggatgttcccagtaattcacactgggcctctgacccaacaagcagctgctctgagggagggccttccagctgcacagcagcagtgatgggaccttagcttccattggactcctccctcatccgctttgactgggtttacagttaccaggctgagagaggaaggcacggtggccccgtgggaccttgtggctttagagtcaggtggatctggaccagaattctagctctactaacttcccagctgggtgtccacaggcaaatgacttcgttctttaaaacacagttctccaggccgggcgcggtggctcacgcctgtaatcccagcactttgggaggccgaggcgggcggatcacaagggcaggtgatcgagaccatcctggctaacatggtgaaaccccgtctctactaaaaatacaaaaaattagccgggcatggtggcgagcgcctgtagtcccagctactggggaggctgaggcaggagaatggcctgaacctgggaggcggggcttgcagtgagctgagattgcaccactgcactccagcctgggtgacagagcgagactccgtctcaaaaacaaaaacaaaaacacagttctccaacttgtaagatggggtttctgggagtaaagtgccttgtattttatgttgtacccaataagcgccgaatgaaggcaacttagcagtattattatttaagacagagcaactctcttgggaggggccttgagcaccttctaggaggaaaggctgagctcacaatgccctttgaactttttcctccagcatgtctgtagtcctgagggatccatcacttcccggtcactctggcgggatggcacaggaggaaagcgttcatgggaaattccgtaatgctccccctttggctgcgtaaccttgagcttagcgtcagaaaggcagagcaaggaccagcgcttgtacagaatcctcttgtttaatcttgagatgttcctttctcgtgggaaagaggagtcagtcactttggctgacacgggcaggtcacacagtgatggtgtttggcttaattttgaactgaatcctcgatcacaggtaacttcgcagtagtcagaaggatgcccttcttatcaaacattttctcccaagtcagaggcagccgttgagccaagtaggtccctcccctcaaccaccacccacaaatcacctcaacctgttcatccaacacccgagacctgacctcagtcccctgcccagtcctggacaggagccacgtgccctgagggaaagatgccaagtctacagagagccccagtgggaggacagagagaggcctgggtgtctggtaccactcaacattttttggtctgga

SEQ ID NO: 1887113 - DNA, 4001 bp, Homo sapiens
ggtgaaatcctgtctctactaaaaatacaaaatttagctgggcatggtagcatgcctgaaaccccagctacttgggaggctgaggcactagaatcacttgaacctaggaggtggaggttgcagtgagtggagatcacgccaacacattctagcctgagggacagagtgagactctatcatctcaaaaaaaaaaaaaaaaaaaaaaaagggaaggtcagtttatacccttgggcctgatttcctgactcttgctcacaagattgggactagtctcacaaaatacagagacttgtacaggttggcttgttcctgaaacaaaagcttctcatcctcccgaatgtagcagctttctaaggcaccagaaatgatcaagtctcttttctttcactgctctcagagcaaaagtaaatcccaaggaggcaagcgtgatcctacgcagggaagtgtcagtatgtgttctgaaaagatcactagtgatgacccgcgttcttaaggcagcggctcacagagctcctgtagcagactactcaggcaagcctatgtttgttcgtcactacaagagaggcgattttaaccaagctgagactccaagagccttttgtggtcctagaagattttaaggaatgtgagtaaagatgtgaattctgcacagagatttgcaataggcatgacaattcagaataaggagacagagaggaagttccctagcatccctcgctgaacatttctgccaattcaggcatgactgagatgggccatattgatagagcatcccaggagcatgcatgcctctggtccttacatggtgagatggagaagcctgcctgctactgagacagtgccttagtgggagcactgcccctcatcaccatctacctgcaggctggagggcagactgagaggttggtggctgccacgacacagccctgcacacaggggctgcttgacactcacaagggtctaacacctgttctagggaccttgttcagtgaccactctcactggcaggaagtatttcttgcgtataaataagaattcctgatgcaatttcaaccaactttcactcatttggtccttaggagggagaagaaacaactggctcatgcccagcttcctggcactgaatgggcacacaggcctcaggacaaactttcttactggttcttcaattaagcacctccccttttcctttttaccccaaataaatgatctgcacaaggtacctattattttatacaggttctttggcaaggaactacctcctagatactaatatccacattaccccaattctgtaactataagaggttgcaaggcttactgcgattacaattaagaatctaataatattttatagtagttacagacttttaccaaaattagtgaaacggaacctagtgagtgtctggatgtggtaaaccctgacagagtagaatggtcacatttgtccccacggtgtctgacctagagtgctctggatcctggaagcctcgacttcaggtaaataaccaccgcctcttgagggtgcagaagaacgccctttaaggccagttggggccatgagaacccaaaggtaaaacaactggtttatagttaggcagcatgccaacagaggttttgaagtttataattagtatttttaagaacaactgctctccgccactgagatataaacttcacttgccagccacgtctctgacaacctgcctattgaaagccagaaatgtaaaagctcacgctgcgaccgacccgcagagccgatgtgggaaatcacaaaacaacagccccagccctgcatgcagggccccaccgcagctttgttttctaagccaaatgtgctcactagagggttccacggatctgcgggagaaagaagccagacctgcactccatccttttacaattggaagctcaatggacacaaaacaatgatcaggagaagtttccataacaaagcctaatggacattgtttcagtgcccaagtggcagctcctctctggctctaggagctgatgctccaagtcttggcccaaacactacttccggccgggtgcggcggttcacgcctgtaatcctagcactttgggaggccgagacgagtggatcacttgaggtcaggagtttgagaccagcgtgaccaacatggtgaaaccccgtctctactaaaaatacaaaatattagttgggcatggtggcgcacatctgtaattgcagctactcgggaggctgaggcaggagaattgcttgaacccaggaggcagaggctgcagcgagccgagatcacaccactgcactccagcctgggtgacagagcaagactccgtctcaaaaacaaaacaaaacaaatcagtacttccatctcgaaatgatttcaggttgactatctgggatgttttgactgaagctcacaagagcggtctatatgttactccagatgggagcctgaagaatcagcagttaaggaagccccagcaggctctcaggagggaatcttgtcttcagttccaggtgatggaagaagccacgcccagcactcagccagccccgagggccctagctgtgggaacaggctgagcaggttgctgggaaacccagctaaaggtgctcgggcaagctcctgccctgcacctgctgccctccacagagcacacaattgcttttcttttctttttgagatagagtctcactctttcacctaggctggagtgcagtggcacaatcagagctcactgcagcctcgacctcccaggctcaggtgatcctcccatctcagcgtcccgaatagctgggactacaggcacgtgacaccacacccggctaattttttcttttcttttttttttttttttttggtggagatggggttttgctgtgttgcccaggctggtctctaactcctgggctcaagcaatcctccagcctcggcctcccaaagtgctgggattacaggtgtgagccaccgcacccggccacttgtttcttaatgagtgtctgcaactgctggggaggtgcgggtctgccggccagagctgcaggtaagtgagggtcaagctggttcacagagtgcagcaactcagctcagagtcctgaacacacagcccagccctctgaaaccatcccctccagcacaaggaaggcagcattctgcaaacgcatccatgggagcctcaggaaaataagttttagacaagtcacgtgttcctaccttccaggcagcaaagtcagtgctacagaagcaaagtaagggatcgcaggcctctggctggagggaggccaccaagactccctggattagtattcggtgactctaatgccatcagggtttagctcgacacctaaagcctactctgtaggattcgaagcacacagtacaacaaatatcctatggctttccaaatactagagcagagaattagttgttatagattagaaaacagggaaagggactctgcctctcgtatgaggcgaaggtttccttctaagcacacagactgagccgcccagttacgggttcctaatgctcacaggaggaaactcattctcatcatcaagacacactggtcccgtcgcaaactcatgttcaggaataacttctcctcgcagcgccccgccgtcctcagaataacctggaaaccaagaaagagacatgaaacaagcactggggatctgcttttatgccatgacctggcgggtggggagcgggggctcaaataaagggcaaaggaagcaaaggggctgtctgtcttccccctggaggtactgtgcctaggacaagtcataatcctcaccatctgccatctttaagcctgacctgcctttccacttcagatgcctgaggcatcctacctctttgaatttttctttgttgaggtagggtctcagtatgttgcccaggctggtctcgaactcctgagcctaagggatccttctgcctcaatttaacttcctgagtggctaggactacaggctctttggaaattttagtttagtttttattttt

SEQ ID NO: 1887114 - DNA, 4001 bp, Homo sapiens
ctacacaactgcgcctagtgcacaaaaatacataagagaagagattagaattgtgtttgataaacaatcctttcaaaaaatcaagtcttttcacctgaaaagtctttatacaaatttgggttcagattaccatttagatctgaaggtaaataacatatacaaatttacaccaacttttgtaggtttttaattttaaggaatgaaggcaatgctgagtcaatctcttgacagctttaggctgtgtgtaatggctgcacacgttttccttaaaagtcaggaggccacaaattaggttaccaatctgtttaatttcaaacaaaaaaagtcagcactatataacaaaatgaaattttacctcaaatatccaaatccaataatgaaatctgaagtcgttcacctcactaaattacaagaaatttgaataacagcaacaaaatggcacataaaatgaagtttgccaactgaggcaaagcttaaacaagtaaaaagttagacaaatgttacaaaataaccttttcaatagccagttgcttgttccaaggactcttcttcgatggactatgtggtcctttttccccaagtcctccgtttacactgcttgccgatacatctaggtttgaaaagaaagaagttcagcttaccttccattaaagtgcacatggtttcagtttcaggcacgtacttactaaggctctggtcaaaccagtagggtacagaaatgttccacccagccatgtttttaaaaggcccaattaggaaaatttcacaaaggctaccatcagcatgtacaagtttgaatttacgtattcctggccaaataaccaaggtgaagaaaggtaaggggaagaaaaaaaaagaaaaaaaaaagggctgtatccaaacaaaaacaactcgagatcagagaattggtctatatttcattaagataaattgtttcaaatgaaacatttggtaattgagaatactactttaatatctgagctacttagggccctttcctttttaaaaaataggaccaaacaatttaagagttaaagacacactatcctttccccacccagtgcaatacctgtaactttcttttggggttccaaatgttcactgcttcttattgcaattcttttgccacatccattagaatatgaagtcccagtcagtacaacaatagttgaactgattgtttctctaagaggatagtgcatctttaacatttaaagacaaacctgctccaatacacgcccacagaaactggtccctggaggatcagccaaatcagttaaaatctgcaatactggccaatattcttttatcaaacaggagaccgcagctttaaagggggaaaatgcagacgttggataaaaacagcaagaaatagtcattttcattaataggtctcaaacagtttacgaaacagccattattatctaagcttcatacacatcctttctgcagacccctctcttcagtattactcccaaaggtgagtaacctccgagcagcactcctaatgataggagtcattcttacattaacacgactcaaaaagacctaccccaaatcccatttatgaattagggttatgtgtctcggattcccagacattaccattttcttaagaggacaccgctccttcctcttcaggagacttggggggactcttcgatcgcgacctggatttggattccctcttggacactgggggaggactcctggaccgagaccgggacctggaccgcgaacgagatctggagaccgacgaggacttggacttggaccttcgtgcggatctggacttggaggtcgaccgagatcgagaacgagtgcgggaccgagacttcgagcggctgtagcgagatcggctgcgagacctggaacgactccgactccgggatcggctgcggcgacgccgcctagggctgcgggcgggacgagcaagcacagcggggttaattccaggcagcggggccggccccgcccgcgcgctcccgcccaggccgccattatctcgccgccagacgccatttccccagtcgcgaggcggggtcctccgccccgcgccgcccacaccccggccactcccgggtcgcagacggcggaagctcgcggggtggccggagggtcgcgagacgcggcgtgcacccccgccccgtccgggcccgcaccacgtgcttcgccgcggacctttgtgaggtcgcccgggcctcccgcgcgccccgccccgcctcccgcggtcccctcagccccgtttacctgcggctccggcgtccgtagccaccgcccccgtacctgcggggtggcggtccccggcggctgtggtgtgagtccggggggcggccgtagcgcgccatttgcacccgcagctcgcggccgtccagcacggccccgtccatggcatccatagcgtcctcagcgtcgcgcttgtcgtgaaagcgaacgaaggcgaagccgcgggactccttggtgtagcggtcccgcgggatgtacacgtcgccgacgcgcccgtacttctcgaagacgcgcctcagcgtgtcgggcgaggtgcggtaggtcaggttgtccaccttgagggaggtcataccctccacatcgggaggggggcggccgtagctcatagctctgagtggcggcccggagccccgcgaactggcgccggcttcctcagctctgggcggtgcgacgccgcgcctctcaggcagttgccttccgcgtggggacactgggaaaggccttgccgcagaacagcacggacgggctccgcaggctagcgcacctgagtaacaactgggcgggcagccggcctctgcgcccgtttatatcgctcctcacaaaatggcgcccgcgccacccggaaatgaaaccttctgattggcccaccgcgccccgcttcgtaacgaccctgccgcgcgccccgcccctacccgaagcgcctgcgcacagcccggcgggcgggccaaaaagcgcggagtcacggctggagggagggggagcggaattagcgggcagttggaaagcccgcgaaacgctttttccgcctgggaggccggacgatcgcgattgggcaggaggaagaggaggtgctccccatctgggcccccacctttttttcatgccaatactccaagttcacgccccttttttgctcagccgtcagccccgtctccgtctgaagagtgcttctgccctcatttgcctctccctgtgaccccggccccctcagactccgctgcgtcgtctctcggccccgtccagccgttcctgactgctcttcgccggagtccgcttcccaaccccctttcgccagagcccgagagctccgtcggctctgcgtcctggcggtggggactccccgcggagcgcttgcgcgtgccaggccacccgggactacgtttcccagcgggccgagcggccggcgccgcggctgcggtcaggtgacccggtcgcctggccgcagtgagtcaggctgggagggcggggccgcgccggctgctgcggctggcacttggccctttaatccccttcgtgggcccctcaacctggagcggataaattcttggcgcttctccgggggttgtgctcttccgtactcggatcgcttcttaggagtatcctaactgccggtggggagaacttcgccctaaacctggggttccgatccaggaactggaagttgacagcttggctgcctggctcctgcatctgccttctccactcaccatctcatttctttctccaggattgtcagtggcttcgccccgaggagagctgactgccctgggctgctgcctccggcagagctgagccaaaatgtccccggaatctaaaaagcttttcaacatcattattttaggagttgcctttatgtttatgttcactgcctttcaaacttgtggaaatgtggcggtgagttggaatctgtcctccctcctttgaagtgcccatcataatgcagtccagaaatgaaaataaacgttcattatatctaatagcgcgctttaattgca

SEQ ID NO: 1887115 - DNA, 4001 bp, Homo sapiens
gcactagatcttaactaccactagcccagcctctatcatttacagaagaaacacggatccagagagaggaagtgacctgtcccaggtaacagccaaggaccagagtgaggagtccagatcctccctccttgctcagttctcttttcacagtccctcaaggctgcttagggacaccctgccattcccttaggatgaccctgcaccctagccacaagcagccctcatcactccttcccctgtgcccaggcgcctacttggcatcctggccctcgagcaggctgcggtaagtagcgatctcctgctccagccgtgtctttatgtcaagcagcatcttgtactcctggttctgagcctccatctcgcatcggagctcactcagctgggcctccaggccaccaatgagcccctggatctgctgcagctgcgtggcatagcggcactctgtctcggccagtgagttctccagcccagctttctgggggagtgacagatgcatagacacatcaggctagaaaggaagccactgagggcaagcagggagggggcactgaatggagttcagggaaccacctcttgagggggcttgagaactccaaggcttaaatagccaggaagagtgggagcttctaccacccgagaggctgggatggggcgcgagtggccgtaccatgctgagctgggactgcagctcgatctccagctcctgcatcgtgcgtctcaggtctgtgatctccgtcttgctggtctggatcatttctgtgttggaggccacctctttgttcagctcctcagtctgtaggtcatgcacaacagaagtgagccccggggcctcctcggagactcagggacctggggcaggaagggcagggcaggatataaggcccaccttgctgaagaaccaggcctcgacatcccggcggttcttctccgccatggcctcgtactgctccctcatctctgccagcacacgggtcaggtccacacccggtgctgcgtccatctccacattgacctggccggccagctggctgctgaactccttcatctcctgcaggatgggagggacccacttagagacggagagcagaagagagacctgagagtctggcgtcacacatgccaatcctggctctgcccgtaacacaccccaaccgctgttccccattgcacatgaagaggtttggtcacatggacccctcagctctaaggagttctctgctgctctaggtcctaccaagggaggaccccgagactgtagggccctgatgtgagctcacaaagccaatcaggaagtcaaccattcatacgggccacctgggctggctgtgggcctgggctaccagacactgccccttcctctccatgaggacacctggttttgtggggtaggtgtgtttctgaaccactaagccccaggccaactatgaggaagtaccaacagccccactctgcctcccactgacttaatctcgtgaaaatctgggagggcttcctggagccactgtctttccctctgggcaatttaagtgagttttgggaagaggttccccacctctctcgggttcaggggtgatgggggccagctctcacctcttcgtggttcttcttcaggtaggctagctcctcattcaggccctcgatctgcatctccaggtcagtcctggccagggtcagctcatccaggactcggcgcaagccgttgatgtcagcctcaacgccctggcgcagggccagctcattctcatacctgaggagagggaggccaaagaaggaagtgggaggggtcttggctgcctgagtcagagccaggagaaggccaagtaaagtgggcaatgcaggaagaggagagagacgggggagcgcacttgagcctgaagtcgtccgcagccagcctggcattgtcgatctccaggatgacccgggagttgtcgatggtggtggccatgatctgcaggagacagagtcggtgtctagaggactcctctctctcccctgctgctctctgctctgcacccaaggccagcccctcattgaaaatcacccctcactgacaatcacccctctgacaccaccaacaaaaatctgtacggcttctggggtgggcaaagtccagcctcactttcagtgtccatttcttgttttgtcccatccagcctccttgagacacctgaggagctgccttccttatctccagggcacgaaagaccaaggaggcagtattgcctgtgggaattggttgcccaggagagtggggcagtggggtgcagccagctctgacaatagctctctcagagacactccaccagccccactgtggacaactcatggtcactgcctcctgcacaccttggacacagccatggatctacagaacattccagccagtagcaacctggagggcagttaagaaggcattttacgaatgaggaacccagtcttagggagtaaaatggtgagtgagtgggtggcagaatgtgtaatgagttcccaggtctcctaagacccaacagtacttttggcacaaaagacctctttataggaaaagacaagaggttctagcatctggaactcatgaggccacactccaatcccattcttgcaaaagaggtaaaggaatactttatgcagaagcctgcagggtgcatgaggtagggagggcgagttgctctttttttttaattatttttatttaattagatacaggttccactctgtcacctaggccggagtgcagtggcacagtcatagctcactgcagcctctaaatcctggacacgagcaatcctatcaccttggccccccaaagcactgggattacaggtgtgagctactgcctctggctctttataattgcccccacctgtgcccctgttggtcctaaccagattcccaagacccctctctccctcccccagcaccaccaagttgagaagatgtgcactggcctctgcacctggacagcaggtgcattccaaatttgctgagattacataccagacagtcattgcctgggcaggaaaggatttccttgagtcagcagtaacactgacattagagctgtgtacagggtaccagccacctgctcccctctctttgacatccgaggactcaccttgtcccggagctcttcaatggtcttgaagtattggctgtagtcgcattctgggctggttggggtctgcttctggtaccagtcatggatcttcacctccaggtcagcattggcctcctccagggcacgtaccttgtccaggtaggaggccaggcggtcattgaggttctgcatggtaattttctcattgccagagaggagaccaccatcgccaccaccaaagccaccaccaaaacccccaccaacgccccctccaaagcctccaccgaaaacactaccagcccctccaccaaagccacagaccctcatgccacccccatatcctcctcctgaccctgaagagacaaacctagcagaagaagctgagatacttcggcttccacctcccccagagagactccccccaccaaagccacctcccccagccaggagggaaccccctcgggttgagccacccccaaaggtggaggaagaagtttgcagaaatgtggtggtcatggccaggtagctggagcccgtgagttctcagcaaacccaagagatgctggcaggaggtaccaggccaggctgcacgctggggctccttatatacccttcagagggtgttgtgggacctcgtctcctcccctaaagcaaagccaactccttctgccttcctgacaaacacagctgcctgcacaccttgagtgggtcatgtgaagtttttctcttctatttttttttaatgcaacaaaagagatgattcagaattaatagtgtttttccccagggcacggttttaacacttggattacaggttcatctctccatgccagaagagagcagcagggagcgaactctcatcacagcacagctaccaaggcctctgcctgtactgagagcagctcag

SEQ ID NO: 1887116 - DNA, 4001 bp, Homo sapiens
tatcatcctcttacataaaacccataaaggggcagggcaaggtggttcaagcctgtaatcccagcactttgggaggccgaggtgagcagatcaccagaggtcaggagtctgagaccagcctggccaacgtgatgaaaccccgtctctactaaaaatacaaaaattagccgggcatggtggcgtgcgcctgtaatctcagctatttgggaggctgaggcaggagaatcgcttgaatctgggaggtggaggttgcagtgagccaagatcacaccactgcactccaacctgggagacagagcaagctccatctcaaacaaaacaaaacaaaacaaaaaccccaaaaatcccataatggtatcccattattcttaggccaaagaccaacatcctcgcctgagccgcaaggccctgtatggcctggccttccctatcttttttttttttttttgagacagggtctcactctgtcacccaggatggactgcagtggcaccatcatgactcactgcagctttaagccccccacctcagcctcccaagtagctgggatcactggcatgggtcaccacacccagcttacttttttgattttgcatagagacaaggtctcgtgttacccaggctgatcttgaactccttggctcaagcaatcttccagcctcagcctccaaaagtgctgtgattacaggtgtgagccaccgcgcccagctcttcacctttttagcttcatttcccaccattctccactttgctttctgggctacaaaggccttctttcagttccttcaccagctgcacctgctggggcactgtgcccagcaaacttttacccatccttcagattctagctcgagggtttcatcctcagaaaagccttctagtctccatcggatcttttttttttttttttttaataattaaaaaacatagaaatgaggtcttactatgttgcccaggctggtcgcgaactcctgagctcaagtgatcctcccaccttggcaccccaaagtgctcagattacaggtgtgagccaccacacccgccagatccttgggatatatgttcttacgttcccttccttcagagcactcactttggcttgaattatgcccttttttttttttttgagatggagtcttgctctgtcacccaggctgcagtatagtggcgcgatctcggctcactggaacctccacctcccgggttcaagcgattctcctgcctcagcctcttgggattacaggcatatgccactgcacccagctaatttcatgttggccaggctggtcttgaactgttgacctcagatgatctgcctgcctcggcctcccaaagtgttgggattacaggcattaaccacggtgcccggcctgaattatgacttttttttttttttctcggagttttgctcttgttgcccaggctggagtgcagtggtgtgtgtgatctcggctccctgcaacctctccacctcctgggttcaagcgattctcctgcctcagcctcctgagtagctgggattacaggcacatgccaccatgcccagctaattttttgtatttttagtagaaatggggtttcatcatgttggccagactggtctcgaactcctgacatcaggtgatccacccgcctcggcctcccaaagtgctgggattacaggcatgagccactgcacctggctgaattatgccctcttaagtgtgatcatttaaccttgtctccctaactgggttgtagttcccagagaacaagggccatgactgttttcttcatctctgtatccgtaacatttaacatgatgtcaggccaatgtatcaacaaatgtttattgaatgaaagacatgacagtaacattgtttatgaagttttgaaaagcaagggctctctgatactaactacaaccattttctttaaacgtaggtcctgtttgcagtatcatacatgatcatcaaactgctgctagaatgctcacacctgttactgcaaattcaaaacccaggaaagacttcttccgggaatttactttaggtcagggttgggctgcctggtaccatgctgcacccacaacttggcaggctcaacaacacaggagcctttccccagaccgtctgacctgaacactttgtcaccatgcttgacatacctggatgccctgctgaggtcacttcgaatgctctcatcaacgaggggcaggaagaaaatagtggttgctgcatgttttcagccaatcgtcgggggatatttctcattttctgttgaaaccttgggggaaaaagtaacataatgtgctttaaaaggacaaaagtcattcgacgcttaccacactcctagaaacctgggctaacccagccagggaccccaatgcttttctgctggctacggggcctccctacagctcctcattccaatttcggtggctgtgtgcggaccaagttctcttttgtcgcctcccgtccaagccctacttgcgatgggagaagccgtccccgaaatcccgggcgccgtggagggggtctggtctctgggtctctggtcacccggtcagtgcctccagcccccggcagagctctgttatcgtcccggggcgagcccaattccgcaggctagggccgatggcggcggaactgtggtcagggctgccctgagtcatcctgcggactgcgagtcggcgaccaccaggaggcgagagcgggtttcccctccaacaggccaaagcacgtgtctccacttacttcccactcccctgggcggaagtagctccgtcagcaacttccggccggaagtgataacttaccatagagatagcagctagagagtcgatgactttggatctgggtcatccaagccggacttaaaggggtcgcagcccgcgcggtgtgattaatggggactagagcctgggccagaggggagggccctggagcgagggaatcagaaggaacatcccatttcttgaaagcccgctgggttcctggagccgtgaaagcattatctctctactcctcatgcaaccctctgaattaagtgcaaagaccactcctgtcttgtagatgagaagtggggcgctccggagatgcttggttacttttccaagcacagccggccaggaagtggcagagctgggttcacacctaagtcatttctgctccaaacccaatgccctttccaccaccccaggtggcaggaaggagaaagctcaagagcagaggggctacgtgaagatgcaggccgtcctggcctattgggataccccctgaaaagcctattgctccaaaagacctggtagattcccgacagttcactgtctgtgggcacaggaagcaacgaacaggaatcttgctctgagtctaatcccacaaccaaggaagaattgctggaccttgtctcagaggcgtttgaaccagagcaactccatcttgaataggggctgggtaaaataaagctgagacctacttggatgcattgctaggtcatacagctcataaagaccttgctgatcaaacaggctgcagtaaagaagacggccaaaatcctccaaaaccaagatggctatgagagtgacctctggttgccctcactggtacacgcccaccagcgccatgacagtttacaaatgccgtggcaacgtcaggaagttaccctacatggtctaaaaaggggaggcatgaataatccaccccttgtttaacatatcaccaagaaataaccattaaaaaaaaaaggccaggtacactttgggaggccgaggcagatggatcacttgatgttgggagttcgaaaccagcctgaccaacctggtgaaactccatctctactaaaaatacaaaattagccaggtgtggtggcacacacttgtaatcccagctacttgggagtctgaggcaggagaatcgcttgaacccaggaggcggagggtgcagtgagccaagactgcaccactgaggccaggcatggtggctcgaccctgtaattccagcactttgggaggccaaggcggg

SEQ ID NO: 1887117 - DNA, 4001 bp, Homo sapiens
ggcacagcctgccacagcaaggaccgcgcaggatccccggggcgccgaatggggcagctcccgccatcacgccagtgcctcaggaccggggcctggtaccataccagccgcccctccctgaggacagcgcgtcctttcagcaggcaatgtgcaccctgccaggcccaagcccagcacctgtggagcctgcacataaaggccgggctggccgaatccatctgcttgtccactcattcattcattcactgatgcactgaagaccagacactgcccggtgtgggagctgccctgggggagctggagggcgggcgtggagcccaaagcggagtagggcccgcaccagcagggggctgagggagggggagggagggggaaggaaggggagagaggggacgcctcaggccagcatgggcagggctgggtaacaggcaggggtgcacagagcgtgcaggcgggtagggtaactggggtctccttccccgtgggctgtggcttcacccagccactttggtccctggctgtcccaagaggctgcagagtgagacagaggtgatttggcaagacgtcaccatgaccttggccagagccctgtgactggagaccccagccagcgtgcagtgggtgggcaggccaggaaggggcaccttggtggagaggtgaggaggggacagtgtccatgatggggcagtcaagtggcttaggggaggccccaaaagctcagggagggggcctggcccgtgggatctgagagttccccagaagcagaaggcggccagaccaaagcccgggagtggtgggggcggttggggaagcagcagaggtgaggcagggaggggcgcccaccccggggcggaccactcccctggcggctcggccctgccccttccgagtctacaccaggtgtgaatgaacgctccgggctaggcactcaggataggggcttccaggctgcggccgtgggagatcccagcaccaccgtcagcccctctgcctggcacggcccgacctacgctcccgtgaaggcagccaacaccccacccagaccctctccccagggacaggtactcaccaaggcccccgtctcaggacagaccccccggcatgctgaagacgggccgttggccctgtacgtatgccttgaccccaccatggggtccctggggcaccctgtcagggtggtatctcccccggtgtggggtcgccacccaaccagccacttgggctgctggcgtgtggccactacaggtggctccggcagccccctgacctcactactcatggccatgatttgacatgggtgggcaggtggcactcggcctcggcccctcacggtgccaccagggccgcactcaccacacattcccgctcttggtctggtccacgacgagcaggttgctatgcacctcgtccaccagctctggcgcgatccagcgcagaggcacccacagctggtcggcagtcacgaagtagtcctcctgttggcacagggacgggtcacccctgccggcgcaggccctgcccctcatgcccagcccagcccaccccaccccactcactctgtacttgcagtgagccaggccatagtcaccaatcttcaccgtcaggtcagccgtgagcaggcagttccgcagggccaggtcgctgcaggcaggggcaggggcaggggcagggtgagcagggtgagcagggtgtgccgggtgggggcagggggagggtcagtggggtgtgccgggcgggggcatccagcacagggtcctttgccaacacttggatggctcacagtccaggctggaaggggcgttggagacactgccaccccccatccctgcccagggccctactctgtgcccaaccctgagacctggggagggactgtgtgcgtgggcctcaaatgttacagtgcagaggagaatggggcctagagagggtgagaacctgccggaacccacccggaccggtccacgcttctccaggaccctctcctcctagctctactacactatcactctcggctccccaggaggtgggaattgatggggaaactgaggcctggagtgtcccaggggtcctgccggctgccggagtccagttttagggtccagccctgccatgcccactcagagctggagctcactctcacttgagccaccactggccccagggttgggtagggtctggaaagaatgcaggttacgcctggcactacctccaacccagcctgccttggctgctggctttgaaccctgcctggctggtcacgtgggtgtgaggaggcacagggtactgggtagatattaccacagctgccgtattacttctgtgctcaggactcagggtggggacagaggccaacccagcctgtccctccccacataaaacccatgtctgcgtgccaggggatcgctacagggccatgtgtcctgggcctagggggtggagtggggtgggttggggttgggggcagggcagctggggcccggcaggcaggtcgggaggctggcagctgccctcttcaacaaaatcactgatgctggagtcgcctgagtcatcactcagcaccaggatattgttggagaggacagccgtgcggcgtctggggctgacggggccacgtgtccttcgccacttcttccagcatgtccccccggggtccccaggggctgggcatcctggcccaagcaggacagaaccctccctccagggtccttcgaagcagggtctgtctccctcaagccccaaagcgagggcttagcagagtgtggggttggcgcggggctgcagggtgctggctgactgcctcggggacagagaacaggccagcttgacagtacgcatctcttcgtctaaacctgcaaagtgggtgtcaaaccattgtcttcccaatttttcaaaaacgtcataaaatccctctgcatagtggttgtctgatgctgcatgagatgaacctggccggtcctcgcaagccccctgaggcaggacccgccctatgcccttccttcaggggaggggcctggcctagggcttcccggccgctggcccgcgcccgccctcacctgtgcacgaaattgttgcgatgaaggtgcaggacgccacaggccacctcacaggccatgcgctgcagggtccgggggtcgggagccatggactccgccacccggcagctccgcaggtagcccttgaggtccccctgcagaaagggggtgtggcgcagtcaccagcaggctgggggctggccaccctgggaggtccccacctacctccccaactcctccacccctacccacagctgagggacagcagctgcccagagcagcctcgtgccctgcacagtggccagcacccagcagttcctggaggggggccgtgtcccccagggctgggctggactgaaggcttcctctccactgcccctcagccagccccgggcagcaggagtcccttggcctgtggtagagagagaaacacagggcccaagtggatctgcttgatggagtctggggctggtggtcgagggttggccggcagcccctgacctgccgaaagcccagccccgggacggtcaacgtcaggagtccagacgccagtgtgtgagggcccctgtcccgagggaagccagcaggggatccagcccagccacagacagcctcggctcagtgcaggagctgcatatgtggaagggggtggggggcaggtctcgggggagggggagacgggtccccggggcaggggggcgttgatgggcaggtctcagggggagggggggacaggtccccggggcggggggcgttgatgggcaggcccagaactccaggcagcctggggaagtggccaggcccagccccccatggcaaaagcaagcctgagtgaggccgtggagcccaagtgggccagtgcccccccccagttggcccaggatgcctcctcctgaaccacagggcacacaagcaggtgaccaagcagctggcagctccccaggggtgcagggagccccagcccaggcc

SEQ ID NO: 1887118 - DNA, 4001 bp, Homo sapiens
ggcggaaggtccctgaacacggagaaggtaaggaccccgcacctgacccggcctcggggctcccctcgctgccctcggtggcctccctccagcgcagggggaggaaagcggagttggggggctgctgccacgccttgctgaccaaatccactccccacaggaggccacactgcttgtggccaccccggggagcccggggcctgctcctcagcccccccccgccgcaggatgggaagcgtggggagggaatgaagccgcttcttagggactggtgggaaaacgccaagatactttgtgtgaagcagaaacaccaaggtcttcactcgcggaatgcgaggatgctggggaagataagcggggcgggccgggcgcgatggctcacgcctggaatcccagcactctgagaggccgaggcgggcggatcgcaaggttaagagttcgagaccagcctggtcaacgtggtgaaaccccatctctactacaaacacaaaaatgagccgggcgaggtggcggacacctgtaatcccagctactggggaggctgaggcaggagaatcgctgaacccgggaggcggaggctgcagtgagccgggatggcgccgccgcactccagcccgggtgacagggcgagactccgactcacaaaaaacccccaaccgggagacactcgagtggggcggaggcctcacctgagaggaatgaagaggatgccgttaatgacgttcagctgctccaagacgctggccatgctgggggccgtgaactgcggggcggggaaaccagcggtgagcggggctcccgcgctcgccgggccggaggggccgctccgccccggactcaccttgaggggcgggatgttggcgctggagccgttgcggtagatctcgttcatggtgcgctgcagggccacggcctgctgggtcaggcacttgaggtactcggagctttccttggtcttctcatggtcctcgcccagctgcggggaggcgggaagggatcaggcccccccgtgcccccgcggccccgcccccgccccgccacgcccccgccccgcccccgcccccgccacgcccccgccgcgcacctgcgtcttgtagatggtgtaaccctccttctcgtgctgcagggccgaccggaactcagctttgctctcgtagactcgggcgacaaggtggtggctgccgggaggcgcggcgcggggcgagggaagggcataagtgggctgggtgtgggggcctgactcgggggcccggggtctcccgtagatccctccctggaagccaccgaggggaacagcaagtccagggctcagggaagagggggaggtcgagagaaattttctcgggtggaggaagacaggagcactgggtctcttccccgcccccgccggctgccccgcaggcctccgccggccttggcgtttggacgggcggcccctcacctgagggccaccttgagggccttgggcccgtggtacttggtgctgacggccagcgcgttctccaggaagcgcagcgacaggtcgtactccatcaccccgtgcagcaccagcccgatgttgttctgggggcaggcggtggggggccctggtcagctcccggtcccctgggatggagctgggtccctgccgcccccccgccccagcactcacgtccagcagcgccatctcggggtggtcttccccgaacaccagcagcatgaggtagcgggcgcggtacagcaggctcagggcggtggacagctggctgctggcgaagcagtacagggccaggtgcatctgcgggcggggcggagacaggtcagggtggccgcggacccagcccctcgcatcccccggcgcgggcggcactcgcgactcacgtattcctggatggtgttggggtgctcggtgcccatcacccgctcgctcatcagcaccgccttctgctggttactcagggcctggggagagacagtggtggttgccgcggcgtgggaacccccactgcacccagagcccgcctggccccggcccagcagcccacggtgccgctctgcaggctcctgtcccctccggctgcgcccagcacagtgcagcaggggggagggggatcagcagcagctgctgccacaccttgaagggcaggtcacgctccacagagagctccacacacccatgtcttacacccaacaaaatctccacaaacacccaaatacaaacctaaaactactaaaaatgttacaaaaaaaaaaaaaaagcctgagcaggggtgggtcccttgaggtcaggagtttgagaccatcctggccaacatgatgaaaccccatctctactaaaaatacaaaaattagctgggtgtgctggctcacgcctgtaatcccagctactcgggaggctgaggtgggagaatcgcttgagcccaggaggttgaggctgcagggagtcgatatcacgccactacactccagcctgggtgacaaagcaagaccctgtctcagaaacaaacaaacaaacaaacaacccacccatttataaacagaagaaaaaacagtccctttgcagggagtagggatcctaagacatgctaaccctgaaacagccctggccaggcagggcacccagaaccccaccacagcctccaccagccccggccaggcagggcacccagaaccccacagcctgcactgggcacagaggacgtgggagctcggtggcatgcttcctgcccactcacggagtctcaggaggcgtccttgctgacgccctgtgggggggtcccctgccatcgcctcccagaactgacctcaccgcagcacagggtgctcctgagctctcccgctcgggacacagttacagaggggtggagccaggggtggcctgggcagaaccagcgacttcctggggtctccctggactccacccactcctccgtcaggggccccctcactccccatcccccaacacgaggccaggcctttgctgccacagcccagagggtacctctgcgtagtcgcccatgatgtagtggaggcgggcgaggaggcgcaggcaggcgcaggtctccacgtgcatggctccgtagacgttgttaaacaggttcagggcctcattgatgagctcacagccctccttcaggaagcctgcagggcacccccaggggtggcaaggtcaggacgggccatggggaacccccacctccacccagccccacctggccacacaccctgctgcactttggcctgcccgctctggaagaaatggaaggcatccgaggccttggggttgacgtgcttgaccacggggaagatgttgagcacgtcctcctcggtgaacgcgggcttgtggcgactgtcgaagctgtactccttcagcaggacctggggggcagcccccccaccacaggaagcctcaggcccaggttcagcgggttggcacctcccaacccaccaacgcttgcgcacagacggctaccgtgaaaaagccacttcccctgtggccctggccaggagtgggagcctgcagcagggacgcagcggggacacagcggggacacagcggggatgctgtgagccatgcccacctggatccctgttttcagcgagatctcccgcaggagcgttatcttctgcaggccgtaggtctccacagcctggtccacggtctcactgaggagggagcagggggcctgagcagcccaagcaccgccgggcccccccaacaccgccccacccagctccccaacgctgtccagcccgggcccccaacactgccccacccggcccccgggagcctcccggctgccctcaccctccagcacccagtgatctccacagctgctccctcttctctctgactccctggcctatgaccacaggccttagacgccatctgggagcaggtggtggccgcctcatctgcccaatcccacccaccccaccgcccctgccccgcacgcaccactcgaggtcgaagtcaaagtagttcttggcctcctggcagatgttcttccagagctcctggg

SEQ ID NO: 1887119 - DNA, 4001 bp, Homo sapiens
ggcatgaatggagtcagggagtcggcctttcacagaacaggaaacctcccccgcccctgtgccccctctccagtgtggcggcaggtcgggagggaggaggcttctttgctgtgagatgaccaggggccgggatgggggaggtgagacgtgccagacttcttgcagggagacccaagctgtagctcctgtcacacaacaggtcctggaagtcagtccatcctcccgtgccacccagggacctgatggggacagagctgggaggtgagaagggacaactgaccccatggaggccctaagggttgacacagcccaaccatgtgccctgggagcagggggaacaggtaggctggaggccatacagccagccctccccactcctcccactaacaaacaaacatcgggaagagctaagttaaaagttgtgtaccttgtggccggagggggaggggaagcctttccctaggtgctgggggagggcccaagcactctcactagtcagcacatccatcagctgaagacacaaaacccagattataaataatttcatttttaattctctgtacaaaacttctcaatctatgaaaataaagtttgcaaaaggcaaagtagcacaggagcctcaggtcaggaggctaagcacgctgacctacactatgtacacgtctctctcccacgacggagagagaggcctctggggcagagccctgcttgcagtccgggaaagccaagttggcttccgtcagcacagggaaatgtacccctctcttccctgtacacaggaggaaaaaagccactaaggtgcctgcagagcaaggaggggggccccccaaaatggctcggcccctgcagtgccccgatcggccaccagaggtcagcaccatcatggccgccggtcttagggtcaagatcgcgcccctcgggccttccaccgcgaaggcacacagcagccgcaggtcgaactgtggaggccagagtctcttgcactgccttcggccttcaaagcttcgacgcaggacagaagctgcacgggaccaaagtggctagagacaggggtgctgaggccggggacacggggtctagctggaagtgacagtggtcccaccgcccaggcgcatgagcatctgctgacagtcgtgcagcagccggcgatcgccaagcttctcgagtgtgcgcgccgcctcagccagcatgcccacgcgctgcccgggcgccgacaggaagccggggggcaggtagcaggaggccagcagcaaggcctccgcgtgctcccgccgcgtgggccgcggctccagctccgccaccgcgcctgcgcacacgaggatgtgtcagggatgggtctcaagctggccacgcccccgcgggagccctgcccacacacaagccacggcaccagccgcctgtacctggcacacaggtacctggcgggggcctggcgggttcccctctccccaccctagtctcagcccacacacaaagtccacagactgagtcacgcacgtgcagtcatgtatcccacaaatgacagtcaccccactgattccttgtgaaaggaattgtcatcaggtaaccatcaagaagatgcttggtctttttttttttttgagacagggactctccctgtcactcaggctcactgcggcctccaactcctgggctcaagctgtcctcccaactgagcctcccaaagtgctaggtgtgagccactgcgccaggcctgtctgtcccgtctgacacacacacagcctcccttggtatcacatcccatgtgcgcccttccctgctgagcagacagcacatccctggtcagcagctgccccctcacctcctttgccaccggggcctgcccgccgcctcagactgcggtcgaggagctggtgtgtccgtgtggggctggcccccgccatcagccgggccgtggcctcatgtaggaacacctgggggccaggagagtggaggctcagggctctccatctccaccactgcctgactccccgtcttgaggacagggccatcgggcactcaccctccgcatggcgggccggaagctctgtgccagccgcctcaggctgctcaggtcccgttggaagccacgcagctcaagggcggaagcctggggcctgctgctggtgccctgggctgctggggccggggccgggggctgctgctgccgccacaggctggtgcgcaccacaagaagcaggtcacacaggaacagctgcacggcctgggggtggcaggcagggcaggggtcaccagggctccagctctgggaggggcaggatgggggcccgtggtgccaggggccggctccgggctgcactgccgaggcactgcacccgcctcacacacgtgcaatgcaacagcaatgcaccgcggggccgcccgcctctctcggcccccacacccgccaccggcccgggagcagctgtccagccctcctgatgcagggcctccaaagggatcctaccacaccatccacccccctcctcccagggatggggaaactgaggccagataggggcaacccctctcctctggacagaagccttagccaaaaagcagggtctgctggaccccctatcctgtgctgcttgggctaaccccatggtcttctgcagcccctgggggctggggagaggaaccagggaatggaaagctgaatcccccagccctgccaggcccctgaccccacccctcaccttgtcaatggagctgctggctggtgtggtagccaggctgtcctgcaggtacccactggccttctcacagatggtcaggctggctggaccagactctgccttggcacagcccagcagggcccgggcagccttgaaggagtgcagagctgccctgggcaggggtctcctgttgggaccagggcagaagagtgccagtcagaccagtccacaagccctggctgagtgccccccacttccctggctcgagttccctgaggaaaaaaggtggtgactcctcctgcacagaacaaaggctgagtgaggcacagtgcccaggggatgaggaaggctgagcccgggaccaggcaggaggaacctgccgtgcactcactcagactcctgcagcacccggggcaggtgctccaccagcgggcacagccgctcagccgcctcctcatcccgccgcagccagtggatcaccacagctgtcagagaggcccaccacttggccaccgggtctacgcctgcagaagagggagggtcccctgaaccctcagtcacgctgcacgggggagctgagaagggagccaggacaggggccggggactcaccggtggtggtggccatgctggaactgatggagaagctgtaggcaggagcccccgcagcatcagaacagctgttcagcagctgcaggtacccgagggcatccgagaattccctgtggaaggagagagctggctgtcggaacagatggcaggggtcctaggagggtgctccccacctgccctccagagtacagcctggcccctggctctgcaaagtgccactgtctcctcccacaggctggtggggagaggaaactcagagaggaatgaagcgtgcatggcacgcacggtagcccagctctgggctctctccacagggttgaggccagagctattctcagaatcccgccggaggggccttgcctggaggagggcacaacgacacttacttgtccccatcagctgacccagggctggggttgggctgggtcacacagttcagtgctcgctctaagagatgttcccggaatagctgagtcacctgggccagggggtccactgtggagaggaggaggtgagtggggtggggagcagggccccaccctcctctccaagctaagggctttttcctgggtgggctggggccacacctagggccactgggaagtgccggcatgcccctgggtgcagcccctgccaaggacaggggaaagcgggtggacataactatcaccagcaccagccttggccaggagacaacactgaggcctgccct

SEQ ID NO: 1887120 - DNA, 4001 bp, Homo sapiens
tacccagggacacaaacactgcggaaagccgcagggtcctctgcctaggaaaaccagagacccttgttcacttgtttatctgctgaccttccctccactattgtcctatgaccctgccaaatccccctccacgagaaacacccaagaatgatcaataaatactaaaaaaaaaaaaaaaaaaaaaaaaaaaaaagagtaatgtagtcaccagagggctggtgtctctgctgatgcaaagttggcgcatcaggtctcaccacaggctaaatgatgacctgaccactaacaggctttcccaggtatgggaattcgaaaataaggggagtgcctaggggtaggttatgaggtaatggaaagaaaaaccttcactaaaatgatattaatgtttatacatccatgtcttctagtttgactactatgagtctttctctttgagaaacatgatggatcactgtaagttcaccagaataatgcagccttgtgaggcctcccagtggcccccagccagccatgcaccctcctttcattcaaacacctgcctctcgagttcagcaaccggcgccatcctaacacatagtggttgctgatccccctcctatgttcctaggacctggatgcacaaaagtgaagcaggagctgtggctgacagtctccttctggggattcctttctttctttctttttttttttttgagacggcatctcgctctgtcgcccaggctggagtacagtggcacaatctcagctcactgcaagctccacctcccaggctcacgccattctcctgccttcgcctcctgagtagctgggactacaggtgcccaccaccacactcggctaatttttcgtgtttttagtagagacggggtttcaccgtgttagccaggatggtcttgatctcctgacctcgtgatctgcccgcttcggcctcccaaagtgctgggattacaggcgcgagccacctcacctggccgggaatcctttctgtaaagcctgtcactgctccttcctaagcagctctttaagggactgggatcttaatattttccaaggatcccaggtcagagtttttcccagctccctcaactgaatctgaacccccacaggagaaatgtaaaccatggtacccatctgtacccaacattcgggagctcacctttcctgtagaagatcatgccagctcggcagcctcgcagggtcttgtgagtggtggtggtcaccacatggcagtgttcaaatggggagggcaccacgccagccgccaccagcccgctgatgtgagccatgtccgccatgagatacgccccgttctcatctgcaatcttccgtagccgggcatattccaggtttcgggagtagcagctggttcctgagacaggaaaggtgacacagctgcatcagagatgtccaccggccagctgagttggcttcacagtggcctctagatgtgcagatctgaaagcccagagatttcttcccttaaagtctcagagcaaaaatggagaatgccctcaaaaagcacctctgtgctaaaggcaaccactctaactcttcaacgtcttggtggttgagatggccccaactactattgccagcgcagtcagggcctgacatttctagatgcttctctgagaacagtctcacatcttaatctacatagcacaaaaagcagcaaacacacatctgtatcctgaaagaaactaatatatgtagaccccagaaactcagttatccagggcagaaactagcagtgggctcaacagggtgcgaacatctttccatcctcattctgtaagaggcaccaggctactggtgaacaaggtgactttccgccccgcgcatcacctgcgatgatcagcttcgggtggaagaggcgtgcgttctcctccagctggtcatagttgatgtagccagtatctgggttcacctgtggaatgtcagggaggcaggttcaggctgcttcctccaaccacacctgcctcctgtcctcccacttgaactggctccacccaccatgacaagaggaatgatgtcctagatgaggacttgagggtgagacaggatggatactggtgtgttcagcctgctcaaccaagtatggctcacagacccaggagtccctgaggagtcccagggttgtagtgagccctgctgctggggcactacctgctgagaaggaaccaaaaagcacctgcagaatgaaacaaatgtgacgggaccacacaatggaaaccaaaatggttaccttcaggaacaagaccaaaatgcctgctaatactacttctattccaagtataatgaggcaagaaaaagaaacaaaaggcataacgattaggaaagaagaaatttaaaaactgacattacacacagacaacacaatatacctagaaaatcaagatgctaggggccaactgttagaataagcaaatttagcaaggtcactggatacaacattgaaaaacaagaagtaggggctgggcgcggtggctcacacctgtaatcccagcactttgggaggctgagacgggcagatcatgaggtcaggagatcgagaccatcctggctaacacggtgaaaccccgtctctactaaaaatgcaaaaaattagccagatatggtggcgggcgcctgtaatcccagctacttgggaggctgaggcaggagaatggcgtgaacccgggaggtggagcttgcagtgagccgagattgtgccactgcactccagcactccagcctgggcaacagagcgagactccatctgaaaaaaaaaaaaaaaaaaagccaaaaagtatataaaagcaagaaagatagaaaatgaaatgtaaataacaaaaaccataaaaggaaaatcataccaaacctttacacaaaacatcattgcgttgtgtattttgtgtcacaaaatgcttgacaaattatagtaattaaggcagcacgcattcatggaagggcagagcatctggcttaaccagaagcagaaccacacacaacacaggtcattggatccatgccagtggtgacgctgcagtgcagtggggagaggatgaccttttcaatcaatggcactaggtcaactgggcatccatttggacaaaaatgttatctggatgcccgcctcacccacacaaatcaattccatattcagcaatcccacttgtgaatctatatcttaagaacttgaaatcagtatgtcaaagagacatgtgcactcccatgttcactgcagcactattcacaatagccaagttatggaataaagccatgtccatcaacagatgaatggacaaaggaaatgtgacacatatatatataaacaatgtaataataatcagtctgaaaaaagaaattctgtcatttgcaacaacaccgatgaacttggaggaccttatgctaagtgaaatacgccaggctcagacagacaaatactgcatgatctcacttcttttttgagacagagtctcactctgtcacccaggctggagtgcggtggtgccatctcggctcattgcaacctctacctcccaggctcaagcgattctcccactcagcctgctgaatagctgggaccacaggcagtgccaccacacccggctaattcttatatttttgtagagatggggtttcaccatgttgcccaggctggtctcgaactcctggactcaagtgagcctcctacctcgacctcccaaagtgctgagattataggtgtgagccaccgcacctggccatgtgatcttacttctatgtgaaatctaaaacaatcgaactgctgggcgtggtggcttatgcctgcagttccagcactttgggaggccgaggcaggtggaccacctgaggacaggagtttgagaccagcctggccaacatggtgaaaccccgtctctactaaacattcacaaattagccaggcgtggtggcgtatgcctgtaatcccagctattcgggaggctgaggcaggagaatcacttgaacccaggaggcggaggttgcagtgagtcaag

SEQ ID NO: 1887121 - DNA, 4001 bp, Homo sapiens
tcctagaatattcctgcctcagagcctttgcacttcctgtcctcgttgcacggctcactccttcctttattgaggactttgctcaaatgtcacgtcttttttttctttttttttttctagctggagttttgctcttgctgcccaggctggagtgcaaatggcgtgatctcggctcactgcaacctccacctcccaggttcaagcaattctcctgcctcagcctcccgagtagctgggattatgaacatgcaccaccatgccgagctaattttatatttttagtagagacagggtttcaccatgttggccaggctggtttcgaactcctgacctcaggtgatctgcccactttggcctcccaaagtgctgggattacaggtgtgagccatcgcacccggccaaatgtcttttttctttggagatattgctctgtcacccaggctggagtgcaatagtgcaatcttggctcactgcaacctctgcctctcgggttcaagcaattctactgcctcagcctcccgagtagctgggattacaggttacaggcatacaccaccacacctggctaatttttgtatttttggtagacagggggtttcaccatgttggccaggctgatctcgaactcctgacctcaagtgacctgcccgccttggcctcccaaagtgctgggattacaggcgtgagccaccacccccggccaaatgtcttaatccagctgctttctatccatccctcaccctgctgtctttctcttcacagcgtgtcaccgctgaccttatgttatacacctattttcttattgttttcttgtttgtccccctgactggaatgtaagcccccagagggcagagaggtggctttatattcagagatggaccctacacatccaggacagacccattgaggagggagggactggctgggctgcctggaaccttatacttcagactaactcttgcgcccacagtgccctgggcagtcctaacatccctttgtttgtgtgcccagagcatcagactccagccagccattatctcaggcgattttatctctctaagtatctgttctgctcctacgtgagctactttgaattcccaggcacccagcctggaggcgctgagcctgccaggagcttggtaagggtggctcagcggcacccatgggtggagtgagtggcaggacttacagagccgggacttcagctctgagggctcaggaagcctgatctcaccccattcctgctgggcttattcacttgctctaggcctggctcagagtaggtgaaccagacggacgctgccagggtccccagcccagcaggggacacagagaaggtgaccaacacgaagagctctttttagttggaaaaagtgctctgaaggcagccagcggagtcgagtgatgcaaagcatcagggtgatgcgctttacacgacatggctggggaggcccctcagaggcaggggcagcctgagagctgaaggatgtgggggccatcctcatgaagcgaggagagcagcgcccagtgctggaaggccccatgcagaaagttgccttgtgtgttcccaggtagctggggtaaggaaaccccacccaaagcagggtgagcaacctgcccatggtacaccagggctggaacgcagggccccagtcccagccagcctctgcccactacgccaaccaatttcctctctgctcacaaggctgagatccttatcatcacacacaacagagggtgggtgcaaaggtcaggagaatccatgagctgtgtccaagccttcccgaaggaccccctgcctctggcctctcccctccggccagggttactcaccccgccaccacctggggcgctgcgctgtatggagactggggctgcaggctccttgtagccaccataggactgggccaccggctgctgctggggctgctggtaaactggaagatgggaggagacagggcttggaaactgtcctgccaaacccagcccctcccagagctcccgagaagtccataccatgcacttccaccccgcccccaacctggctcaagccccacagctcaaaggctgatgtccacgtgtgcacatttgcctgtgtgttgtatcccacgcaggggctctgagccccatgacctgggggcctctcctttcaatcctcttggcccagtacaggcctgaccctggtgctcacgtcctcattctggatgagaatggaacttggggtcttgggaagcagtcttttcctcgcctgcatgcgtgcgtgcatgtgtgtgtgtgtgtgtgtgtgtgtgtgtgtgtgtgtctgtctctcgccgacttcctccccaccccagctggcccggcctcaggtcctctggtcccctcttgcacacaagaggcataatcgcctgttgattaagagcaaggctccggaaggtgtatctgtctgtctgtcttctcctggcttcctccccaccccactggcctcgcctcaggtcatctgcaccaacaggacctgcactcacccggggcactggtcgggatgtggtgaggctgctgctgctccaggggccgccggtagctgctgccgtcctgtgaatcccgacgctctggctccatgccctcgcccccgctagggcccatgcggctcttctcaaactcctcatggtattttatctgcaaggtcagaaggcactaggtgaagggtcccactgcaaaccacccagttccttcccgtgaccctcaagatcccaggatgggagagactacccaagagctttgggtacagaaagccaggtctcgctctggaagcaccagctgtgtgtccttggacaagctacctaatcttgccaagcctcagttttcacctctgcaaaatgagacaccagtctccctcagacactgttggagaatgcaatgaaatgaccgatgtaaaaggaccatgagaactgaagaatcagaccaaagtgagtggtcccttttctttttttttttttttcgagacggagtttggctctgtcgcccaggctggagtgcaatggtacgatctcagctcaccgcaacctccacctccagggttcaagtgattctcctgcctcagcctcctgggcggctgggattacaggcgcctgccactacgcccagctaattttttgtattttaatagagacagggtttcatcatgttgaccaggctggtctcaaactcctgacctcaggtgatccacccgcctcggcctcccaaagtgctgggattacaggcgtgagccaccgtgaccggccaagtggtcacttttatatgcctgcggcaggggcggggctgctctgtttccgcctgggtccacagtaaccacagcagcagcccgtttcctgagctcttactgcgccagggccgtgctaggtgttttatgtcacaggctcatgtgagctcgtcagcgcccctgaggggtagattgcagaccccatgtaacaggcaagaaggaagcgaagggattgataagtgaagtgagtggcccaagatcacagattccagagccttgctcttcatcaacaggcgattccacctcttgtgtgcaagatgtcgtgggtactacagcctaggatgctccgctgagaatcccagcctttagggataaaaactgccagaccctccctgagggcgggacattgtcttggatgggctccttctcgggtcaggttccaaaaatgagcagagaggcccaaagaagtcatatccctcaggaccaccccactaggcgggcatgtgaggctccaagccttcaagtcagtctcttgcccccacagtgctctactggctacagagtcccccaccttgaccaccaccacccaggagtcttgagttgggcctcatgttgtttgagggctgtgactgtgcctgcctggggctggctgcattagccatcaaggtcaggagggcaggggaggcaggtgcccaccaagccaagctggggaggggagggaagctgcactctgcccagaccccttgggtgctatggtggagga

SEQ ID NO: 1887122 - DNA, 4001 bp, Homo sapiens
gtcttacagcgacagccagggaaacgattctgacctgggaagggaagacaggtaagtcttagaagggaaataagctaatactggggcttgtggttgactcaagggacagcaaagaagtaaattttttgtgttcaaggatgtttggcaaaataagaggaagctcccttcccaataatcaaatacacaagttttgtccatagaaaactgagtgcttcccaacattcatgccttcgagtcaaaaaagcaggtgtggtcaagcatggtggctcatgcctgtaatcctagcactttgggaggccaaggcaggagaatcacctgagcccaggagttcaaaaccaggctgggcaacatagggagatcctgtctccacaaaaaaattaaaaaaaaaaatagccatgtgtggtgacacctgcctgtagtcccaggcttgatggatgtagggggatgaatggcttgagccagggaggttgaggctgcagtgagccataattgtgccacttctctccagcctgagcaacagagctgagatcctgtctcaaaaaaatttaaaaaatgaaaaaaaaagcaggtatactaataagaagtgtcccctagagattccccaacaatcctctccctcccactgaggtggagagtaccccagagaatatgaaatcagtgtgtttcactggtaaattgtcaccatcaaaacaagtatcattttgagaacagaatgcatccgttctatgccatccttctccacccactgcccaacccagcgcaaccacttctctgctgcggctaagatcactatctgctatgggttaggaggtatttcctccagcaaaaccgcctgggcaccaagttctgcaagctgtggggactgccatcaaactgctcagctttgagttgggaagggcatggtgggataagaagtaaaagataagtacccggatgtctctgctgacatccaggcccctgtcttctacctgatattaaaactccagctatgaaatgaaaatagacatacacagaatcacaaacaaaaaatatctgaataaaaaattttttaaaacagtattcagaaaagggaaactggggctgtaacttaaaaaaaaaaaaaagagtcccacatttcttttctttttgagacagagtcttgctctgttgcccaggctggagtgcagtggcacaatcttggctcactggcagcctctgccctctgggttcaagcagttcttgtgcctcagcctcccaagtagctgggactacaagcatgtaccaccatgtctggctaatttttgtattcttagtagagacggggttcaccatgttggccaggctggtcttgagtcctgaccttaagtgatctgcccgacttggccttccaagtgctgggattataggcgtgagccaccacacctggcctaatttttttatttttagtagagatgaggtttcgccaagttggccacgctggtcttgaactcctgacctcaagtgatccgcctacccaaagtgctgggattacaggcgtgagtgactgcgcctgctgccccccacatttcttaattctcccctagaagacaaagttgggaaagtatctgatttctgtgtaattgctgcttttagaatcatgaacctaaacgttttccagaaacgactctcccagatctcatgcacttatttcatttgtagaatccctaaaacacagcaaaggggatatcagaaggccataagcagtaaagggcacaggaatggggcaagcctagggcacactggagccaactgttttggtagactatacagaaaacgtagcacacttacagtctgggttgcactggcagaacttctcacagaaattctgagtcatgatgcaggggcaggtgctgtcacaggggcggtctgggtggtcgcagggttggtagttgtacacttgtgtggaagagttatctaggaaagaaaacagaggaggatgctgctgtgaccatactctccagctgtcttccctcccaagtgtccagctgccctgattcagaggaggctggtcctaacaatctccttggacacacatttagcacctgaagtgagaagacagggatgaccgttgttcataagctgcagtggggtgatctgctttgtggggagggtgtggagatggtctgggacaacagggaagctattctaaacattaaatgaggtctggaacctagcaaatggcacactagaaaagtcacatactggccaggcacagtggctcacgcctgtaatcccagcactttgcgaggccgaggcaggtggatcatttgaggtcaggagttcgagaccagcctggccaacatggtgaaaccccgtctctactaaaaatacaaaaattagccaggcatggtggtacatgcctgtaatcccagctacttgggaagctgaggcaggagaattgcttgaacccgggaggcggaggttgcagtgagccaagattgtgccactgcactccagcctgggtgacagagcgaggctccatctcaaaaaaaagaaaaatcacagaccacaaggcccttaatgttacctcctaagaggtcttctcagttgcagtgagaggctcagctgttctcagttgctgcagagaattctgcaatctgcggaagtggcacagggtcaacaagtgcagctggaggtggggtagggtgatgaccacagagtgaggcctccagctgaactgctgaagaatgccctggtagaacttacctttcttcagctgaatcttcctgcagtgtgcagcccacaatctgaaaaagacaggaaggacaggtctcagtcacggccctagggagctctgcaaatgcaggtaaatgacaacgtgacttgctctgagggactgtgtttgatgactggggagtatcttcccaaacccctcaacaggacgactttggtacacagaagctagagtccatcctaaatccagctggcctgtgctacaagagttaaacttaaacacaacccctcccaaacaagcaaataacataaaagaacacaacacagaaataaaagaaagcccaagcctattggtctattataaagctattgtttctctccaaatctctccctttgtctttgtggaggtggagatatgggggagtttcaagatggggaggtgggaaggcctttcaggaatcttctctgaaagaactgaaagggaggagccacagggatttccttctgtatctagaagtggtgtcagctccttcctctgataggtgatagtcactagggaacagggccagggtgcagaatttttttaaaaacttccaacctaagtaaaggctatcatgtaactcagaaaaacaacacaaaccaaacaaataaataaactctgatcagagttgagaaatgggtaaggtggtaacaaaaccaacaaggagaaatggcttcagggtggagccatgaggccagctcatgtcctattggccagaagcttaaatagaaaaacagacagttatggtccacagcactgggggacaagaagagggctgatctaaggcacagaccctcagggagcactcaggaggctggctctcagtcatgtgatgccaagctgatgggctcacacagcctgtgcggttgctaaagagggaggcagatgggaactccaaggggaggtcagagcacagggaacagcctggctgtaaaacaaaacactttgtccaacccttcttgcctgtgctttcttttcttcttctgtgaggggttcatgagctcatctgttggcagcttcaggataagtgattctttgactgcaaactgaaagacctggaagagaaatccaacgggcctgtcactcctcgagcaagggggtcaggtaagtggcccagctgggtgctggccttgggagggttctgagaaactcaggcagctgaccaagcctctcatcagtcagggagagacagagtgccactggaacattgggttactggctctgaagttcattcctaattatttatcctgactcaggaaaggagaaatac

SEQ ID NO: 1887123 - DNA, 4001 bp, Homo sapiens
cgcctgtagtcccagcactttgggaggctgaggcgggcagatcacaaggtcaagagatcgagaccatcctggccaacatagtgaaaccgtctctactaaaaatacaaaaattagctgggcgtggcggtgtgtgcctgcagtcccagctactcaggaggctgacgcaggacaatcacttgaacccgggaggcagaggttgcagtgagccgagatcgcgccactgcactccagcctggcaacagagtgagactccgtctcaaacaaacaaacaaaaaaaagagctaatttcccctcaagaaagagaaaccaggtaataatagcagctaatacttattgaatactatttgcccagcaaattcctaagtgtttctgtggtttgtcatatttgaactttataaattctttatgaggcagtttaacgttttacagaaaaaatcagaaaccaaggcttggagaaatgaagtaacttgcaaaaagttgttcagctagtaaatgacagccaggatttaaacccaagcaggctgactccaggcccataagcttatttaagctgcctattcagtcttctcttttactgtctgacttaatctgaattcttctgactttgcgggattttggggttttttattttttttaattatagagacagggtcttactgtgttgcccaggctggtctcaaactcctgctcaagtgatccacctgcctcagcctcccatagtgctgggatcacaggtgtgaaccaccactcctggcctttttaattaatttattttttgagacagggtcttgcactgttgcccaagctgcagtgcagtggcatgatcatagcttcctgcagctttgacctcctgggctcaagtgatcctcctgcctcagcctccaccacccaccacacccagcaatttttttttttttttagagacaagatctctgctaggttgctcaggttggtcttgaactcctgggctcaagcgatcctcccacctcagcctcccaaagcactgagattacaggcgtgagccatcacatccagcaaattcttcagactttaagactctactccatttaccagctgttggaccttaggtaagtcacttaacctctctgtgcctcggttcttcatctgaaaaatgatgtaatgacggtataccccgtacgggttgttacagggactaaatgaagtaatacgtgtaatgcacttggtattactatatagtaagtcctcaaaaaataccatttattattatatatacatattccttttctctgaaacagcaggagcagaaaataaggatctttcttttgctactgaaagctctctttttttgagacggagcctcgctctgttgcccaggctggagtgcagtggtgcgatctcagctcactgcaaactccacctcaccggttcaagcgattctcctgcctcaacctcccgagtagctgggactacaggcacgtgccatcacgcccggctaatttttgtatttttagtagagaggggtttcgccatgttggccaggctggtctcgaactcctgacctcaggtgatctgcccgcctcggtctcccaaaatgctgggattacaggcgtgagccaccgcgcccggtcggaaagctctcagaagtccacaatgtcagaatgctttatgtttccaaggagaaaacagggagccagatgaagtgactttcctaggttcacacgatgagtttgtggcagactacacagccaccataagaattatatcaccaaagctgcccaccttccacattcttgaccaccctctttccaagggtctcgctgacctgtgagttcctggatggtgacacggtccaggatcttgaaactcgtgtccagtttcaggggctggctgcagcgctggcacacgaagctcacctgcatggtgctgttgttggacgtcttagacccttccatccctgaggccgtggaaaagaggcaacattagggagaagcgacgcccttgacctccggcccggggttaccacatgccttggtgacgatggtaaagggagggaagtcccaacctgcgccgttccctctaggaatggtatgatacggggaggacctgcttccgggacagcctgagcaaaggcagtttagagcccagggtcagggaagggactccaataagagccgtgagggttcccagactcccttctaaggtcccacctcagcccccgatgctcttcacctcgggagcccggagcccgtcacccaagtccggtctaccgcggaggcactgtggcctcgggtcggccccggagcgaggcctccagaactaccatcgctctgtcttcagcgacttcccggtagccgccggaaaacttccgcccgagaccggacgtgacgctacgacggcagcaggagctcctggtccacaggctcacaggcccggcagcggcccccagaggccgggctgggaaaagcagcgggcttcagcggatgaacaaggttaccacgggaagtgtaggagccaaggccgcagagaatggggaggctccgctattctctaaattcagggggcggcgggcgcggtggctcacgcctgtaatctcagcacttggggaggccgaggagggcggatcacgtgaggtcaggagttcgagaccagcctggccaacacagtgaaaccccgtctctactaaaaatacaaaaactagccgggcgtggtggggcacgcctataatcccagcttaatcccagctactcgggaggctgaggcaggagaatcgcttgaacctgggaggtggaggttgcagtgagccgagatcgggccactgcactccagcctgggcgacagggcaaggctccatctcagaacaacaacagcaacaacaaaaggccgggcatggtggctcacgcttgtaattccagcactttgggaggccgaggcgggcggatcacaaggtcaggagttcgagaccagcctggccaaaatggttaaatcccgtctctactaaaaaatacaattagctgggcatggtggcgtgcgcctgtaatcccagctactcaggaggctggggtaggaaaatcgcttgacccccggaggcggaggttgcagtgagtcgagatcatgccactgcactccagcctgggcgacagaaggaaactccatctcaaaccccccccccccacacacacacacaaaaccaacaaaaaaagaaagtgatattcaaataaaagcttgaagaaggtgaggaaggaattcttacctgcatcttaaggaagagcattctaggccaagggaacagcaagagcacagagggtacctgtttggggattagcagaggctggtgtggctagaagatgggcaacgaaaagagatacagaaaatggggtgagggaggtaagagtgttgagctaccacctaggctcttatagggattgtaaagctctggctttcactttgaatgagatgagatgactgggtcttgagcagagggacttacttcatttttaaaaacaactttatggggtataatttacataccataagactcacactttttaaatgtacagttcaataatttttagtaaatttacacagttgcccaactatcaccataatccagttttagaacatttcccatctccccttgcaatcccccactgtggcctcccaaagtgctgagattacaggtgtgagccaatgtgcctggccaaaagtttttcatttcaataaagtccaatgtttatgcttttggtgtaaaagaaaccactgcttaacccaaaattgtatgtagtattgtctattttatttttattttgagacagtgtcttactctgttacccaggctggagtgaagcggaacaaacaaacatggctcactgcagatttgacttcctggctcaagcaatcctcttgcttcaacctccagtgtagcagggaccacaggtgatcactaccatgcccagctaatttttaaaattttttgtagagatgtggtctcacactgcactccagcctcggtgacagagcga

SEQ ID NO: 1887124 - DNA, 4001 bp, Homo sapiens
gagtcaaggaatcaaggtaccaaaaaatacgggagatggctgggaagagttagagacagctgcagatgcagcttttgcagacttcttgcccagctgtggggttgggggaggagggagcagacctgagaaattaaaggaaatagggggtggtgggaggattcaaggaaggctggagggatgtgtaagttaggagctcccagcacatttcttgaagcccaggttctgagcctggggtggccaggcttggcctctcagatgaacaggggagaccttttccatcaaatacaagctttaagcttcacaccatcttgcctgcctttccgccttcctgctggacaatggagaccagcagctcggatgcatgtgactctggcagagggagcctggtctgggaagcatccgagaatggcttcagcacactccccctaatggaatcagagactgggcaaaacagaggatgtggagaacggggcagcctcagcctgctcccaccagggtcaacatctcccggccctcaccgaccctttttccagattcacaacaaactgatgtgggctctaggacagacccctttacacacacacacacacactcacactcttttgcacacatccacagctgcacccatgctatgtacaggaacacacatacacatactctcttccacatacatcaagaccatttttaaaaggttccaaatctacccctaaaccctccctctcccagaaatgacaacagagacggcagccgagatcggtaggaaacgtctcgttgacagctcagagcttaaaaaaaaatatatacacatatataaaaaacacttctgccccctcccccatgaacgggtccaggcagctccttcctgcagggggcaggggagagggccaccagggcagtgcctgttttcttgaaggcaccgaccctcctcctccccatgttccctgcctccagttccaatgcaggggtccaggtggcaggcccctctgggaaggaatgggtcttccccaagcttccaccccaccttggattgggccgcaggtgtggagggcctcatcaaactctttgggaccccccacccccactctccggtccattgtccatgccggaaccgcaagtgcagaagtgggtggggtgggccaggctggtccggtgctggcttagtctgatagttgctgtccctggaggaggacccccaagggctgatgtctctgaggctgcagagtcctggcctgggctcctccagccccctacccccaccgtatttttttttttttttaaagaaagaaagaaagtgggggaggccaggggggcaagggacagaacatgggggagaaacaaaggtggtcagttggggaggggagctcctgggctctccctggctgccctggggtggggctgagcctcagttggagtcagagtctgaggagtcccctgaggaggaggagctggagctgctgccctcggactcattatcttcatcctcatcgtcatcctcgtcgtcgtcttcgtcctcgtcatcctcttcattctggggggtgagaaaggatgtggagtcaccaggtggccctcctggcaggactcccctcccctcccactgtgccctgtctgccccacctcatccccatcctcgctctcgtcctcgctgctggactcagaggagtcgccgccatcttcagaggagtccccattctcatcatcttcctcttcttcatcctcgtcctcgtcatcctcatcctcttcatcatcctcctcggactccttggagggatggaggcacatcagtggtctctggtctctgcccaaccattccaggcagtgccccccgccccacgcccctgcatctgggaggggctccttaccgacttggactgcagagtagtccggctggatttggggtttgggcctcgcagcttggtcatgctcttacgtttctgcaggatggggacacaaaggtggcagccatgagttcgacacccctgaattcccccacccctaccccactgctgctctgctcccagactcacattggagatgtactctttatatgctgcacggtcctggggagacaggctctgggggagacagaagcggcaagggttggaacatagccaactactgctgactgagcatgctggcccagtgctaggcagtgggctgagcatttatatatcatcaccccatcttacccctcccaggctccctagattttgggtctctgcagagagcccctgggatctgagaacacagctctaattttttttttttttttttttttttttttgaaacagggtcttgctctgtcacccaggctggagtgcagtggcacaatctcagctcactgcagccttgaccttcccaggctcaagtgatccttccaactcagcctccagagtagctgggactacaggcatgtgccaccacaccatgctaccttataattttttgtagagacagcaatctcactatgttgcccaggatggtcttgaactcctggcctcaagtgatccttcataccttgggctcccaaagtgctaggattacaggcgtgagccactgcgctggcccaaaccctagtatttctgcttctgatacccagagtccttctctaaaccactaagactattggttttcacattttccctgttgcttttcgcaaatggaagctcctatcagagtcttcctcactccaaagaagtgcccccgtgatgagtcagcctggcatcatcaaccacaccccaacaccaaacccttgagccatcgatgaggcagtggggctcaccaaactcctgaaacagcaaatccccacagtcttcctgggtccttggccaacctgccttggtgagtgggaaggacacaggtgattctctccactttacagatctgactactcaaccaaagcacagaggggaagcacaaaggccaggagtctaggagaggtcccgtggtcccagatgggggaggaaaaggcagtctgatttggattcttctacttactgtgtgaccttgggcaagttacttaacctctctgagccttggtttccttatttttaaaagggtgatagtggctgcggacggtggctcaagcctgtagtcccagtgctttgggaggccgaggtgggcggatcacatgaggtcaggagttcgagaccagcctgcccatctctactaaaaatacaaaaattagccaggtgtggtggtacatgtctgtagccccagctactctggaggctgtggaaggagaatcgcttgaacctgggaggtggaggttgcagtgagccgagactacaccactgtactccagcctgggcaggagagcaagactgtctcaaaaaataaaaaaaaaaataaaaataaaagggtgatagtgaccgttatcctgaaggattgcgagggcatggaatgaaatcatgaatgagaccagccagcacaagtgggtggatgggccaggctaggatggtgctggcttagtctgatgcctctctgttccttccaagggtcccttgccctctcaccttaacccagaggtccaggtgcaccttgtactgcttttgctgctcctcggccagctttttgtagtgctccttctggctctgggagatgcgctgccagcgactgccgatctccaccatgcgctccttcagcggcaggtggttcagctccccattggacagcagctcctgggagaacttctggtaaccgttcctgggaggtgggttggtagaaggagggtcaggaccccaacaaagcagccatccagccctgaccctccccgacctccagggcagactccaacccccaggctcacatgggaggcttcttgggttctccctggaatttcatcttcttggaagaatttgtagcagctggaggtgcccgcatctcactcagctctctctggagggagaaaggtcacgctcaccccccagtcccacccccaaaatactgctgccttctgcctcatgccatcagcaccttagctggctgtctttttctgtgccagg

SEQ ID NO: 1887125 - DNA, 4001 bp, Homo sapiens
ggtggtcccgacttgggagatcctgggaggtcctgtggtgggggctggcctcccccctcatacacttggagcttcttcctcagagcggctacctggaacagaagcagcccagcccctgagagccccagctaagcacaggaggggaggggcagacagagcccccgccacaccctcaagctcctgcctctggctgtcggccctccagcctgcccccaaggcgggctcctcacctcagcctggagctgttggcagatggtagcatactggctgatgtgacagtccaggctggtcacattgctcttcagctgagatggggaacaggagagagatttatttgttcattcaaagcagcttttatcagccaccgccgatggccaggcactgcactaggtctctcccacgtccccatgacccaccctcgcaagtggggagacacagcagagaaggtcagtatcatgcctgagaccacagcgaggggcagaagacccctgactccacgactaagaccttcttgccagggttagggtgttcttgcagtggtcccaggagagccagggctccctggggggagggaggaagagaggggtcaagcagatgtggcagaaagcatatattggtgtttatgttttgctgaaaatatgctcccactgctaaaaacaagtctgaactagaccactggccaatgagaggccaccctcctgccgtctcccttggttttggagaacatcttgcccctctcagctggtggcttcccacccagggatggggactgtgtcgcttctatcacaaagactctctgaagacagaggaacttcttttttttttttttgagacagagtctagctctgtcgcccaggctggagtgcagtggcattatctcagctcactgcaaccttcatctcctgggttcaagcgattcttctgcctcagcctccagagtagctgggattacaggtgcccaccaccatgcccagcagatttttgtatttttagtagagatggggtttcatcatgctgcccaggctggtctcgaactcctgacctctggtgatctgcccaccttggtctcccaaagtgctgggattacaggcatgagccaccatgtccaggccagaggaacttccttcctctgccttggggacacttggcccagggatctattggagctgcctgggtcccaccctttcctgctccccggctggagctgccccacgcccaagccggccctggctggcacgcaccgagagcctgatctccttggcccggtcggcatatttgagggtgttgtacgtgtcctcgtaggtcaggctggaggggctgatggcagcgatcatcactgtgcggcagttgcccccgagggagtctttgagcaggcgggtcagtttgctgtcccggtagggcacatgggtcttgcggccctggggggcagtaagcaggtgtggggtgaggcgactgatggcactgacccaggatggggccctgtggcctttggccctgggttcaggtgctcagttgctatcctggggagaatactggcctgtgctgctttacctttgcatcggccaaggcattgaggacgttgatgagcgccagcagagagcggttgatgttggccccctcccgcagccgctcccccttcgcatgggtgctggatgcccgctctgagccagccaggtcaatcaggctcatcttggccacctggacagcctgggtcagtcctggaacccggtcctgctgcttcacaaagatctgaaggcagatggcaggggtgagggggagatgggcatcaggggcactggtttcaggctctgacccatgacctcacctggaagatggcatgggagcgggaggaagtcgcgttggcatcagtggggtgctgcgtgcggttacggttccccctggtcagtatctccagcagctgctcggctgaggctggctacagaggagaagcccaggaacggggctgtgggttcccggatcaggacttttcccctaacaggaagggctgctcttcagaatctacatcacccccttgctaccaccaccactgctaccaccatcacaggacccagggcatccccaaacagttttgtgagggaaccccaaggacccatggggccgatcatcctacccgagcccaatcccacacctggtggaaagaaagtccttgcaccaccacccccttgtcggggtcctcgcggatggcaaggggccccttgggctccaggaggtcatggatctgttcattatacacctgagaaaggaagaaaggaagaggcctgagggagagcggcccatcaggaaacctctccctagcggctggacaggggagctgaggccgggatgtatctgagacacccacagaagtggcgcttcccaggactgtgttacatgaccacagcagggtgaacaggcgggtgtctctagtgcagcatctcactgagcagtatctatctccttgaggggtgccagctctccatttcctgccaccctgtcccacaccagctcactccaccccatgggctcacttccccccgggtggttgtgagaacaaggcccagggcaggggcagccgacctcctggtagctgatgagcacctcgaagtgcttctcctgctggcgggcctccaggcgcctgtacagttccacggtggtcaggtacatgatgccggggtccccctcccttcccagcatggtgtgtgtcttcccagccccggtggccccgtaggcaaacactgcagaggacatagtaaggaggaggaccccagtgccttgccacccagctcagcccttccctcctccctcaagcccctttccttttcctcctgtgttccctggtccattaatcccactaatcacaccctccatgttcccgctgcagggctggagttctctgtgtgtttgttctgttcccccataggccagtggatttgggatgacctgatctccactatgggtgcgggctatgccttccttctgtaggtgaggcagcttttggtgttgaaggctcacagttatctccctcttaccacttaccctggtttatccccacacactgtgggtgtgatctgtgagtggtgtcttctcccctctagactgtaagcaccaagtggacaggaactgtcctgtctgatttgctgttgcagtcctgggcccagtagagtgcctcccccatagactgaatgaatgaatgagtgtcccacagagcatgatgggacattgtacaaaactccttagtaaatcgtgcccagcttgggggaggcgggcacatgccagaagacacatgaaacccttcccttaggaggaggcagggaggccaggccactgccaggcagggctgaggttctcacctgagcagttgtagccctggaggaagctgtccaggacgctgtgcgtggtgtgctggaacacgtcctgttgggtggccgcctcgccaaagacccggtcaaagacaaacgtcaggtctttgcccttcttcttggggccatcatgggtgccaccccatttcaggccagggaaccctccatcgggctcctcagggttaaacaccagcacccgctcgtccaccacctgaaccactggccgccgctgactgtccagctcccgaggggtggggggccgcacccgtaccactacttgcagcgtgctgtcctccactgccatcactgtggtgacacctgggtgagacatggtggagctgaggaccaatcccaccccaggcctgaccaggtgccccctcagtactccaaggtcccctccacccactcccaatgactggtctctgttttatgcctcaagagagtaaaaatattggtgctgaaaccaattatatctctttctcacttgaaataccatctttgtcatactcaaatgactctctctctctctctctctctctctctctctctctctctctctatatatatatatatatatatatatatttttttttttttttttttttttttttttttttgagacggactcttgctctgtcgccc

SEQ ID NO: 1887126 - DNA, 4001 bp, Homo sapiens
caggaggggcccaggcagccctcagcacccaggtgagaccagcgcctggtgaatgggctgagtgggccaagtgggtgggctggggggctggtactcccaccacctgactccagaggaggagagggctctgcaggggatgtggactggcactcgcagaaccccaaggcgagtgaggtgggccctcaggagcgctggatgcggatttggatgaagagcgtggctggtgacagtgaggccccgtccttggaaagcaggtgtatgtggcggtaccctgtagggaggacagccaggcctcaggtcctctgtgcaccctgggggtctggcccagcccgggcctgcttcagggcaggaaattcgaggcacaaaggtgaacagggtctgcaggacctggacccacatccctctccatccccaccagcctccaccaaccttgctttaggctgctaagaggcagtgtaaactggcccacaaagtcattgggggaggtggcgtcataatcttccaccacaaaccggaccagtgccagctccggagcccgcagctggaactgcagggtctgcccccagcgggggttgaagcctagggcacagggatggcagtcagagcccaggggccccaggacccaccctgcaccacccttcgctctctgcagtctcccccaaccccacttccgccagtggctgcccaccattgttgagcacgtagtcagtctcctgccgggcacagtctgcgggcaccccatggatctcaatgcgcaccagggggtccacaatggagtgtggcttctcggcattcagcttgggcagctgctgtgcagtcagcacctgtgggtgagggagggagtggctggggcccacgcccaccttggccatcccctcatgggcctcaagctcacaccaccctcacttccaaatgtccccagcctcccttgccttcctccacctcacaaagagcctttctagaaccagtctgaccccacactggggcccgttccagcctgctgacctggatgctgagagtggttctgggaggtcctgggtactcggggtcaaaggtcgagtcaggttgccgcaggcaggcaggttttaggacgtagccacactgcccattgactaggaagcgcccggcattgaggtccatctcgtagcctggcgtctggaagttcaaggccactgtggacacagcagggtcagagcaggggctcttagcggccctgttctcactactcagtttcaggggactgcattcctctctacaaagggcctggggtcccactgtctgcttagtgctgctctgctcccaccatgactttaggggagggggtcatggacccagcccccactgtcacctgtacttctgccctgggatccctcaagactggggtgggaggtactaaaaaagcccccaccctcagggccaggcttgggtcagagccaggggtctgaggaagcctggggtttccatccttaccccaaggagacgatacagccctcctttggtggggctcagcgtcccccagagcccacccttgtcagtgttgacttagtgggactgccaggtgtgtgggggttgtgtgtgtccgggggacatgggagtggagattttaatttctaccatgataaaaatgcgagacctgtacactgtcaagaacaaacgagcctgatttgattttcccacctacattgctggcaactttaaaaataatcaacaaaatgcgtgtttccaccgtctggaaggctgtgtgggcccctcactgctgaggcctcccccacactgtggcaccccgcctgctctcattcctgtggcccccacttacccagctgacagcccgagttccacatctcctggggactgtagttggctgagttcatccgcagccccagcgggtacacgcgggtcagctggcgggcattgtgcctgacaaagctgttccctggggcagagttggggtgagaccgtgacagactccgggggtccctcacccaaagccccggcctgtaacctccagggaacagagcccaagcccgtccccaggtcaccctgcccccgctcctcactctcttctgacctagagtgagaggggagctcactgaggaggctgcagggaccccctccagccacacagcctggccctgcatccccagcccccaattcccagctcctgacaaagttccaaccaagtacactgaatgcccacggccctccagctccactgtggttcctggaattcttctccaggccaaggccccaggccttcaacaacctgttcctcctgtctggaaagcgctctcccctcttcacctggctgcttcctagtcctccaggtgatgtgtcctctcagcatcacctgccccaggaattcctccccagtgttgcagcagctgctgggctcccccagcccccagcccagcctgacccatcaccctctatggccggccccaccacagggctctgaaggcagacagcaggccgccctcagcgtgccactcccctccatccaccctggcatgtgcggggccctcattccctcagcccagcccctctttggggtcctcttgacctctttactgtcccccaaagccccctcaactcctttccagactcccttcaggaggtctctcaccctctcgcccccagacacccagtgccccagctcctacctgcctcccgaatgagtttcttggctttgcgctcgctgagggagctgacctggcagggttgtggggcgttgggggcagggtgcagggtccgcaggcgggtggcgtggcagtacacagccagggccgacagctccggggagatctgcttggcctaggagaccaggctcagcggggttcagctggcccccgcttcccacatccgtcctcccaccttcccccccttccccaccccacccatcccagctctcaccagccgcctctgcgctgcagcctccacctcctcttcttcctcctcgtcatcctcctcctcctcctcccgatccgacagagcccggccatcctcgctccgagcagcgggcaacttctttcccttcaccaggacccggcccttcagctgctgtgggggccaacgtggaggatgaagggttaggccttctcgcccctgtggcagccagtcagtcagttattcaaccaccgccttgtgaggggctggctaggggtgggaggcaggaaaggagacacagagatgagcgatgtttctaataggaaagagtggagaatggcccgggaggccatcaggaagggatgcttaataaggtccctcaacatcagaatatacacagcagccactacaatgcacgcgacagctcaggactgaaaggaaagggaccctcttcaaagaagatcttacgtggaagaagtgaggctacaacctggaatcacatgtccttttttggtaccatttaaaagagaagacagtacacatatgtacacaggtaatgtgtgtggggaaattcttgaaggacatgcaagaaagttagagatggttacttcttgtgaaagaggacaggtcagtggagggaggggagcactgctcatcgcgtcccttagtacagctcagttttcttttaccatacgggtgtgattttcacagtaataacaaaaatcacatctcacacacacacgagggtgagtcaaccctgcctgcatgttggggattggaagtaggaggagagttttctcaaggagcccgacaggataaatgtctggagagagccgaggacgcgctctggtgtctgggggagagcaggaggccgcctcaggcccgagagttggggaagtggataaggccacaggaagaggcggctgaagttgagctgaattctaagcaggtgacgcttggcaagtgtggatggccgagaagggacttccaggtggagaaagtgtcaagcggggccttgcaggtgggaatggcagagcctgcaggactctacgggcagggacacagggccagcagggcaaagccaggttacagaagagggtgtgtgtgtgggggggtct

SEQ ID NO: 1887127 - DNA, 4001 bp, Homo sapiens
cagggctagcaggggtgggaggcagtggggttaacagatcccacaagtcctaacttttcaattgtaaatgttattttctaagcagagagaaatgcatatattttaaatggaatttattctatcaactgcctgagaggacacaatgggggaggggcttcggaccacagcaggagccccgactgcccacctgagggcagggagagcctgaccccattggcccaggccctggctctgtaaccattaacctcttcccccaactaacaccaatgaaaacaccattccacgtgactgggctgtgtgtttgcctctgtgacatggggacccctgaccctaggggtctcgcctgagccagacctgagggacccacccgcgtagatggaggaaggtttaggcctccctttgccagccaccgccgggggtgggcagaccctggagtggccttacagaccagccacaggtatttcttagcaattgacacattttaatacaaaccagtctacattcattcctaaaaggctcatttccagtaaaaaatatacaccagtagaaacttctcccagaactggggcagaggctgaggagacctgggccagattccccaagactgacaggcagccagcttgagccaggcacaggaagaggctccagggcgaagcgggggccctgctccatcttcaggttcaggcgggagactcccccacagagggagggaggggaggcactcggggccacatccaggcaagcaccacccccctgccctccacggcagccttgggagttggacgcgtcggccaaggctgctgctgttgctcctccaaagaaggttggcttcaaggccgtgtccagggacccacgagcagaggcactggggggcaagggatctccaagggggcaagggatccctaaagggggtagctcacaggtgagggggtttagggcccctctagggagcgcctgaggccatacattcaagagtgtccctggtgaggcccagggaagagccaggactggccaagggcccaggccgtcagctcctccacagtgagccccagggctcaggaagacagcggggtctgacacggggagctgggtttccagtgccacgggtgcaggagcaaacctggaaacattcatgatacaaactcccctgttcagaaatgggtctggctttagccccagggacgggggcaactacagccaccacagccagtggctcagaagggagagttcatgcccagcttagtttcaaactgcagcttctgtcgcttctggtagcggactcggaccctggtggggcaggagattaaagtacaggttggcaaagatccttagaccaggggccggggcaggacaccagaggaggagggagggatgggcagcggaaaggtgggggagtgtcgccaagggagtaacaggtttagggaacatgcctgagcccagagggaggcgccctgctgacagctcaccgaatctcatgtagcttcacgatctcattggtcaccaccacaaggaccagggacaggcagcccaggagccatgtcagcaggggcacgtcctccaggccaaagtggacgtggctgtccctgtgtgtccacagctgcaggtccacagccgtctggaccacctgacccagcagcctgcaggaggtggcggccccgtgtgaacccgacactgcttgcttccttccctgctcttcccagtacaacagttagctcaggcagggtacagttaaaccactggccccggtcccgccctccgatcctagccctgcagaaggccctctcctccccagcccacactccgccctccatcctagcaatactcacaccacaggcactgtcacggcccaccagaggttggtcaaggggctctttctccacaggggcttggtgcgatgcacatgggtgatggaaatgaagactggggaaggtggggcgatgtgggggtcagacttccacagtggggctcctctcccaccatcatccacgccctcccagggagccctctcaccagtgtgcaggacaatcagggcggccgtgagcttctgagccgacagcagtccattggcaaagtcctcaaaccaggctggagccctgtcgtcgttgctgccaaagtgaggcatgggctcagcccctctagggccgcagggaggtaggctggggtggggagggaggaagcctcgaggcgaggcaggcgatgggtggatctctggggctgggacccacctgggcagcatgacggaggagcagttggtgaggttgcggtcccgggagctgtcacagaagctctgcagtgtgaagccaaagcagatgaggcaggagctgatggtgaggctgaacttgagcaggaagcagagcaggaagtagtgctgggtctgcgggaacaaggccagtcactcctggggcgcacagcccctctgccggctgctcctagctcttccacgtattcaacgggctcttagtaaatggtcaggcctggggggatagggagctcaagccccagcaagggtctttcccagctctgtgccactacctcctctttgatctgggggaagactaggaaccaagtgccggagttctgctggaatcccccatccagagccttccagattagcccctctctcctcccccaatcctcagtcccttccatgctcacttgcaaggctcacagggtctgttttgcttaccttcttgggaatggactggaggtttttccccgttgccatagacatgatggagctatgggggggcttccccagcagagagatgctgaaaagcagagatcaggtagagggatggtgacaatgaccctctgtccctcaattctcatagagggaacctctagggagtcttgcgcgtgaggtcgagtctggtgaggggatggaataaaacaaaggctggacggcagtggctcacacctgtaatcccagcactttgggaggctgagatgggcagatcatttgaggtcaggagttcaaaaccagcctcgccaacatggcaaaaacccatctctactaaaaatacaaaaattagccaggcatgatagtgggtgcctgtaatcccagctactcagggggctgaggcaggagaatcacttgagcccgggaggcggaggttgcaatgagcagagattgcaccattgcactccagcctgggtgacagagcgagactccatctcaaaaaaaaaaaaaaaaaaaaaaaaaaagacaaagggggttccctccatgcctcctgtaccagaggaggtgagacctgagcagttccagaaccttgggctcctggggctgcacagtgacatccagacacctcctgcttaggcatggggtgtggggaagatacatggcatctcacctgagcagagggtagcaaaagcaggacagccacaggatgtcggtggtactcaggagtggcggcagctggaccaggcaagaaaggaactagaccaggaaagaagccaagagccacagttcaattcaggcaaataataagggcataggagcccccgagctcccttgccctgggcccagatagatgctcacatcctgccagagggaacaggggccggagggaatactcttctgccaatgagggtcagctcaaaaagcccaggggcttcacagaggctctggggggaccccttgactgtactgctaaccccagcctccttcctcagattttcagctggcccctgagtgaaggggtgagtggcacgggggcaatgcctgtgcgggccccacctcacctggatgaccacaagagtcagctggcactgcagcaggaagaggaagcacttacggatgccataggtggcatgccgagcctagggaccaagagggacagattatggcctgggtctacctggcctctcccaggcccaacagctgacacactttagccaagagccagacgcccaggatgcttctacgaggggagcagaggcgaatgtaactgcctgggagagcccgctcggagggctggggaatgaggtccccgggttcaaac

SEQ ID NO: 1887128 - DNA, 4001 bp, Homo sapiens
tgcggccacgccccagccagcctccctggtggggcctgggatggaggcacccagctatactcaagcctggagcagagtccatctgctccttatgcaagcagccccttctacagctgaggaaggcgaggccctggaggcggggtccttgtccagctgcaagccctggtcaggacggagctggctcagggccccactgccagctccctctccagggacctgtgctctgacagccaaccagcccacaagccccaggcaacgccaaggactcatctgatggttctaggctgctctggaatattcaggtccatgttaggtccacagagagtggcccgagctctggaccacagcctggtgtagagtttccattgggagaggccacaaagggcagggcagggcaggccagggctgggctggggcagacacccttgctctagcacggccctctggttagggcaggcacctgtgccatgtgcctggcgctgtgggccaggaggccatgttttgccctggcccgtggagggagccacagcttacctcactaaaggggccaccagagggaggaatgggctgagagtctgtctccgggagggggttctggaagagagagaatgagtggggcctccaacctgtcccgcatccaccccttccaagggaccctgccactaggaatgccgggagtggccccctcacctccaccacgttggtgggggctgcgtgcccttccccaggctgtgcagccggctccgtcaggggcacgggcgcagatggcgtggggctcttgcgagcctcctcctgcttcttctcccagtagttccggttgagataccgtgcgagctgcaggcaatgagggggtcactcccaaggccagaaaccgtgagaggatgcaccccatgctgggccttacctcagggtcgatgtcctcagccagaggcgccgacgagttctggggagaaaagggcatctgagtctcacaggtgacagagccagttgcttcggcagggacagggatgtccccagtgcgacagatcctggagaccagagccgcagcctgggccctccctccgtgccctcctctggttcctggcatctgagcagccatcttttctcctcttccagatgcttagaactccacagaggctgacagcactgccgtcctacaaggctcctaaccttgctatgggaggaacagggtggcactgggccagccctggggcctcaaggtggacactggacagcccccacggtccagcgtgtggggccccagccgacagcccggaaggaagggaagaagggaaggggtggctcactggggcagggctgttctgcacccctgggcctgcagcggcctggccactccacggaacctacaaaatgactttctcaacctgctgtccccgacccaaccccctgcaaaacaggctgcctcttcaccctctactgagagcggggctgaggccagggagaggtgacgtggatgccccagaaagcaagtccttcagttcctgtggggcgggaggggtgtggaagagacggggtctcaccagcaaggcgcctcccccacagcctgtcccatgtcctcagtcccaagggccgaaccagggaccaggagcaacgggtgcctggagccgtggggctctgccctgatgtccgcccgtgtgctggggctgtcctctctgggaagcccggggacccgcatcccccaccaacctgactaaatcagctcagggacccgcgtcccccatcaaccctactgccttccaggagagggagctccagcccaagggccgctcaccacaggtgaagagtacaggctgctggcggggggcgctgaggaggccgagggcatgggctccgccttggggtacgaagtgtacgtggacttctgtctctgaggcagaatcagaaggggcgtcacttgggtgcacgtgacgcccctccggccccaccgcagcacatccaggggagctgggcccctcctgaggccgccccgccccacccggcttaccagcctctccttctcctccgcctctgactgtgacagcgccagggccagctgcagctcctcctcctcctgcagggccgtctcgtccctcttggggggcagctgaggacaagcggggagggtgagggggggcgccggggaagaggtgcccacgggacggagggggctgagtacctgggactgctgagacagggggctggtcaggtactcggggggcagctcagtggtggaagtggcctttccctccgctttcctgtgggcacaaggaatgctgcaggtcaccatgcgctgacaccgccctgcccccgccaaagctctcaaccacacctctgcgggctcctctaagtgtccccacagagtgaggacagtggttccacagccacaggtgtccgaatggccacactccagagcagagcagggcaggactcgagggcatcacaccagccacaagggctcgggtgagtccctcagggtaagccccagttcctctcctgaaaatggacattcaggacaccagcccggcctgcgaagaccttcctacggcactcgggaaaccaaacacagcaccgccactgtgggacgggccccacccaagaaggggcaaacaggtcagtgactgtcatgcccagtaagctcttccggggcgccccaggcagtccaagggccgcaggctcacagcatggtcgcaatttccaaccacgcacgctgacctttgacctggggctcttttcttttttttttatttgagatagagtcttgctctgtcgcccaggctggaatgcagtggcgccatcttggctcactgcaatctccgcctctcaggttcaagtgattttcctgcctcagcctcccgagtagctgggactacaggcatctgccaccaagcccgctaatttttgtataaaatacaaaaattttaagtataaaatacttaaaaagtagagacgggatttcaccatgttggccaggattgtcttgatctcttggcctcgtgatctgcccgcctcagcctcccaaagtgctgggattacaggcatgagccaccgtgctcggccgacctggggctctttcctaagagaaaagtccacaccgaggcagacctgcacagcccccagcacagggaaacggcagcaagtgtgtgtgaaggcaggaatggcgctgggatgccctgccatggagccgctggctcacagcagactcacgcttgtgggcagtggctgcgacggacgggacttgacgtggctcaaggcaagttcttctcagttacaagaaggaaaaggaactttccgggcagcggcccatcaccggacatggctggcttggatgggatgtcctgaggagggcatggcctcactcctgagcttcccgaacctaagcaggtgggagcctcagacctgaacagggggccaggtggccacggcctgacctcccagaaatgtccacggagcgagacagggaggcagtgacacgttccaggaaaagggaaccaagcagggagcacggcccacatacgaaacacacgcaacccaggccagacccacagcgacgctgctgggaccacggcagaaatggaacgtggaccacagagcagaagccagcactgggtggcagcgcagtcccgagtgactgctgtggccatgagagcactgtccctctcagagatcacaggcgaagatctgagtgccaaggggcatgacatctgcactcatgcaaattcaaaataaaacctgtgtgaacacacgcacgcgcaggagaggggaggcagagtaaactctgcgacaaaacaccgaccgccgaggcaccggccgcggccccgcaggttcccaccgctgaggcactggccgcggccccgcagcttctctgtgctactcttgcaacttttctgtaagttttattccgaaagttgaaatgcaaacaaacccaaacccaaacccaagcaacaggtttgtcggggcagcctcggtccctggagccgcggcgccctgtctctcacacccac

SEQ ID NO: 1887129 - DNA, 4001 bp, Homo sapiens
tgcgggctgcccccagggcccacggctccacccaagcctgtgtctcggtgtctcagcacgcaagggtcaccctgtctgcctctgagcttgtggggctgggaggtgttctctcccctccatgtgtttcagctgggggcatcctccctcctcctcaggggaaccaagacttaagaggctaaaaatagcaatggctttgtggagtttgggtttcggttggtggcaggagtcacgctggtccccacggagtccccctgaggcttccagtcggcagccccagaagccctactgtgttcagtaccagccctgtgccctggccaccgcggactccaagacatgagccctccccaagcccaggaccccctcgccaggcaggcggagcctgggcaaggctgctccagtcagaacttaatttccctcacgtgttagctcagtcatccttcaaaaaggagaggccccaaaatgcaaaagccggctgttgggttgcctggagctgccgcgtggtgcccaggcagagcctggaggagctgcccccccccgggcccagcccctagccaccctgcctgtctggacacactgtgccggacggagcaccccactcctaatggagacccgctagccccagcagaatcagggttggtccagcacagtgcaccccctccagctctgagtcccacactgcgggtggctgccgaggggtgcgcgtcccccccctcgcaaagcgggcgtctgacgggaagggcaggtgtggggaactgcctgggggcgcagcgctcacctcccgaagggggcccgacgagcacggccaccgcctccatcagcagcaccaggccaatggcactggagaacttgtgggtgcccacgatggccatgagcacctcgaactgcagggcccccaccatgccgtaggagatgccaaagaagatgcagaagaccacgaggccgccgtagtcgcccgccgtagaacccgccaggtccgcgaggccgttgaagaacatggagaagctgaagaggtagacggagtagggccgcaccttcccaagccccgccacgaagcccgcggccggccgcgcgaagatgtcaatgaagcccaggatggtgagcaggaaggcggccttggtgtcgggcacgcccaggtccttggcgtagctcaccacgaacacgggcgggacgaagagccccagcaccatgaccgaggcggccacggcgtaaagcacaaagccgcggtcccggaagacgctcaggtctagcaggcgccgggagggtcgcggcggccccgagcccggctgggccgtgaccaccaggggcctcatgagtgcggcacacacgcagcagttgagcagcaggccgcccaggatgaggaagccgccccgccagccgtagcggtcctgcagcagctgccccagcgggctcagggcacacaggaagacagggctacctgctgccgccagcccgttggccatggggcgccgcttgctgaagtagcggttcagcatgatgagcgagggctggaagttgagtgccaaacccaaccctggaggaaagggaatgtggtgagagccccccaaggctgccccaaagcccgagaccctcatctctgcccccaggttcccacaggctcaggctcccagggtgcagagcccctgccacccacccactcgagagggggacaacgaggtggggccgggacaccccgcagccacccgccctgctgtcctccagaggcctggacccaggagcagaagtgcacggcccctgcccctcctggcacgtgcggcccaccggccggccccactcacccgtgatgaccccagtggtgaggtagacctggatgatgctccggcaaaaggacgcagccaccatgcccagcgacgcaaagagaccccccacaagcatgacgggccggcagccaaagcggttcacgcacacactgcagagcggacctggagagggcagcagctgagaggggccgggcctgcagccagctctacccccgccagccgactgagctcacagcctggagccggcctccccttcccacaccacccctccccccgcggggcaccaggggcaccccgtgggcaggctccccgagcgcaggccatgatgacacgtgagcgccgcctgctgggccccttgggtccctgcagctcaggaacagccaccttttcaggaacggctctcaggagcctgtcctctgagacggtctataaatacagccgacccgtttggacaggggccaggatggacttcgcgccctgcctgggttggccccgtggagagcatgttgctgcccagcaggatcctggccccaagggcttccctccagggttccctggggagcaggcggaaggccctgttgctgagcccagctacacgcgcccagcaggatccgccagcagagccccggacagggggcccggtgtgaggccaccctcacctgtcccgtagagcatggccagcaggatggaggagatccaggctgtgtcgctgtagccgatcccaaactcctgtatgagctccttgaagaagacactgacggccttggggaaggcgtaggagaagccagtgatgacgaaacagccgaagagcacggcccagccccagccgccgtcaggggccttgacgcctgtggggccctcgtccaccacggcccctcccatggccaggagggttggttccgcctcacctgagagagaaagcaggctgactcaggctgcccgggtgaccatcccagctgcagcctggcaggggagggacacgagctgggtggcccggcagctcagctgaggggcagctgcccggcacccacacttgtggccccctgacctggtgtctggtggaggcaggagggtttggagggaggctagcagctgtgggtcccactccctctgcactgcctcctgcaccctcacagctggctctaaagggcagtggcttttttgggctcggccaggactcagattacctcctgggacaagcagcccccgacaggaacatcgacctggccgtcatttctgccctggctcgctctggctgacccgtgctgggcagggaccacgcacaccatgattctggcagcagacggcacctccggtccccagcactgagctcgccccaggacctctggggttggcatcctccaggtctctcccggtctaaatctaggtggagcgtgccttgctctggctctcctgcccccaagggcccactttggcttcagtggagcccaccaggagcttgcccaagaggaggcgggcagtctctggcggtgaggggctgggccccaggctggagggggcagttggaagcacaggggctgcagtattagagtgggtggggtggggaagtgggggcagagctggccccttgtccctggatgcccccttgcctcccaccggccctcttgctcagtgactcctccagtgagatcttgactcaccccacctgtgcctggagtgacccataggctgcagcctgaaatcaggaggggctagggaggctcccatccagcccacgagagcaaaccatgccagcccccacgatgtctgaagctggtgtccctttctaaactccaggagctcagctcgtttgagtcaagttggaacccgaggtcagacttccatcttcatgccccaccccacccagaagtcaccttgtcctctcctcaccagggagctgcaacctgagaccttgggtggtctagtccaaccggctcagcctctccctgctgggaccgtgctgtgaaccagcgccctgggaggcagcagcaggcctgctgtgcaagctccacgcccacccacgacgcaatctgtggggctccacccccaccccctttccttgggttcctcctgcaagcgtgtccgcagacccctgacccggtgggtcccccgtgacggctcgtctttgcctctaaggcagacatgtaactaaaggcatgcacaagggccaggacctttgctgggagagtctgagcagttccgtgcgtggctcctcactcctcc

SEQ ID NO: 1887130 - DNA, 4001 bp, Homo sapiens
ggagctcaggatggagcccagtaggtccgccatcttgggagtgactgagagggggcggtgcgtcttaaagggaagggcggaatgcctttaaggccggaaacacgtcggaggcggaaaaccctgggcccgcctggcctgggcgcagatcccaggcccgcggtgcatggcggcctccagctggcctaggccccgccccgcccccgcagacagaggccggaggctggctggtgcagcgatgtttaatggcaattcgtataaaccaagcccatgcacaagtagaaagtgcccgtggagccggcaggaggcccccgccgcgctagagaaccacaagcccggccgtgcagccctccccgcggcgccttaaatagattcttcactatactctgtatgttacagtatgtacaagacccctcccctcgggggacggggcggactccgcaacgcgttcctatgtacaccacctccccttcggccctgaggtcagtggccagagtcgggtgatggggtaagacagggccagagagggaggaaacagacgcaaacatgcggagtcgggtggggacacggtcagccctgaaacacgaggggcgtgcgcagcgaaggcagtggtgggaaccgaggcggatacattcagagacgcgtcgaacaaataaataaggcaagtcaggagggggccgagtcgggtgcaggcaggaggagctggggagcaggggcaggcagggctccggaggtcacagcggaagatgcaggtatgtggggcgcgggttttctggagccaggaccaaaagagacggggcacgaccaggagggacgaggagaggggtgtgggagcaaggcgtggggaggagggaggaggcctacagagggctccaacaaaggtgaacaggaaagctgccgacaggggctccccctgccccagaaagccctctccctgttaagactgcacgaggcgcccccagggtggtgagaaaggcggtggccaggtcatgtggccagtcccggctggggaagcccttccagctcctggttctgcttcagttccctcatcctgcagagagaaagataggagtcagaggagactggcggatcacgacgggtggcaacgcaaaagcccagggggagaagggatgagtacctgtgtcggcagcgccgcaggaatctcatgatcttccgggctgcctggtcctgcttcttggtgagaaaggagcctctggtgaaagaaacaaaagatggacctcacagaaggcatcgcatgccttcggcccccccaggaaccctaggcagggaatggcagtgaggcatgatgatcaagaggatgagtaagggggaatggcgtggatgcagtgggtgggcacagagggctggggctgggccctacttgttgcgggcaggcagggtggccgaagtccggtggggagggccgggcctgcggcggtaggagcggtagtgctgctggatgagcacagccgctcggcggctctgctgaaatcgcttctgttcatagtagcttcggaacttgctctggatcaggatggccgcctgggtcatcttcttatagagtgcaaactgcaggggtggggaggagggacaggggctgaaatagagggacggagacccaaagccctgaggctcacccaagttaggctgatgcaagactctctgtaacccacacactcaaggaaagactgaatcatcacagacctcacactcagagctcatgcctaataccttaagtgcaatccaggtcagcttgtggagagagaaggggagttagggctctggcaacattctggaatggttaggcgtgggtgtgggttggtgggttgctggttacacttttgagggagaagggtctcacctgcttgtacttccggtaacagcgctggattacagctgctgctacctcctgctgctccttcagccgccggccctgaagggagagaagtctcaccacctcatgacccacataatggcatatctgacttgtcccttcaactttcctggggttcccctgaccctttaccccatccaaggcctgtctgcacgactactcatcctccaaaagccctgggagcccagtctcccctgactggagattgtgtaattcatcctgagacccctgcccctgaccttgtactttcggaaggccgtctggatgactcgggcagcctcatacagttcccgctgctcgtgatctgatagtgtcagcagggcaaaatcactttccatcttgccactggtggatgcagagagaaactctgcccaggagggtgctgaagggacagccaggcgacctcgctcaaagggcagttcgctgtaggcggtagggaaagagggtgtcatgaagcatctgaagtccctcctctgccacctatggatggctacgaaggaaaaccaccagcaactgagtctggagagtgacttcagagttcatcagccagttcagttcgcttctccaaggccctggggcctcagccagaatggagctttggctgtgggaaagccagctttctcccttcctcccatcttcctttgaagaatctggaggctttgtcctgagctagtcacctgggaggggttgagctggggaaatggtccacattctccaggtagctggccagccaggacatggtctcactgagccccacagcccctgtccgctcccgcattgaggctccagcctcgggcagccccacgaagtcctctcgtttaatccgctccggtgtggcttcgatgatctgcttggctagtgagatcatgtccacctggaagaagggagaagctgagtgagtccttaggggccccagctgccagctgtaacctcagtccattcctatcttgttccttctctccctgccaggtgctgctaaccctgtctttctgggccactgttccagactcattcatttatactgatggggctcccacttgggggtccctctgtgctgagatgctatggagaatataggataaaaaggagatactccaagtggggattcaaagctgaacaaatggaggacttgacaccctttcaggccaaccatccactgtcctacctgggcctgccccatgccagctgaccagcacatgctccccataggcttggctgtgcccacccccagctccctttcaactctccaagaaccattccaacacttgccaactactacccggatgaatggctccagtctggcctttgctccagccctgaagcctatactccagcacttcctgctggacacactcaacacaacctacttgtggagttccctaagttttttgtacttaaagtgccacccacttactccattagtctctctaaagcaggtatgtccccagtctctatcagagaagtacaaggctatacttgaagattcactttcattccacaagactttcttagctttatcatgtgcaagcctccttcctgcatcagatcactgccaaataccctcatcttgccagccttacctctccacacaactcccagctgccctccgtcatcttggttctcctagaaccttgtccctacatagatcaacggttaactcctacaaaccagctctaactgaagatattccctagaatttttgttatagagacagggtctcttgtccaggctggaatgcaatggcacagtcagctcactgcaacctcatattcctgggctcaaggggttctcctacctcagcctcccaagtagctacaactacaggtgtgtgccaccatgcctatttttaaaaaattattttgtgtagagatggggtcttgttatgttggccagactggtctcaagcccctgttctcaagtgatcctcccacctcgttctctgaaagtgatgggattacaggggtgagccaccgcacccagccagaatattttttaatgctttttatattttaaatcttactattttgtctttttttttttttttttgagacagtctcagtctgtcacccaggctggagtgcagtggtgcagtctcggctcactgcagcct

SEQ ID NO: 1887131 - DNA, 4001 bp, Homo sapiens
tactctgtatgttacagtatgtacaagacccctcccctcgggggacggggcggactccgcaacgcgttcctatgtacaccacctccccttcggccctgaggtcagtggccagagtcgggtgatggggtaagacagggccagagagggaggaaacagacgcaaacatgcggagtcgggtggggacacggtcagccctgaaacacgaggggcgtgcgcagcgaaggcagtggtgggaaccgaggcggatacattcagagacgcgtcgaacaaataaataaggcaagtcaggagggggccgagtcgggtgcaggcaggaggagctggggagcaggggcaggcagggctccggaggtcacagcggaagatgcaggtatgtggggcgcgggttttctggagccaggaccaaaagagacggggcacgaccaggagggacgaggagaggggtgtgggagcaaggcgtggggaggagggaggaggcctacagagggctccaacaaaggtgaacaggaaagctgccgacaggggctccccctgccccagaaagccctctccctgttaagactgcacgaggcgcccccagggtggtgagaaaggcggtggccaggtcatgtggccagtcccggctggggaagcccttccagctcctggttctgcttcagttccctcatcctgcagagagaaagataggagtcagaggagactggcggatcacgacgggtggcaacgcaaaagcccagggggagaagggatgagtacctgtgtcggcagcgccgcaggaatctcatgatcttccgggctgcctggtcctgcttcttggtgagaaaggagcctctggtgaaagaaacaaaagatggacctcacagaaggcatcgcatgccttcggcccccccaggaaccctaggcagggaatggcagtgaggcatgatgatcaagaggatgagtaagggggaatggcgtggatgcagtgggtgggcacagagggctggggctgggccctacttgttgcgggcaggcagggtggccgaagtccggtggggagggccgggcctgcggcggtaggagcggtagtgctgctggatgagcacagccgctcggcggctctgctgaaatcgcttctgttcatagtagcttcggaacttgctctggatcaggatggccgcctgggtcatcttcttatagagtgcaaactgcaggggtggggaggagggacaggggctgaaatagagggacggagacccaaagccctgaggctcacccaagttaggctgatgcaagactctctgtaacccacacactcaaggaaagactgaatcatcacagacctcacactcagagctcatgcctaataccttaagtgcaatccaggtcagcttgtggagagagaaggggagttagggctctggcaacattctggaatggttaggcgtgggtgtgggttggtgggttgctggttacacttttgagggagaagggtctcacctgcttgtacttccggtaacagcgctggattacagctgctgctacctcctgctgctccttcagccgccggccctgaagggagagaagtctcaccacctcatgacccacataatggcatatctgacttgtcccttcaactttcctggggttcccctgaccctttaccccatccaaggcctgtctgcacgactactcatcctccaaaagccctgggagcccagtctcccctgactggagattgtgtaattcatcctgagacccctgcccctgaccttgtactttcggaaggccgtctggatgactcgggcagcctcatacagttcccgctgctcgtgatctgatagtgtcagcagggcaaaatcactttccatcttgccactggtggatgcagagagaaactctgcccaggagggtgctgaagggacagccaggcgacctcgctcaaagggcagttcgctgtaggcggtagggaaagagggtgtcatgaagcatctgaagtccctcctctgccacctatggatggctacgaaggaaaaccaccagcaactgagtctggagagtgacttcagagttcatcagccagttcagttcgcttctccaaggccctggggcctcagccagaatggagctttggctgtgggaaagccagctttctcccttcctcccatcttcctttgaagaatctggaggctttgtcctgagctagtcacctgggaggggttgagctggggaaatggtccacattctccaggtagctggccagccaggacatggtctcactgagccccacagcccctgtccgctcccgcattgaggctccagcctcgggcagccccacgaagtcctctcgtttaatccgctccggtgtggcttcgatgatctgcttggctagtgagatcatgtccacctggaagaagggagaagctgagtgagtccttaggggccccagctgccagctgtaacctcagtccattcctatcttgttccttctctccctgccaggtgctgctaaccctgtctttctgggccactgttccagactcattcatttatactgatggggctcccacttgggggtccctctgtgctgagatgctatggagaatataggataaaaaggagatactccaagtggggattcaaagctgaacaaatggaggacttgacaccctttcaggccaaccatccactgtcctacctgggcctgccccatgccagctgaccagcacatgctccccataggcttggctgtgcccacccccagctccctttcaactctccaagaaccattccaacacttgccaactactacccggatgaatggctccagtctggcctttgctccagccctgaagcctatactccagcacttcctgctggacacactcaacacaacctacttgtggagttccctaagttttttgtacttaaagtgccacccacttactccattagtctctctaaagcaggtatgtccccagtctctatcagagaagtacaaggctatacttgaagattcactttcattccacaagactttcttagctttatcatgtgcaagcctccttcctgcatcagatcactgccaaataccctcatcttgccagccttacctctccacacaactcccagctgccctccgtcatcttggttctcctagaaccttgtccctacatagatcaacggttaactcctacaaaccagctctaactgaagatattccctagaatttttgttatagagacagggtctcttgtccaggctggaatgcaatggcacagtcagctcactgcaacctcatattcctgggctcaaggggttctcctacctcagcctcccaagtagctacaactacaggtgtgtgccaccatgcctatttttaaaaaattattttgtgtagagatggggtcttgttatgttggccagactggtctcaagcccctgttctcaagtgatcctcccacctcgttctctgaaagtgatgggattacaggggtgagccaccgcacccagccagaatattttttaatgctttttatattttaaatcttactattttgtctttttttttttttttttgagacagtctcagtctgtcacccaggctggagtgcagtggtgcagtctcggctcactgcagcctgtgcctcctgggttcaagtgattcttgtgtctcagcctctcaaacagctgggattacaggcacataccacagtgcccagttaatttttgtatttcttgtagagagggggtttcgccatgttgcccaggctggtctcaaactcctggcctgaagtgatccacccgccctggccacccaaagtgctgggattacaggcgtaagccaccaagcccggccaaattttttttttccaacatctgtattgtgggaccagccagaattttcaacctccgctgcctcatgacttccaagtcacatggtctaaaaggagctaagcaaaaggctaccttgcctgtcccaaaatgaagtaaataggcccttcctaaactgaagccagact

SEQ ID NO: 1887132 - DNA, 4001 bp, Homo sapiens
ttggttcgagttcttcttgcccgggaataggatttcttctcaatgggcctatcagggggtggtggtgcagcatcaggagcagcagctggtggctctgaggctgcctcttccttctcaggactgccaagcactggagcatctgcttctggagatggatccctcacagaagtctgctctaggcgccgtgaccggtaactaatctcatgcttaacagtctcaccagaccggccaccatgctgcccaccagcttccacaggcctaaaaccagcacgaccttccttgaagcccccagatcgagaataattcctgggtgcagacatacggccggtacctgcagcattcctgttaataaatgtccttggtggtagggtgcccccaagaccctggtggcgatgagacttgtttagccgctcaccgttccagtttggatctctttgtggaggactcccatatctacaaaaaatggaatgaagaaactgttaggaaattaacaaaaggaggctacgcgcggtggctcaggcctgtaatcccagcactttgggagatcgagacgggcagatcacttgaggccaggagttcaagaccagcctggccaacatagcgaaacctcatttctactaaaaatacaaaaattagccgatcgcgatagtacgcgcctgtaatcctggctactcaggaggctgaagcaggagaatcacttcaacccaagaggtggaggttgcagtgagccgagaacatgccattgcactccagcctaggcaacacagcgagactctgtcttaaataaataaataaaaagaaaagcaaagagaattctttctaaaagatatcaagagtctacactctattttttttttcctttttttctttttttttttggagacagggtctcactatgttccccaggctggtcttgaactcctggcctcaagcaatcctcctgcctcagcctcccaaagtgccgggattccaggtgtaagccaccgtaagccaccatacccagcctggtcttatgttctaaaatgtcctcaccggggtttccggattcttcgaggtttgatgtcatcaggattatgagctgagcgaatgtcataaccataaagagcaatgagctcctgtcgggactttggggcctgctcatcttcccggaacttgtcatgctcccagcgaccctcatccttccatagctttcgctgacgccccttgggtctggataaaatgaaggaaaagtgtcttgggtcagcagaattctccaagtagagatgttcttgaacaaaatgggtcagggaggcagggggacaataggaactttacgtagtctcctcatcatcccaaagagattataaaaaacaggcctccccaaagcaagcgtgaatcacagaacctcagggcctgctgggctcaaatataacagacacagaaatgagaaaaagacttcatttcatgccattcagtacctttgaaacatctcctttctcctaaaaggcaacctatgcaagtatttcacttctcagacgccttacacctcagactaagaaaagcaaaagtataataattaagagaagatgagttctggaaacaaactgtcctaggtctgtatcttagctgcctcaccaagagttaccaaatattctaagcctactttcctcatttgtacgataaggataatcataatacttatcttaaaatgctgtaataaatgaaatacaggcaaatcgaagtacctggcctacatgtgtaaaatacatgttagacagcagcagcagcaagtggcttttacctgacttcctcctcctgagtttgccctcgaagatcatgctcaaagaagagccctttccgaggtatgtatgctggattcttccgatcttcatcatcatccaaatgcttagggccctttttacccactttgttctccacaggctctgtgctctcctagaggacagataaagggatccttactcttccaagcctcaagaatctctattccagcctctaaaatggaggactgtggaatgtactaacctgtccgtccccactttgcctctctccagtcacagtgcttttggtgtcaggcttttcttctcccttctcttcttttgttgaagaattaacagcatcattagcttctgatttcagctccactttggagttttcctcttcactgtattcaccttcttcaccctgaaaaaagtttccctgtcagcgatgcatataagatctgaacggtgcattttaattcccacccctgcccccaaccccaaaacaaagtctctgtcacccaggctggaatacagtggcacaatctcagctcactgtaacctctgcctccaggggtcaagcaattctcctgcctcagcctcctaaatagctgggattataggcgcccactaccgcgcctggctaatttttgtatgtttagtagagaccaggtttcaccatgttggccaggctggtcttgaactcctgatttcgtgatctgcctgccttggccgcccaaagtgctgggtttataggcgtgagccaccgtgcctggctgcatttcaattttctactctttaggaatacatttatcaataaatttttagtacaacatagaactgaaaagcaaacaaatcaatattcttacccatatttctagaaaataaagatcctattttggcctggcacagtggctcacgcctgtaatcacattttgggaggccaatgcaggcagatcacctgcggtcaggagtgtgagaccaacctggccagcatggcaaaaccccatctctactagaaatataagaattagccgcacttggtggtaggcacctgtaatcccagctgctcgggaggctgaggcaggaaaatcgtttgaaccagggaggcagagcttgcagtgagcagagactgcgccactgcacttcagcctgggcgacagagcaaggctctgtcgcaaaaaatagtaataataaaaaaaagacactattttaaaaatatcacattaaaaaaaatacacacatacatacatatatatccacataggtattcctggaacatatgcaagaattattaaaagtggcaggctgggcgcagtggcttacacctgtaatcccagcactttgggaggccgaggcaggcgtatcacttgaggtcaggagttcgagaccagcctggccaacatggtgaaactctgtctctactaaaaatacaaaaattagccgggaggcggaggttgcagtgagccaagtttgtgccactgcactccagcctgggtgacaaaagcaaaactccatctcgaaaaagcaaaacaaaaaaacaaaaaaacagcggcagcctctaatgggcccagaggataagaatggaagggagacttactatacgatacctaacatataagaggagcttaatcttccttgataatctctctctccatgaattatctttttttttttttctgttttgagacagggtcttgctctgttgcccaggagtgcagtggcacaatcatggcttactgcaatctcaatctcctgggctcaagtgatcctcccacctcagcctcccaagtagctgcgactacaggcacatgccaccacacctggctgatttttttttatttttagtagagacgaggtctcgctatgttgcctaggcagttctcaaactgctgagctcaagcaatcctcctcccttggcctcccaaagggctgggattacaggcatgaacactgtacctggcccatgaattgtctcttaaacatgcagtgcctaataactatactttgacgtaagttgtgaactctcccatctcaaaatggcttagagcagaaattcccaacctttttgattatgcggacccctttttaggatctaaaaattttcatggatccccatgagatattcactgagaaaacatacaatgacaaacaactgctaggctggatgtagtggttcacgcctgtaatcccaacactctgggaggccgaggtaggtggatcacttgaggtccggagtttgag

SEQ ID NO: 1887133 - DNA, 4001 bp, Homo sapiens
aaccgcgcctgtacaatacacatggttcactctgttaaagctgcagggcaacgggagggggctgggggtccctgggcaggcatcaaggctaggggtaagcagcagccaagactgggccagtgggtcccagtgtccgacccagagggtggtggcagctggagttccaaggctgttggaaggggtcaggaggaaggctgggaagccaggggctgcagggagaggagagtgcatcagcagtagcagggagggggcagggagcagaagggggcccatgggacactgtcagggcaagagggcatgggacacagcacctcctatgtccatagaggatttttgctgcaggaacaagacagatcactgtataaaagggtctgtacaacattacctatgatacaatgttcacatatgatacaaggctctttccctctttgagttttaaaaaataaatgtacaattccagagctttgggtaaaaaatatatacaccctcatagcaggagcagcagctgcttttgctacggctgttgctgtctcttcaaaagggaaagaggtggtgccagaaagaagggtgagtctgtgccaggaaacctcacccagtagctgccaggagcccctgcacccctcaggccttgaggctggtgatgggagagggaggggagtaaaggtaataaaggccttgccagagtccagtggcgcctttacagtctctgccatccccctcccccactttggggctgcctgccccaggtatagggatccaccccaccccagctctatggggaggacaaagggagagtcaaagagagagggacagagaccatgttgttggtgtcagacacatgagccagaagggggatgtcaactccctccttagcagttagatatcccaaaaagcaggagtgtgggcagcagacaaccctagctcctgatactgctctacccgagcccactgcaaggcagggggagggtcctctaggcagctgaggcctgtgtttccctgagcatcttttaccctctcatcagagcccatccctggaccttccagaggcctgagtgggggacttgcaagggctgatgggtaacccctcccacctgctgctactccctgccccaaaaagcagcttggctcacaagcctgggcatgcagggcagcacgaggagctgagcagggagtgtgggggtggagaaagcaccccgcaccatccaggggcagagtagacaagggtagcaccaaacagaaggacccctccccagcacacacaacatccaccctcaattaccagatgcactcctgctccctaaaagaagacacacacacacacacacacacacacacacacacacacacacacacacacacacacacggcaacataatattcctgggggtcccagccctgaccaggaagaagctggacaggtggtggagaagaaggctgccaatccctcccacaatcccactctgcaagacagaagggtgagcagcattctttcctgctgcaagaggaagttggaagctccatccccagaacagatctcgatgggaggacatagaggaaggagctttctatcccctttctcagaggggacaggaaccagcaaagtgtagttttggcttgaaggagcaatggggaggggacttcagcaggatgaacagacttatgggtccaggggtaaatccatcgacctctttcccgtggagcaggaagttgctccacgggaaagatgtcagatgttggttgagacatcgtgcaaagtgcttgagtgccaggtgcccaaggatctggcgggtctgactggagcctccactctcactgactgtttgcctccagcttgtaggagagctcgaagaggaggttctggttgtcgatgacctgaaactggcgcacataggccttggtctgcaggtgattgggggatgcctccatgtccaggcctagtgggtaaagagggagaggcagtcaggttcccagcttcccttcttcctctacacacacaccgggcagaagatcaggctgtggactgagacagatgttgggcaggaaggcctctgcagaggcaaggagagaatggggaaccagcaagtgtatggaaatacacatctggacagggagttctcccctgaaccctcccgttcagtcaaagctctatctgtactgctctcagtaccctgggtactcacaaaggggccggctccggtatttgcggattgtcctcactttttcggccactgaatgctgggagatgacaaggaatgagccttgaaaggggcacagaaagaggctccccctcttatgctccccctccgccattctcccactctgctttactccctccagtctccaattctggagggtctctgaaggaccaaaggagtgggtgtaacagagtgccatgtgagggggaggtgaagttgcccccaagctgcctgtcagctctgccacctgtgggtgggttgccacagtgatgccaccagggagacagtcaagagtctgttaggcaagctgggcacttggaggaaggctgctatttttgggaggtgatgagagagggagaggatgcaagccccccacttgtgggactaggggtttgcagtgccactcactcaccagcttctcgatgttcaccaaaccatctacaagggtcttactcccttcgtgcaggaaagtcaggtctaggggatgtggagagaatccaatgtgaggaaaggataagagaggagttcgaaaggggccactgcacccgaggaccccgctcttccccagaacccactccgtctgtggtggggggctcctctccaggtgggtactcagggctgagtcgagagggagctggaagtcagaagcagggcataggagaagggaagcatgggtggaagcggcacagcttgggagtaactctctcacctttgaggatcagaggcacgaagggaatcacagggggcttcattttggagatcacttctcggtagcttttgtggttcctgcaggggtcctagtattccacaggagagagatcaagggacagactggccaatgcatcccaaagatgtcctcagcttcctccctcaccccctgccttgtatacattcctgatcagataggggtgctgggggctttctaatggtgtggtggggagggacctgactactccccctttccttcaagaaaaacaggggcgcaatccttccaacctcaccctccagcatggtaaggagggtggggggtcccatacactaaacaccttgaaaggaaagcttgaggaagggggtttatgggaacagagggtttctgggctctcagtccaagagcagaagaaagagccaaacccactcaccgtcaggttctcaaatttgcgaaacaagttcttgaatttccctggcagcttctgcagagtttgaaggaaggagaagggatatcagagtggagctccttgggttacatgggagcctcggattaattctccctgttggagggcaaaagggcctgcatggcttgtagggggctgggaagctggtgggtggggaaatgaagtcaggccttggctaagtctagaggcttgaaacagcccagaggaattcattattctggggaaggccaggtctgtcttatgcaggtgctttgtataaagatgcccccactgagtgtggatgaaaatcagcccaactcccacagccaagtctgcgacctgacctggccaagggctgcctgccgtgactcaggcgggatccgggcttttcactaatttgcacaaagacagggtccattagccaagctgtgcgccctggggttgcgtatgccagaagagggcgcctccctccaactggcgcaaagactccctccaggccggcggccgtcccgggaggacgcacttcggggagcccgggatgcccagattcccaggtaggaacgggaggggtctcatcacctcccaggtgagtcgaaggcggctgacagcggcgttgtccagccccatgaccacggcgtagaaagacagcaggtcc

SEQ ID NO: 1887134 - DNA, 4001 bp, Homo sapiens
cagctcacgagccacaacgtgttcatgtgatcagatacatcgcggccgtgagacctgccgccacacagttctggggcaaggcaagcccgcgctgacaacttggtatgtgtacacacaaacaaagagaagagttggagggctaaaaagtgcaacattgccaggcgaggtggctcatgcctgcaatcccagaacttacagaggccgaggcaggtggatcacctgaggtcaggagttcaaaaccagcctgggcaacatggtgaaaccctgtccctaccaaaaaatacaaaaattagctgggcatggtggcgggcacctgtaaccccagctacttgggaggctgaggcagaattgcttgaacccaggaggcagaggttgcggtgagccaatatcatgccactgcactccagcgtgggtgacagagcgagactctgtctcaaaaaaaaaaaaaaaaaaaaaagtgcaacactgaatatctattggagtttttctttcttcctttcttttttttgagatggagttttgctcttgttgcccaggctggagcgcaatagtgcactctcactgtaacctctcgggttcaagagattctcttgcctcagcctcagtaatagctgggattacaggcatgcgccaccacgcccagctaattttgtatttttagtagagatggggtttctctatgttggtcaggctggtcttgaacttctgacctcaggtgatccgcccaccttggccccccaaagtgctgggattacaggcatgagccactgcacctggccttctttcttttgagacaagagtctcactttgtcaaccaggctggagtacagtggcgtgatcttagctcattgcaacctccacctcccaggctcaagtcattccccgccacctcagcctcccaagtagctggctctgcaggcatgcgtcaccacacccagctaatttttttattttttgtagagacagggttttgccatgttggccaggtctcgaactcctgagctgaagcgatccactcacctcagcctcccaaactgttaggattacaggcatagccacagcacctggcataaataaaccttaatagtgctcatctttggcttatgtaatggaggcatcagggaatgggagatggacttttacttttcacccatggctttgaaaattttacaactaatcaaaaaaggcaaaggaacataaaaatcaagacaagaaaagtttgaatttgcctagattcaccacttgatatacaagtcatagaatggttgcttatattcttatattggttccagttaaacatccttttatcaaaaaaaccatgacaggtggattaaagaataaagggggccaggcatggtggctcacatctgtaatcccagcactttgggaggctgaggtgggcagatcacctgaggtcagaagttcaagaccagcctggccaacatggtgaaaccccatctctactaacaatacaaaacttagccaggcatggtggcatgcgccagtaatcccagctactcgggaggctgaggcaggagaatcgctggaacccgggtatgcagaggctgcagcaagccgagttgcaccattgcactccagcatgggcaacagagcaagactccatctcaaaaaaaaaaaaaaaaaaaaaaaaaaaagaacaaaggggagaaaactccctctgcctctggtgtgtcatgtggccaagccagaatcccttaccttggttgcggccatattccaccagccagcgggagatgcgaatgacatcctggagcacgctctcgggcaggtgctccagggtcacgtcctcctgggcctccagatcatcgtcaccactgatcagatccaagatgagcacgggcgagacgaccttactgtgccgcgtcatcaggctgcgaaattcggactccagggcctccttcccgcgctcaaagagcagtttctgcacagacaacagaaggaagcaggtgcctgctgcttcagtgttctgccagtcctggccttcccctgcctgtgccagctctgtcttcttaactcagggcctctgcccttttctgccctgatatcttttttttttttgagagggagtctcgctctgtcaccaggctggagtgcagtgacacaatcttggctcactgcaacctccgacttcctggttcaagcaattctcctgcctcagcctcctgagcagctgggattacaggcacgtgccaccatgcccagataatttttgtatttttagtagagacggggtttcaccatgttggcaggatggtcttgatctcctgacctcaggtgatccacccgcctcagcctcccaaagtgctgggattacaggcatgagccactgcacctggcctgccctgatatcctttaacccaaagaagaaacgctgggaagcggccttggtgactcctttacttcatgttctctcaaaatttgtgtttacaggtaaaacccagggttttacaagaagtaggtgcttaataaatactggctgattggccgtgcacggtggctcacgcctgtaatcccagcactttgggaggccgaggcgggcagatcacaaggtcaggagatcgagaccatcctggctaacaaggtgaaactccatctctactaaaaatacaaaaaaaaaaattagccgggcgtggtggtgggcacctgtagtcccagctactcgggaggctgaggcaggagaaaggtgtgaacccaggaggcggagcttgcagtgagccaagattgcgtcactgcactccagcctgggtaacagagtgagactccgtctcaaaaaaaaaaaaaaaaaaatactggccgattattttctcactgaaccgttaatttgtcttcttgttagtggggggtttgcaaaagaaaataaataaataaattgaacaatatcaagttgaaaacttttgtgctgcaaatgataccaccaacaaagtgaggataacccacagaatgagagaaaatatttgtaaactatgtatctgataaaagacaggtatcccaaacataaaagagaatgaatctgtccacacgatgacatatataagagggtttatagcagcattattcacaagagacaaaaattggaaacaacccaagtgtccatcaaaggataaatggctaaagaaaatgtggtctggctgggcacggtggcttacgcctgtaatcccagcactttgggaggccgaggcaagcagatcacctgaggtcaggagttcaagaccagcctggccaacatggtgaaaccccgtttctactaaaaatacaaaaaattagctcggtgtggtggcaggcacctataatcccagctactcgggaggctgggacaggagaatcgcttgaacccaggaggtggaggttgcagtgagccaagattgcgccattgtactccagcccgggcaacaagagcataactccgtctcaaaaaacaaaacaaaacaaaaaaccaaaaaaagaaactgtggtctatccacaaaaaggaatatcatatggcatgaaaatgaaatgaagtactgatacatgctatagcatggattgatcttgaaagcatcacgctaagtgaaagaggccagtcacaaaaggccatgtattataagataccatttatattagaaattcagaataggcaaatccataaagacagaaaatagatttgtgatttccagaggccaagtcaccatcttgctctgatgatctaatgaccccaaaacttaaacacaaaaatatgatgaaggcaggtacagtgggtaatgcccgtaatccctcccaacactttgagaggccaaggtgggaggatcacctgaggacagtagtttgagaccagcctgaacaacacaggagacctcatctctacaaaaaatttaaaacttagctgggtatggttgcacatgcctgtgggcccagctacttggaaggctgaggtgggaagactgcctgagcccaggagttcgaggctgcagtagctatggttgtaccactgcagtctggcctag

SEQ ID NO: 1887135 - DNA, 4001 bp, Homo sapiens
ctgtcagacagacaggactgtcccttcaaagaggaggtagccaatttctgcctcattcagaaattcagctggggactccctccacctcctggaggctgagacgccagcctggcagagacagcaggcagcacagggtggcagaggggcggggctggggtgggggctggcaggcagacgcaggggtcagtgctcaccagtctggcctctggctcagcagcctccgcactgggaggtgggggcccggcactgctcccagggcctcctgcaacagcagccccctcagcacgggggagctcctccagctgcagcagattgagctggagtggagagctgcatctcgagttgaacagtggagagtccgggcggtgaggaggactcggggcgagggcgggcaaggatggagaaggggagtgcgaggcaggagtgggaggcccttcagcaggggtctggagtgccccataaggatagctggatggggttgggaacagatagttagggagcaccaaggccaccattggggtcaccaaaggggcggggaaagcagctgggggcacagatgtgggagcagggggaagaggctgggggcctcctcgaggagagaacactgggagagggtagggctggacaaccgctgggaagggggtagtggctggtggggtgggccagggggtggagggtggcacgggtgaggggtgtgagacatagcagggcgcttcagcccgagggttctggtggtggcgtgagcgcttggctttggatcggcagtggtgtcggcggcttgggggtgcggggccgtggtggcagcctgtggggagagactagggttagcaaggacctcaacctggggttagtacccctgctacccacactgccctgacacgctgaccagggagaggacaggccaaggtcccagagagagcttctcaacccacacagaacgggggactcaggaggtggggcaccttcagggaagaatcacaggagccagggacaaggggatttattgagaaaggaacaaggccagggagaggttacacgaggggtcgagctgggggtgtgcggaagatggaggcatgctggcagatggaggaagcagggtgagtccatggacacatggacagatggctctggtccgccaaactcctgtgggcactgccagcctaggcattcctcctgcccatcgaggccgtattctgcctagcttgcaatggagtgaagagtggggctggaaagcccagtcctgagtcctgcgtctgcctgcaggggatctccctcaggcacctggaggggctgccttccacctgcccttgaagcccagaccccacccagagttggcccagaatctatgcatgtctcttcatcagtgacaactgactcctaagtgggcatacttcctgcccctgcccccaggctaggcctgaagtcgcttacctggagacagcacctctgcctgcccatcccagtgccatccccccaggctgccctcctctggctgcagcccggaaccccatcctagtggggagaagctagcgaggggcctgtccctaggcagggcctagtggtggaagcaacaccagcctgggtccctggagcagaaacacctcccttaagacccaccccccaacaatccagtcctagactgggcagagggcaggctccaggaggccccaggtggctacctcgctcgccaagggctgagggagctgtggaagagctgtcgagtccacgcagcctgcccaggtctcggaagcggctgaggaaggcttgctcttccttctgtgtgtgcagggacagcacggccttggtcagccccactggacggtaggcgtctggggctgggtcaggggctactgtggggctgggggctgggctgggggctgggcctggggctaggccaggcaggtcctccatcatgatgatgtctgaggagagtgagatagggaaaggtcatcagaaccacttcaggggtcaacacatccataccacaccctccctgtctgatagcctagccaacccctggcagctctgccccacagccaagcctggtctccatgtacgtttcttggtcacctctctgccaacggctggccctgggtcctcctctccatgcaaagctggcccagaagaagagacgatactcaggcccctccagtggccactccctgccaggaactctactgggatgaccccgtcacaactctcattggaagagaagcccaccccttggccttccctcacacattttcttgtttctttttttttttttttttgacatggagtctcactctttctcccaagctggagtgcagtggtgcgatctcagctcactgcaaccaccaccccctgggttcaagcgattctcctgtcccagcctcccgagtagctgggactacaggcgcgcgccaccacgcccggctaatttttgcatttttagtagatacagggtttcaccatgttgcccaggctgatctcgagctcctgatctcaggtgatcctcctacctcagcctcccaaaatgctgggattacaggcctgagccaccatgcccagcccctcatgattttcaaggtcaatatccaaagacccttcagggatgttcaattttccttgccttcagaccctgtgtggtcagcacctcagggcaaaccctctatcccagactctgtgtttcaactgacagtaacaatacgagaagcagaacaggggaagggcaaagccgagaagcctggcagggaggggagagcaagaagcagtagccccaagccccaggtcaagggaggcctccttctctccatcaggccctagaggggaggggaaaggcaggagggagctctagctgggagaccggtggagcccaagcactgccccccaattccacacccatacccgactccgggggcttcttgtctcccacatggacgatggtggagctgaagctacactgactggtgacggacaccacactctccgccttattggccagggcgagcgggctcagggtgcctcccaccactggctccttccgtggggtggccccctccccagacagcgctgctgacggcggatctgtgcagagagatggtgccagttaccatccccacccccactgggaagtcaggagagaggatcccagggaaaaggggaaggggatggtggtagggaacagagggaacagtctggagaccaggaggctggggaggagagcagggcagagcaagagggcccagaagcagaagggaaaagacacagggccaccaggccaggacggggcagtgggagcagggtgcattggatctttacctttcttggtccccacagagactggacctgtcctctgcctgtcgtcgtcagaggctgaggaggtggtataggaggaggaggaggcacatttacgcttagtggtgctggggaggttgcagctctccaggtacctggggatggacacagcacagggcatcagagcagggcttggggtgggcagggttagagcccgaggtggagaagatgcctggcaggccttacctgaggatgctgtccaggcagttgatctgctggtaggagcagctggaggcttctttcctctcggcctcctcagggaccaaggctagtggggcctggacgggagcagaacccgcctccagctctgggtctggggattggcagggaagggccttggccttgaacgtgcctgtagctggggcaaagagagaaagaggaaaatagccttctcaagctcacatggaaaaaaacagcaaatgggttgggggtgaaggtcaggggaccccccaggtctgtctcttcacccacacatcatcatcaactcaccagggaggcggggccgggactgaggccgggcccgagactcaataaaaagctgctggccctggtgcttcaccagatgcacatccttacagatctgctggaaagtcacctgtgggacacagcaccacagtgagcagaaccagggggtgtcgccagtgtcaggggccaagggcacaata

SEQ ID NO: 1887136 - DNA, 4001 bp, Homo sapiens
tgtaatcccggctactcgggaggctgaggcaggagaatctcttgaacccaggaggcggagattgcagtgagcctagatagtgccacagcactccagcctgggtgacagagcgaaacgccgtctcaaaaataagtacataaataaataaataaagacatcctcaacgttgccataaagacatggcaacacccaaaacgtattagctggtaaacacccatgttcacagcagcactattcactatagcccaaaggtggaagcaactgaagtgtccactgacagaggagggatcaagatgtggtatagccacacaatagaggtttcttttgtttttgttttgttttttgagacagagtctcactctttcacccaggctggagtgcagtggcgtgatctcggctcactgcaacctccgcttcctgggttcaagcaattctcctgtctcagcctcccaagtagctgggattgcaggcgcctgccaccactccctgctcatttttatatttttagtaaggccaaggtttcaccatgttggtcaggctggccttaaactcctgacctcaagtgagccactcacctcagcctcccaaagtgctaggattgcaggcgtgagccaccacgcccggcccacaacagagtattattcagccttaaaaaggaaggaattcctgtcacgtgctactacatggatgagctttgaggacaccatgctgagtgaagtcagtgagtcacgaaaaggcaaggactgtatgattccagttaaatgaggcatctaaaaagtagtcaaattcagcagggcacggtgggtcacgcctgtaatcccagcactttgggagaccacggtgagaggatcactcaaggccaggagttcaagacctggcaatatagtgagaccctgtctctacaaagactagaaaaattagccggctgtgggcctgcagtcccagctactcgggaggctgaggcgagaggatcacttgagcccaggaatttgaggttgcagtgagactcactctgatctgggcaagggtaagaccttgtctcaacaacaacaacaacaaaaagtataaagtagtcaaattcctagacacacaaagtaaaatggtagttaccaggagctggagggaggggaaaataggaagctgttgttcagtgggtatggagtttcagagatgcaagaaagttctggagacctgttacacaacagtgtgaatatacttaacactactgaacagtacacttaaacatggctaagatggcaaatcttatgtgttttttacaattaaaaaaagcaaacaacttattggttgggtgaatgaactcaacgtaactggtcaccagggaagtcctccaagcccctgaagagccagggcaggaaactgtcctaagaggtaactgagggtggggcatggcctgtaaaatctacagacaggttcctagctcctagacagtcacacagctttgttcttttgggagctagttgtctagaacttgagtctctgcgggcagaccctgtttagggtctgcatttctgacaacacagcaggtgctggcatataaacgcttctgccacagagacacagtacatgtttgctgagtcagatgagtgaatgcatgaataggaaagtgagtgagtgatcaagtagcgtgtttgcgaaggtcagaaaagagaggggtgcttgttattggatgtgctgacttctcacaacacacttgaagggtctgagaagggaaggcaggttaccgacctctcattgtagaactgcagggtgttctcactaaacagtggccctgccagctggcggatcatctgcagcgacttctcacgctcatccagccccagcatccggacgtgggccacaagccaagccacagcacacaccgccagactgcataccttccctttgatgttatcagtgattttctaggggagacggaaaggtgatgggctaccatctatctccctttcttgagccaacatcaccttctcagcctctgcgggcagctaagtgcagcgggtggagtcccgggccacattccacacctctctccacaagtttgatcttcccagagctacctgggccagagggagtagctaagacaacgattacacaaaatatcaatatcaaaacatgagctcctggattaaaggtcttcttgcccttacgaaatataacaagtcatcactggctggctctgtgtctcaggggagcaaacgctgctgggaaggcggggctacctggatggactcgaaggccaggaccccattctcccaggcattgaggatttccaagatggcggctgagatgctgagacaggcctcatgccacttcatctgcctgcgggtgtgcagagaagtcagcacaggggagcaaggaacgggctcagggagcgggtcttgaccctgcccccaccgccacccttggagtgggcgcccgggccactgacactagcttcatctccgaggagttgttgagcagggccaccagggactccactttggtggagtcggggcggaagcaggggtggtcagggttcaggatcttgccctcctcaggcatgcaggtctgcatccaggtctcgaagaagggcacctcagctcctgtgcgcgactcggacagaatcacctgggaaaggggaaggggggcaccagccgagtggggagggcgcggcgcctgccagcgctggacctggggctgcactgtttcccgccaggctgctgctccagcccagcccaaagactggggacgaactggtctaagggagccagacgggggcaatgctgccacctagtggtcaatgtgaacatagggctgaaggtgcctctacggactccagcccgggtgggcacctggtttctgaggcccacagaactaactggctgagaggctgcgggggcgcaggcagtgaggtggggagagttccgggttacctccttcccttgagcccccgtcccggtcgctcccctctctcacctctgaaccataggtctgggccacatggcacagcatgaggaaggagatgtcaaacagcagggcccggacggaggccggtttggctgtggaaggacgggaaggctgagctcccagacgagggcaggggggagcccgtgtctgggttgacagggatcgggatttgcctctaggaaggtcagggaccaagtggctccttcaaagctctgaggctcagaatccttttcttgagtctcaactggaacatcatcccttccttgagaccaaagacccccagcaccctctcctggcatacctaaccaagtcgtaaagggatgagggggggaaggagacacagggatggtctgggaagaatccttttccagcattatccactttcaagctctgtggaagcttccattggtcatggctctgaggagggagcacagcctccccctgttgagctggggagccctcctccctcccacactctcccgccacacccctcctcagggcccactgggcctgcggatgcacagggctgacttactgctttcttcgctgccataggttgtgaattcattcaaactgaaaggaatggagacaggctgcattgaccagggcatgagctgagcagtagctgggcgctggggctacacatgttcagagagcgatagctagagtctgagttactggttaaacttaaaatgagacacattgctatagaaaaaaggtttttgtggtttttgttttttgttttttttttgttttttttgagaaagagtctcgctctgtcacccaggctggagtgcagtggcacaatctcagctcactgcaacctccgcctctgttcaagcaattcttctgcctcagtctcccaagtagctgggattacaggtgcccgccaccacacccggctaattttttgtatttttagtagagacagggtttcaccaagttggccaggccggtcttgaactcctgacctcaggtgatccgcccaccttggcctccctaagtgctaggattacaggcgtgagccaccgcacccg

SEQ ID NO: 1887137 - DNA, 4001 bp, Homo sapiens
gctgtgtgaaccaccgtctcatggttcctttaaaaccgtaaagtctcaaatcaaacacctccttaatcatacattgattctgtatatttgtgcctgtcaatccagtcaatgtacctaaatgaggaatgaatgaactctctcaagtgtgatgaaagactattcttctttgaagaaaccaataataaatgcattctttaattcagagatggcatacatctgtcatcaattggtatcaaattttaatgcatattaatgcaaaaacacttattcttccagtattaatgaagtcatggaatccaaaggtactcctcaactatatgttaattgatgtgttgtactgccatcctctcccatccccaactgctatgcttgttcaagaattcgagatggtaaacgaagctaggtagtaccatgtggtgggtatacatgtgacagcaaccagtttgtaggtctcatgactgccttgaaagttcttcaagtacagctgggatttttaatagcatcccaactggaactgtcacagtagccagtagccactgataatgtaacattacaaatgatggacaacaatttcctattttcattcttgaattcctacaaaacttgagtaagcattatacaacccaaaatattatcaaattaatcagtgagaaaaacttttaagtgtcaaaaggaagtaccctctttacctttatgacctttttaacaatggctaaaatcaatccatattactaaaatgtttaataatgttcatcaacaaagttgaagcacacataacacaaactgtaaaaagcaggaaataattttttaaaattactttccctagtacctgaaagaaaagtttacaactttaactatataggaaacctttcccttaagatccagccaactaaaactggatgtcacacacaggtagcacaaagggacaacacaacattcatccaggagtctaaataaaatgactctttccacttacactgcagtggcacaaaataggaatacagaaatcatttcacattccaataaaacattttattttaacacataatgcagagttcttcacctgtgcatctttagaggtctacggtttgtatacaaaatgttgtgtatatacacctgcctatgaaaagtctatagttctcaccacattttaaaaatacagccaaaaacaatgttaggaacccatagagagaatcataaaaattttccctaccactaatttaacattactttcatatgacccagcaaaaagaaatgctcaacagtgaaggatactaaaatagttacagtaaggtttggctcacaacagacttctacacagaaagcattttattttaatttaaattcattctcaaatgtcaagaaaaaactaaggactcttatcaaccactctgacaaactctcaaaataggacactaataggaagatgattagcttggactatatgcaaatccattctgaattcttgtaaactgaaacatttttgttcccataggaattttaagctcagagagggtatggccacagctagctttttttcctttgtttttgcaagttgttccccctgttgctgattttcctgaaatatcttacatacagcaaagatttgttaaacatctaaacaaacaaatgaataaattacaattacatgaaactaggagtcagatggaaaccaccagttctttacaggtaccagcataagcttgccaggtattgtctatggatcaaatctctgtttctggccattttttttttttaatgaacatattaagtggcacgacacaataaggacaaaatgtgacaacattatcacaaggtatgcatttcagtacaactttaaaaccagggaacagggcagtactgagtagagatgaaataaacaaacagaagccgagccggtcaggaccgagtaaggttgaggttagtggcaacagcatgtgcgtggtttccaggaaaccttcagtaagactgctgttagccctagccccgcaccttgcccaacccagtgtgctgcgtcttcttccagctcccgcctggctcagtgcagcactgccctgctcccaggggtgcagccgcccagcctgaactcaccttggcagtagaagggcctgaagtttaaaacatgttaatgcatcatgccaaaaatgcaatcaacatgcacacttcatacactcatgtttccaaagagatagaaaatgtgccaccaataagaaacctctacacagaacaccctcaaaggagttggagaaacaattttttaaacacccacatttaccacaaaagtaggaacacaacaacagtggtattactgcaccatgaaatttcacctaatggattaaagtaccaaaaataatcatggcatcacctactttaactgccattatttgcccacttggtttgtggaccattttgttgacagaaccataagctcctcgtccaatttctccaaggtctttcaagtcctctgcagtgaaatcccagtgttgttcaggggagatcttcagttttcctgatgactcaatgctgtgtgttctcagtctctctctgttaaaatattgggaagcaatttttccacattttaaataggttttaacttttttcttttagtactgattaatgtgtgggaaaaatgttttctaaattactaaaatagtctgacctccaggtttttgaagtttttcatttgtgtcatcctggttttttacacactggattaagaatgatctagatttaggtagtcaatagacacagcttcaacgggattcataaaaacaaattgccaagaagatttttaaaaattcccatttattgattaaactaattctgcagatcagttttcatttctaaatataagatcttattcaaacttggatgatggtttatccaaacagcattatcaagtgagaatcccaagagctgcaaaccttattgcgaaaaagttcttaccctatcttacccaacattagttattccagtgcctcaatcttcagttagtacaactattcccaaggtttgctgtaccttacaatcacctgggggagattttaaaaatctcaatgcccaggtatcgtcccatagcaattacatctgaattatccagggacaggagtcagaaaacagtatttttaaagacccccagatgattccagtaatgtttgggaactagtgccttagtatactgtcctgttcttgttaataccatcctgaggtgggagaacagttaactgaatagctagctggctctaagaggaaaattgccatgtgctattcaaaattgaaattttcagccctcgttcgataaagcaatgggataaaaaatgagtggctcgtagacaaaagagctcactcattacatatttccattaaataaaaaatcatctccaaaatctcaacctggagatcaaagtattaataacttctaaccatgctttgtaaaaaagtaaatccaatgaaaaatgtaaaatcaatctgtttctctctcttgctctctctcacacacacaccaaaccccaatgtgtaggaacaaactatcaaccatacacacaatgaaagaattcattaaatatcaactacatttttcagtttcatactaaatgatcaggatctcttttaaactctgatcctatgatgcaaacaagcaaagtttatgtgcttggtcattatttttcttcttccaaaatttaggaaagttttctccaattagtagaatggttttctgtagcaacctttaaggttcccaaaaaacttagaactttaaaatctacccccactctgagaataatcgtatgtactaatattaaggttcaaagttacacttcaaagattcatacacttggtctaaataacaatttactaaatcagtgttccaaataacagactttcaaatcatactaagtgataagctttcattcatacaagtgcttttcagttcaaagtcctttcacccatattatttgatactctagcatccagaatcacaagaagcccggaaatcagtggca

SEQ ID NO: 1887138 - DNA, 4001 bp, Homo sapiens
ttttaccctttggagaagagagttacaatatggaactgaagacagctaggccagaaacaccaaggattttggcaaccaccagaacaggagagcggcatgaaacagattcttcctcagagcctccagaaggaatcaatgctgccaacatcttgatcttgggtttctggcctctacaactgtgagagaataaatttctgttgtttaaaatagaaagaaagagagaaaggcggaggaagaaaggaaggcaagcaagccagcaagggagaaccctttggtgttggaatgggactagaaatatgaagttgttctcttaaatatatacacacacaaaagaggaaactaaataaattagattgattttaaaacatatatctatatacagaaatagatgcatgtgtttatgtgtttatgtgcgtatatgcatgtgtgctcctagctctgcacacgggaagagcctagaagcaatgacatctccatgggaatgatcacacctgtgcctcatggaaaataacctggctccttggagaaatgcctgatcgcagggctggggcagggaaagtacaatggaacccagaacatcttgatgtgccatgaaataagaaagtgctcacagtccgggtgcggtggctcacgcctgtaatcccaacactttaggaggccaaggagggcggatcacttgaggtcaggattttgagaccagcctgacgaatgtggtgaaactccctctctactaaaaataccaaaaaatattacccagtcctggtggcgtgtgcctgtattcccagctactcgggaggctgagccaggagaattgcttgaacctgggaggcggaggttgcagtgagctgagatcacaccactgcactccagcctcggcaacagagcaagactccgtctaaaaaataaaataaaaaaaaagaaagtgctcacaaaataatggggatatgtcaaaggatatgggaaacagctgccaggataaaatgctggacaaagttgggatgattaaagcatcaaaatagatcatgatagtgatggattgtgacccactgaataaaataagaatccatgagttcacaatgataataaatgaatgaatggatgagaagtaaagctctttcttttttttattctttgtagagatggagtttcaccatgttggccaggctggtctcgcactcctgggctcaagccatcctcccaccttagcataagccactactccaggcacaactttctgtaagtttgaaactatatcagaattaaaagctacctctcacaggctcacacacaagcaaaactaatacatggataaaagggcccactaagtgcccagcataatgaatggaacaagtcatatgccaaggcctgtgtggcagttgattgtccccccaacacactttgccttcttccttcctaatcggctctgatttttagtaccagtagattttttttaactagaacatgtaatactttaattttaaacattaaaattaactaaaaggccggacgcggtggctcacgcctgtaatcccagcactttgggaggccgaggcaggtggatcacctgtggtcaggagttcaagaccagcctggccaacatagcaaaaccccgtctctactaaaaaaaaaaaaaaaaaaaaaaaattagctgggcatggtggcacacagctgtaatcccagctatttatagggaggctgaggcaggagaatcgcttgaacctgggagatggaggttgcagtgagctgagatcccaccattgcactccagcctgggcaagagcgaaactccttctcaaaaaataaaatgaattaaaagaagaacgtgtgttcccctaaataagaaaaaaatgagtgttgttgagtgaacgtgtgagtgaatgagtgaatcagtgaacggggagtgagtgaatgaatggaccgaacaggtgagcaaaatgagaatgaactgaggctttccctcaagtgccaagccttttcatctacagttcccctgcacctgtagccacacccactcaggggaggaggttcaggatgccttttttatggcggaccacaccctggcagccaggctggccaaagtgcattttctcaggagtccaggccaggggatccctgctacttccgcctctccattgccccaccctgcccttcccctgttcttgcagaaagacacaccagcatgctgggaagacagcatcggcctggcagccaggtgacccaggtccagtgccaggcctgtgcctggctggccacgtgactagtggtaaacatttcacttactaaggcctcgttttccctgtttgctcctttaagcagtttggccaaatcagtggttcacagtcttggctgcacattgaaatcagctgggaacctttcaaaagttctggggctctgattgcatccagaccaactaaatcagactttatagggtgggacctgggcatccacggtttttaaagcttcccaggtgacttcaatgcacaccatgtttgagagccggggggctgcgatctccatagctccctccagctttttttttttttttttggttttttgttgttgttgtttggtttatggtttttttttagtgtttatttatttatttatttatttattttttgagatggagtcttgctctgtcaccaagactggagtgcaatggtgtgatctcggctcactgcaacatctgcctgccaggttcaagcgattctcctgtctcagcctcctgagtagctgggattataggcgcacgacaccacacccagctaattttttgtattttagtagagatgggggtttcatcgagttgcccaggctggtctcgaactcctgagctccggcaatccacccgcctcagcctcccaaagtgctaggattacaggcgtgagccaccgcacccagccagctccctccagttttttgatgctgaggcccaccctgatgccccgtctgtttgcccgtcttttgtcattggagggttaaatgaaatgtgagcgttacccgaacatctgggttcctatctgtgcacctcctcctgtcttcagcctgcctttgaggcagcagcctcactggggactttgaccctccccacccattcttcactgaacctcctgctccagcctctgcctcctccattttgatgtctagaatcaggggatccaggatcatcaccaaggtcattttcccaggtatggaggggtctttctgcttctttcttgtcatgcacagctgctgaggaaggggctgggagtaaagacagtgaaatggggaggaggagtccattcaaaccgagaaacaaagtgtttggtttttcttacccctggtgtagaagctaccaaccttttccaagaaagagggcctggcccccttctcgggtctggctgggtgcctgctgtgcctctctggcctcccctccgaagggcaccattccctcgggtgagtactaccggcctgcaccgtcttccagtggggacagcctgagaagagagtctggagccttacttcagtaccttccttcactggcctcaccctgtgcaaatcatgccacacgctgcagcctccttttccctatctataaaataaaaatgaccctgctctatctcactgggctggcaagaacacactgttgttaccttgcagacagatgtgctgaggctgtagaaagtgctttttatttggttgggagcttgtgcataaatgcgagaggggctgcacatctgacggactagaggtgactcatggctgaaccggaacaggacatcggggagaagccagcaggtgagtctgggagtcctgttcccaacatggtcctcaaggaggatgggacagggggctggggaaggctgggacacaggtgatgctgtggccagcagtgccctgtggcctccgccactctgccagtggggtagtgaagagcagagcaactagaccaaaggtcctttcagaaggaagcaagtgtctatagctataataaataataatagcagccagcaattactggt

SEQ ID NO: 1887139 - DNA, 4001 bp, Homo sapiens; identical to SEQ ID NO: 1244355

SEQ ID NO: 1887140 - DNA, 4001 bp, Homo sapiens; identical to SEQ ID NO: 1244357

SEQ ID NO: 1887141 - DNA, 4001 bp, Homo sapiens; identical to SEQ ID NO: 1244363

SEQ ID NO: 1887142 - DNA, 4001 bp, Homo sapiens; identical to SEQ ID NO: 1244367

SEQ ID NO: 1887143 - DNA, 4001 bp, Homo sapiens
cccagctacttggaaggctgaggtaggagaatcgcttgaacccaggggggcagaggttgcagtgagcccagattgtgccactgggcgacagaacgagactctgtctcaaaaaacaaaacaaaacaaaaaaagccagaaagatttaagtcttctctcagagcctcagtttctacttccacaaaatggagaaatttcactcttgccttctagggacagtgtgaaagtaagttcaaagaacaacttcatgatatatagtgtatataaggttaatcattattgaggctgaactgacttcgtgcttaattaaatattatcaatcatagtccaagtcatcccaagttccagaagatctctgacagaaggatcccaggtcagggtcccagaaatacctcacctgtacaggccagatgtatggaacggtccgatttttctggaggaataaccaatcctgctttccgggcatgttgcataaactccttttctgttttaaatttaggttgataaataggagatgtgaaacgttttttagttcttactggaactatagctgcggactgagtcaccagaactggctggaaggtaaaggaaaggttaggaacctagaaaaaagatctactatcttttacaaactctaagcaaagcactatagagagggaatatccaaagaatgcttcaggaacaattataaaacaatatcacagggaaaaaatgcattaggaccttaatacttatgggtgtctctaaatagaagacagttagcaacctttattaacatcacatttactaaaggctttcctttagaacttcccacagtacaggactatgctaacacctacggatactgagttgatcaaagcaagtttcaaaaactgatggtgatggggaaacaccaactcaatactgaaatgggcagaatactattctttattattttttgaggcagatcgctagcctggagtgcggtggcacgatcacggttcactgcagccttgacctccttgggctctagctatcctcccaccgcagcctcccaagtagttgggactaaggagtgcgccatcgcatccggctaattttaaaatttttttgtaaagaccaggtcttatatgttgcccaggctcatttcgaactcctgggctcaagccatccttctgcctcggactttcaaagtgctgggattacaagtgtgaaccaccgcgcctggccctgaatgctatgcttaaagcataagcaaagtcctcttgtaggcatctgctccatatgtactcgtgatattttgctcatcctatcgggagtctcgctgtaaactttattctgtcgttttagcacccaactgaccaataaaccctcgaaagaccaggagaccttttctctctgatcatgaggtttgctcagacggggcggtgacaatatgggacgccctcattttcggctactcttcaacgtagttcacttataagaatcgaagattagggagtccaccttccaacccattacttgtctctcctttaatatctcctcgccagacagacccaaaccaatccggaaaaacttaatacccgttaattcactcgctctcatggccctgtctaggctatccccattcgaccactgagctccgcagctaggtcctgtccacctaagcctcttccccggcctaggtatgactcgtattgtcccagctcaccaaggacaattgcacagagagtatttccctcgactctgtcctcctcctgtagcccctagggtcctatcggccccgtccctacccacctgccgagaccaccagcccaaaaccctcgataaacaagagaacccttgaggtatgagggctgccatcttgttcccgcaaaggccgccgggaagggagctgagagtgaagagcgtcgggtaggagaaaagccgcatagggtggagctagcacaggagtggaattttccagggagcgcgccctccgccgaaatgtgagccgcgaggacgcgcacgtgctcgcgggagtgggggagggtggagtaaggcgggcggagtacggccgcgcgtgcgcagggagacaatgttgggcgtagggtggaaccaactgttgtcacgcgccagcgagagagcgcttgaacgcgagctgcgcctgcgcccgaggctttctgaaggccgggaatgggcattgctgtatgcttggcacattgccgtttattccattagttaaaaaaggaaaaggaggccgggcgcggtggctcacgcctgtaatcccagcactttgggaggccgagaccggtggatcacctgaagtcaggagttcgagaccagcctggccaaaatgacgaaaatacaaaaattagctgggcgtggtggcacgcgcctgtagtcccagctgcttgtaaggctgaggcaggagaatcgcttgaacccaggaggcagaggttgcagtgagccgagatcgcgccactgactccagccagagctagactccgtctaaaaaaaaaaaattagtcgtagggtggaacgcacggttgtcatgcgccagcaagagagcgccgggcttggtggcaggcggctgtagtctgagctacttgggaggctaaggcaggagactccctcgaacacaggaggcggaggctgcagtgatccgagatcccgccactgcactccagcctcggtgacagagaaagactttgtctcaaaaaaaaaaaaagagattgactactatcttctactatgtttactaaagcagaagacacgtgaattgacaaaaacatttgtgatttgtcatttcggaaaagagtcacagagcaattacgtaatttacttaaggttagataggtgataactggcagaaccgagattcgaatctaagcagcctaattccagaacccatgcaggtaactgctacgtgctgcttcatgttgagttgttaaaggattcgtgatgttgggatcaccctggtaaattcagtagcgtaaacgttgctgaaaggcagacactttccacacttagccgttggttattattctgccaattacagcttacagagttcttatctacaatattttgcaataagttaggagctacaggctgtacatacaagaaatttcaggctgaagtggaattgctacaaaggtcgaagcaaagtgctggggactatcagaggaactgaaagattgcttttgggtttggagatcacgtgttgttgttgttgtttttggagacggagtctcactctgtcacccaggctggagtgcggtggcacaatctcggctcactgcaacctctgcctcccaggttcaagcgattctcctgcctcagcctccagagtaactgggattacaggtgcacgctgccatgcccggctaattttttctagtttagtagagacgaggtttcaccgtgttgcccaggctggtctccaactcctgagctccggcaatccgcccacctcggcctcccaaagtgcaaggattacaggcgttttttaaagcttgacttcgcagctatatcgtacattcttctgtggtaagtatttccctacaagttccagccacagtattgaacctatagcacgacacattaatagtgtcatgaaattagtgctgtatgtatgtgttgaagagtatgtggggtcgtgtggggtggctcacacttgtaatcccagcacttggagaggcggaagtgggttagatccctcgagcccaggagttcgagaccagcctgcccaacatggcaaaaccctatctctacaaaaaattaaaaaattaggccaggtgcggtggctcacacctgtaatccctgcactttgggaggccgaggcaggcgaatcacgaggtcaggagattgagaccatcctggctaacatggtgaaaccccgtctctactaaaaatacaaaaaaattagccgggcatggtggcagacgcctgtagtcccagctactccagaggctgagacaggagaatggagtgaacctgggaggcggagcttgcagtgagccgagattgtgccactgaactccagc

SEQ ID NO: 1887144 - DNA, 4001 bp, Homo sapiens
agcttaatgggctgtttggcaactccattttcaccaagtcaaaacatggctttatcttctgccctggacatgttaaaaagtatataaaattttctaataagtttagcatatacagcaggtacacacacagagaaagcataattttttttctttctggatctaccaattgttcaagaatatttagcatacaggtaatggttacaaggtactcattttttaagcagaaaattactgtacccccccacccaaataatctttgcaatctgtgaggatgaaagtacctagtatttctcagaaaccatcaactcctcccaacaggctttaactttttactctccaattatctgaaatgaagtaaagcaacagccttgagaagaattaggaagtatttctaattttctacctcacctccaggcattctcaggattcttctcatcccggttattggtcttacaaaaaaaaaattcttcaaaaaggtaaaactgtaaaaatgtgtgtgtggggggggggtgggcgtggggagagataggaacaaatatggtagtatataaaaaggtttcttttaatgcaagtaaaatgcagaaatgtgatgtgtccccttcactttgaaaaacctctccatatctaatactttctatgtgcattatgtccaattctaatatttgttttccataagcagaagtcaatcatcccatcaaaatcattgactttagcaagttttgcaaataatttgtctccctctttaagaaaacacaacaaatggacttacacagtctctttaagaaggtgacatataggaaaaaagcacatatgtatataaattttgccttttaaaataatttgaatttttacatctactgtatacaaatgtattatattttattatatatatatttatacataaaaaccatcagagccaatctttgtgaaaggagaagggggcacctggaagattacaccaagaaaacaaggcttggtgcctccgcctaaagaacaaacttcagctgtgtcgtgtggccctgccggcctagccgcttagggtggtgcactcagggtttgcagaacaggagtattggctggtcctgccttcttggagagggagaggaaaccctttgaaacaaacatccatcatggagtctattgatctggtcttccttaggacaggtggtacatgccatatcccactggcgtggcatagagtcccacgggcgggatgggaagcacaggtctatggaacgggtaggatgctgcgtatatggacgctgcctgcaggggcgagctgatggggaaagggagactgaagctggagggtagcataggttttgcagccattttcagcttttccagttctgactcctgcagtcttttcgtcttggcccttcggttctggaacaagattttgacctgagtctccgtgaggttcggagagctggagaagtccgcaccctctgcaatggagaggtactgtttctggagcaacttgccctccagagcgaggagctgggacgtggtaaaggctgtgcgcggcttcggattggtcttgtgttttctcagggtgcaggtggtagggctcacgtgtcttggcggcggcgaattatcagcagggttcctgcatccacgccgctccgtcttagggagttttcccacttgaccgaggcggtctcgaagggcttgatcagcggcccggggctgtgcgcttcccgagcgccgtgccccggcagcagcagtagccgcagggtggccccggaagaggcgcttttggccggcactggggatgcctccttgggcggcttcttgtccgacacgagcgcatccacactgtagggcaggctggagaccttgacgcggcgctcctccgcggccgcctcggcgtccccaggccccggacctggcccgaccgccaccgctggccccttctcattggacgaaaacagaagccatgccttccctgccctacgtagctcccgacgcgcgactccgctagcaacccgcagcggcgactcaaactttttttgtgggggaggagggagggcgagataactttctaaattccacagtggggaatgaggcagggaggtggggagcagaaaagaatgtaactgtcccagagttaagatgaagcagttgaccattcatcagagatacttctctatagacgaagacctctctaggttttctcttgtggtcgcaggaaactcttgagtttcaaatcccattcctatttcttgcctctaaacttggagtcaagaagaaccaggttccagggcaagctctgccactcacttactgttcacctttgagcaagtcacttctctctgcgttttctcatttgtaaaactgtttaacaacaataataatatatctactgtcggtttcatgaaaagtaatgagataaaactgtggaagtgttaggccgggcgctgtggctcacgcctgtaatcccagcactttgggaggccaaggcgggtggatcacctaggtcaggagttcgagaccagcctggtcattgtagtgaaaccccatctctactaagaatacaaaaattagccgggcgtggtggtgggtgcctgtaatcccagctgcgcgggaggctgaggcaggagaatcattgaacccgggaggtggaggttgcagtgagcctagactgcaccactgcactccagcctgggtgacagagcaaggctccatctaaaaaaaaaaaaaaagaaaaaaagcgtggaagtgcttaacacagtacttgacacagcactaggtcctcaagaaatataagtgtaatctgatttgttatgctttataaagactttcctccatttttcatgtgggaaaataaaaatccagagaaatttgtcatttaaagtcaacttacttaaagtttactccctgcaaattactaggcacttgcctaatctcctcatggctgctttcatgtcctggtttctcagggtgtagatcatggggttgagcatgggggtcatgactgtgtagctgatggacacagccttgtccatgaggaatggggtgaagggccaggtatagatatagatacagggaatgaagatcatggacaccacgatgatgtgggtggtgcaggtggaagctgccttcctccttgcctttcccgagtgggacctcagcatcaccaggatgacagtataagagatcagaaggaggaggaaccagatgataactagcagcccactgttggagatcatgaggaactccaggagggaggtatcagtgcaggcaagtctcagtacttggggaacatcacagtagaagttatctaggatattggggccacagaagggcagtggaagtatcagagccagttggacaatggagtggacaaagccccccacccaggcggctactaccaggcccacacacaattgagtgttcatgatggtgacataccggaggggctgggagatggctatgtagcggtcataggccatgactgagagaaaaaagacagtcccacctcccaaaaggtggaagaagaagatctgggccatgcagccctggtaggagatcgtcttggtctcatggaggaagtccaccagcatctttggagaggtgactgtggaatagcagaggtctatgagagctagatttcggagcagaaaatacatgggtgtgtggagccggcagtcaaaagtcactgtgaccatgataaggaggtttcccacaatggtggtaacatagactaacaggaacagaaggaacaggaatttctggagctcttgggtctgtgaaaaccctaagaggacaaacattgatacctgtgtggtgttctgtggttccataggatcttcccccacgttcctacagagaaaccattgaaacaaacaaacaaacaaaaaaaatgaaaattcaatcattttccttggacagtcaggattgagttgattaagttgagttgttgagtgtcaatccgagatgtagcttaggaaagccctccacggggaggaagttccatatgttttcaagggttccagaga

SEQ ID NO: 1887145 - DNA, 4001 bp, Homo sapiens
ctgtgctttatacaggtgacactaactctgcgcgccatttcaagggttgtgcatctggtggtaccagtaacatcaaagggtgattaataatccaatattattaatgaatacatggatattggtattagaggtcaaatactatctttgtctgtgaatttttttatgtagagaagggtgatgtaaaattacaaactgagtggttttttttttcatatgaacattcccctatcctcaagagtaggacaatagtaaattcacagaacaattgtaaattaacataggtgctggccaatctgaaaccagtatattaagtgttcaaggggaatcaggctgggctcagtggctcatgcctgtaatcccagcactttgggaggccgaggcaggcggatcccgaggtcaggagatcgagaccatcctggccaacatggtgaaaccccgtctctactaaaaatacgaaaattagctgggtgtggtggcgtgtgcctgtagtcccagctacacgggaggctgaggcagaagaatcacttgaacccaggaggcagaggttgcagtgagccgagattgcgctattgcactccagcctgagtgacaagagtgagactctgactcaaaaaaaagaaaaaaaaaaaagtgttcaaggagaatgaagagactgagggagttgggcagattttattttttcaaagctggccacagcactatttgccatcctatgttaacttgctaaaaagcccaatagttctcacattgtgtgcccacagaacactgactgacattgctttttaagggaattagcattaatgtagcacttcctatttattactgtctttaagctgcctagactatgattattataacaaccaccactagcattgagcatttactgtgtcaactgcttactgtgtctcgtttagttgtgtcataacactaagatgtcattacactcattctgttggtgaggaaatagagaaatacagtaacttgccaaggtcacagaaatggtgaagctgggcttttcctcacacaccacactgctttgtcccaatattacaatgttgatctgtctccaattcacaggaaaataatttaaaatagccaatagaatgctcttaagttggaaacattcttctatccctttttttgacctttcgcatttctttttttttttttttttgactctgagagagtatttatctatgcaccctggaagccagcctctaaatttaaatatccagcatgggaccttggccctcctggccgtgggtgggtgtaggaatgggtcctagagcccttccctgagagtggaacccagagcctggaagtgggatgcccctgagccagcagctgccaatagccacaaaaggggagaaggagatgggagccagacactcatcccaatcccagagactccaaggggaagggaagatgctttgggcctcacagccaggctgagggttggccaagctggaggtacacatatgtggaagaaatggaggcccagtgccatgggcagagactataccctaggtgcccgccccagtgccagccaacccaagacaggagaaaggggttggcagttttgcatctgagagatacaagtggtgcctggccctcctgtgaggtgaggcagtatggggaaaggcacaagcactgcagtctaagggcttatggaagggggagtctctgagccttttgcatgggtgcatgcccacccacccccagctcttcagaggctgatgtggaaggcatcctgcagccactggtcacaaacactgtgcatctggggcacagtgaggagtggcgggtcggggggcaggctggcattgggaggctcatcatcatcagacaggccagcatcaggtgggtaggaactgtctaaatgcagggaggatagcaagtcctggatgagctcatgacctttcacatttctagagagcaagtgccagcagatgacagaacgaatgaacaagtagcaaatatacattcatggaaaaggtcagagcagctggttttgcttgattcactcatttgattgtgggtgtggatgtggtgtgtgtgctttggggcaggcaatgtggcagctgctcctagttgtgaatatattgcatgcctataacactgtttccatgtttgctgagttgttctttgtttctatgatgaaattaaatataccttttcatgggactagacaaagagcatcaatcattctgtggcagcagcttttcatgaatcccctaaaactgtgcaaagctgcgttctatgtgtatgcatgtgttgttccggtgagggagttctgaagtcaatgctatagttagattaccaaagacgtctgtgattccagaaggattaaaaaccactgaccatctatcattctacctatctgccatctctccatcatgtttataacatcatttatgcatgcatttatctatttatccactaagagacatatttctttccagatggtagcatttgagatgatttatttgtaattttctgtcctgctttactccttcataatgaccattgtattagtccgttttcacactgctataaagagctgcccgagagtgggtaattaataaaggaaagaggtttaattgactcacagttcagcatggctggggaggcctcaggaaagttacaattatgccagaagtcaaagggaaagcaaggcatctttttcacaaggcagcaggaaggagaggtgctgagccaagcaggaagagccctttacaaaaccatcagatcttgtgaaaactcactcactatcacgagaacagcatgggggaaccactcccattatttagttacctccacctgctctctcccttgacaagcagggattacgggcattacaactcaagatgagatgtgggtggggacacaaagcctacccatatcaaccatgtatcattcttagaaaaataatgaagtgattaagagaaaaggacagctgatctgggtgccccaccacgtgtccaacttatctttatacctccattgatgggaaactcaaccagctctctaggtggcctagtctgtctgtttacctcaaagtattaacatttcttccacatgctgaattcatggctaggcaatgaacaaatcaatgaagaaggctgggcacggtggctcacgcctgtaatctcagcactttgggaggccaaggggcagatcacttgaggccaggagttcgagactagcctgaccaacatggtgaaaccccatctctattaaaaatacaaaaaatagctgggcgtggtggtacatgcctgtaatctcagctactcaggaggctgaggtaggagaatcacttgagcccaggaggcggaggttgcagtgagccaaaatcaggccactgcactccagcctgggtgatagagctagagtctcagaaaataaataaataaacaaacaaatcgatgaagctccagggggcagataaaacagaagtgagtcttggggtggaagacagggagaggcatctgtggctggatccctagaagccatctgagaacacctgcctgctttgccatcccagatcagggacagggtgccaaggacagcaaacagggctcagcacagcctgggcatgcaaatggcttgtctgtggttcacggaacaagctcaggaagctggcagggaggaaggggatatagtgaggcagaaaggagaagaacaaagttcaaatacacaagggaagggagtaggtggggctcacctaatgtcaacagcccttgggtgcaggaactctgtggagaatgtgaccccaagaagggagtggtggcaatgccaacatgccttggttaagagaaaaggccctttggctataatgctgtgtcctagttcccaaggcagcccccaactagatttccctcaaaatgcaggtgtgtgtatgggtatgtagagaaggtagagtaatcacatgcaccatattttaaatgtcgacctatttttacctcaaaaatttcatctggtcctcatggaacctttaatgc

SEQ ID NO: 1887146 - DNA, 4001 bp, Homo sapiens
ctgggcatggtgacacacctgcagtcccagctgctccagaggctgaggcaggagaatcacttgaatctgggaggcagaggttgcagtgagccgagatcgcaccactgcattccaggctggcgacagagcgagactccatctaaaaaaaaaaaaaaaaaaaggagctggataccatcctggccaacatggtaaaaccccgtttctactaaaaaatattaaaattagctgggcatggtggcactcgcctgtagtcccaggtacaggggaggctgaggcaggagaaacacttgaacccaggaggcggaggttgtagtgagccaagatcgcaccactgcactccagcctagcaacagaatgagactccgcctcaaaaaaaaaaaaaaaaaagaaagaaaaaaggatacataaaaacatggaaaaaaatgtgaaaggatttaaaccaaaatttaggtagagatgacttctatgctaaaattttaggcaagatttaaaattttccttcagtatgtttgattatgtttttcaatgtgtgtactatttttggaattcttttaaaggctcatgtttttaaaataaataaaagtaacctgcctcttaagatttcatatccacttctcatcaaagacgtggatataactgacaacagtaaggtgaagagagggtcgtttgatggatgagatcattagcacagctgctaaaagctgttgcctgtcatccaagctctctgtaaggattaacattccaggactgacacacagcagctgtcagtaagcaaacttaaattctgcctcctggctgtggcagaggtttgggcacatgttccacatatcggtgtccctaggaaccgtcatcgcagactccatcggtcacattttccaaagcgagaagctgaagaatcagccgtgggcagatggaaagaaccttgcttaaggatagaatttgccagcctgattcctccctcctagttccaagggccactaagatgccgcttccggaggccgcaagaaaaaagaaagcctctccatggtgaaggagaaaaacatctcccttggggaacacacccaaaacagggcttctcttagattccaataggctgaccttcacaagagggcaaactatcttctcagctcctcacagaaactatggcttgtggctttcctggggaaactgaggtactgcgcagtgtgaaggctcaaagtatgagaaattatgtttaaaacatggatgggaaaggtagtaccttctgagcaacaaaatcatcactttttccactatttggaaaaataattcaattggtacccacggatttgagtatctgaacctgactttatataagaatatatgtgtagccgggtgcggtggctcatgcctgtaatcccagcactttgggaggccgaggcgggcggatcacctgaggtcaggagtttgagaccagcctggccaacatggcgaaaccccgtctctactaaaagtacaaaaattagccaggcgtggtggcgggtgcctgtaatcccagctactcaggaggctgaggcaggagaatcacttgaacccgggaggtggaggttgcagtgaacccagatcacgccacagcactccagcctggcgacaagagtgctactccgtctcaaaaaaaaaaaaaaaaaaaaacaggaatatttatgtgtaccacatgtacaacataataatatggctatgtatgcactgaaaattttcaaacgggctttgttgacaagaattttaaattttctgtctggcccagtcagtcatgggacttgccctcaaatgccctctccacactcaatttcataccctccccaccacacagtccttcacggatctactgtctggaattacacagcacaaataaatcgcggggacgaacaaggtcctgctcactcgcaaactcttaaatgcacacttactggccaggtcccagtacggcctccaggcctgccgcagctacggcaggagtcacttctggcctttccttcccacagactgacccttcccatgatgccctgggacgcaccggaagtgactcccctcctctctggacaattgaaaacatcgtttctctcctgtagtgccagggtgtctccttcaaagcacactgtggctgtctttttttttttttttttttttttgagacagtttcgctcttattgcccgggctggggtgcaatggctcgatctcgactcaccgcaacctccgcgattacaagcatgcgccaccacgcccggctaatttttgtatttttagtagagacttggcgtttctccatgttggtcggctggtctcgaactctcgacctcaggtgatccgccgcctcggcctcccaaactgctggattacaggcgtgagccaccgcgctcggcgcactgctgccgtcttttgacgcattatcagcactttgacccactccctcccccccacaactagatcatagttgttgagaaaacaaactttctcttcagttcccgaaaaaatgtcttcattagccttctgttgaatgaagagcagacattcaataaattttgttggacagaatgaaccaatattgagtagaaaaagagcagttaacagatccaacactcaacacagaaaaaggaggaaaaaaacagcctttataacaacagctgacatttgaaacccgaagtccttaccttaatttccaaggctctaaaccatctggctcttgcctacctctgccactacattccctactactggttcactctgccccactggcccaccatctcccagagcgtttgcatttgtttcctctgcctgaaatactgtcgccctttgatattttcatggcttactcattcacttcactaggtgtctgctcaaatatcacctcttcagagaaacttccccacacagccactgtttccttatcctgcttttctttccttcagagcatttatctttaattgatatatctgtttgtgactttatctattttgttctccagtacttaaaatcctcccagcatatggtaaggtttcaacgaatgttgaatgaatgaatgcatgtttaccatgttgctagctctctgctaagccctatgtatgtattacagttttgcaattaacagttccaggtgggaatttcatcatcattgtagcttggatcattctagaagatctcaaactgattccatctatccttgtcttggtcaggcttgtcttgtcaggaggttgcagtgagccgagatcgtgccattgcactccagcatagtgacagagtgagactccgtctcaaacaaacaaacaaaaaagaatacataaaaacatggaaaaaatgtgaaaagatttaaaccaaaatttaggtagatattttgaggactttgccatgataccctccaacaacctatcaggtatagtgatgaatttaccaccacttgcccaagacagtcctggttttaaaatggaaagtttcaagaactcccttagccccaaacaaattggcatggttggtcacctactttcagatatccaggctcctatcttccctgttttgttttactgctatgtggggaggaatgaatctacacagaaaattggctacatatactgggtagaatgagaggactaaaaagacagtggacaggctttggcagctggtgggcctcaccagacagcagcatcaaagacatgaacaacattggagacattgacttggctcccaaagccctctgccactgtcagtggttggtgcgttcaccgaagaaagctcatgtttttcaaaatcacaaggttctctgttgacatagcctcaaccactctcccctttcccaaactatcatgtcacatccaaatagtaacctgccatgcattcattaattcacttaattgccacaagaacctcctgagttactgttaacattcccattctacaggtgagaaaactgaggctgacaaagattaagtaacttgcccaaattcaagtagcttaaatagtgaagtcagaatttgtgacccagcattctgat

SEQ ID NO: 1887147 - DNA, 4001 bp, Homo sapiens
ctcctgctgcaggcgggtctccaaggagagtcggggtagcagcacggcggcgccaagcctaggaccctcgtgggggcctgagccctgcgcccagcgcaccgggggctcgtcattgagggtctccaactccgcctcactgctggagccgctctcgtcgagggaaggcccgtcgggtgcagtcggggcaaggagggagccgcgacgaagcccggacaccccttccccactcgtcctgcacccctcactgtgcccccccacccctgcacgaggccaacctcggccttcccccgtgggggcatctgcggacgcttcttcagagctgcggctgctcgacgcccgccctgccctgtggatcctggggaacacgaccgcgaacttgggatctggagtctcgtcctcctgatcaaaagggtcgccggggactgggcttgtcgggacctgcggggagcggccaccaggggaagccctcggcataccccccagccctgctaagccagccaggcgcaacgctagacggtgccgcagcccgggctcacggccccacccctcgtaccctctctggtggtcccggccctcgtcacctctctcgtgaccccgcccctcgtccgctttcccgcagccccgcccctcgtaccctcgctcgtggccccgcccttcgtccgctttcccgcggccccgaccctcgtcccctcgctcgtggccccgcccttcatccgctttcccgcggccccgccccttgcttcctctcccatgaccccgcccctcgtccggtttccggcggccccacccctcgctcgcccgtggcccggtaccctgcccctcgccctctggcggccgccgccgcagccgcagccgccgccgcagccagcgcaggaggcccagggctcgcgctacactcaggagccgctccttgaggccagcgcggcgggggcccacggcctgggaagcggcgcctggcgggggcctcgcgaggagcctgcggaccaccaggagggccgccagcggggctgggtcctccggccccgctcctgctgcggctcccgcttcgccctcgcctgccgccgctggcacctgccccaccgcctttccgacctggtggcgcggagcccgggccgtcgaggcctgcattgtttctggctcggcgccccgctgcgcccggttgtcgctcgcgtccttggccggcccagtgtcccgaggagcccgcgagctgtcctcgaaggtcctggaggccatagctgcccgagagccccgtccaggtccggtccccagcggactcgagtcggagtccccgccggaatgctcgctggctcccaggggccccgtccccgacgacccttcccggccccgggtatctgcgtggggccagtcgctgtccaggccgtcgctgcttggctccagcgctgactccggcccggtttttgtcccttccgagcccatgtccgtaggctccggcgtgggccgcagctcccgggctgtgccgcgctggctgccgctctcctgggcctcgcgggtttcgctgtccggacaggagctgcctccgtccccacccgacgtgtccccattgaggctcctgggcgtccggcggccccgccgagccgagggccccttatctttccgcttcctcctacggcggccgcccagctcttctcctccggagaggcttccctcctccaggcgccccccgcggccgcccctgggcccgcgtccctgacgctgcgcgttgctttgcctctcctgggctttcggggacagcccagcccctgggcgtctgcagccgccgttcccctctgcagtgggcttcctgcggccaccaggggttccctggcccccggcggtggcaggctcggccgccggtttcgccctgtccgcctgcccgcggtcggaacggcgttcccggctgggcgcgccatccgcgctggccgaccccgactcctgctcccctgaggccggcctcccgggcctctccaggcgctggggcgctttgcgctggttcctgcccatggctggcccaaaggagacgggcttcccgacgcccaggtcctttcccctccccggggatttggcctcccgcggtgaccttctgtgcagtgcaccacccggctctgctctcgcaggggctacaggctctactccccgaggtgcccgccttacaggaccatcaataatgcagaaggcggcgggtcctgaccccctcggccaacaatggaatagaggcgcccaggaaacaggagacgctacagctgcggacagggcaacagtgccgccgggaggcgctgccagccaggccagcctcgcaccgcgccagactgagggggtccatgctccactcccacctcagtgcttgcccagcaaggaagggcccagagaacctgtctggacttcttccttctgagggttccaagggactggggccaggcccaccctggcacacggcagcactccatgagtcgctagggtttttgttcttttcaattgtggaataaatacaatttaccgaaaagtacataaaacataaatgtacatcttgaactggtgtaaaacatgcctgtctacctccttggagttgtggaacagaaccacaccccatacattcctgattgccccaatgtgtgtgtttttaaaatatctatttttaaaacaggtaatacattcacataattcaaacatccaaacattacaagataaaagtctcccattcctgaccctcagcctatgtactcagtgttcccctgaggttacccatttctgtatttccttgcaaaattttccaggttggccgggcgcggtggctcacgcctgtaatcccagcactctgggaggccaaggagggcggatcacgaggtcaggagatggagaccatcctggctaacatggtgaaacccccgtctctactaaaaaatacgataaattagccggtcgtggtggggggcgcctgtagtcccagctactcgggaggctgaggcaagagaatggcatgaacccaggaggcaggagagaatggcatgaacccaggaggcagagcttgcagtgagctgagatcacaccactgcactccagcctgggtgacagcattttgtttgtctcaaaaacaaagaaacaacaacaaaaactttccatgcagagaaaagcaaatattatatttttcccctttagcacaagtggtagcttatgtagctccggggtctccactttgcctttttcacttaacaatgtaatctggtgatttcataataataccataaaaagccagcctgccttcctcccttctctcctccctctcttccttgcaaataaatgcaccatggttgaaccaattccttattgatgggtttctacatccaaagtggatcctggccaagtgaggtggctcatgcctgtaatcccagcattttgggaggccgaagtgggtggatcacctgatgtcaggagttcgagatctgcctggccaacatggtgaaaccccatctctactaaaaatacaaaaattacctaggtgtggtggcacatgcctgtaaccccagctactcgggaggctgaggcaagagaatcgcttgaacccaggaggcggagattgcagtgagctgagattgttccaccctactccagcctaggtgacagagcaagactcactctcttaaaaaaaaaaaaaaaaaaaaaaaggtggatccttccttcctctcatcttttgcttaagttacagccaatactggaatacaatttcaccagcatctgcatagaatcaactataagtagaatcgctgcaccatagggcacttgcatttgtaattttgagatttccaaatttttctccacaaaggttgtgccgatttatattgccaccaataatgggagaccaccattcttttccaacactctgaaacatgacaaaatttcagtgccactttgaggaaataagatctagtgttcaatagatcagtgggatgactatagataacattaattgattgtacatttccaaatagctagaagagaattgttgg

SEQ ID NO: 1887148 - DNA, 4001 bp, Homo sapiens
tcctctagctagacataaaaattctccaagtccccactacatttgctagacacagagcactgattggtgcgtttacaaacctttagctagacacagagtgctgattggtgcatttgcaaaccttgagctagacacagagcactgattggtgcatttacaatcctttagctagacacagaagttctccaagtgcccaccagattagctagatacagagtgctgattggtgcatccccaaaccccaagctagacacagagtgctgactggtgcatataaaatcctcaggctagacataaaagttttccaagtccccatctgactcaggagcccagctggcttcacctagtggatcctgcgcagggctgtgccgggcgcctgcactcctctcagcccttgggcagtcgatgggaccgggcgctgaggagcagggggcggtgcccgtcggggaggctcaggccacgctggagctcacaggggttgggagggggctcgggcatggcgggctgcaggtcctgagccttgccctgtgcagggcggctggggcccggtgagaattcaagcggggtgcaggcgggccggcagtgctgggggacccggcgcaccctctgcagctgctggcccgggtgctaggcccctgactgcccggggccgggggtgcggggcccgctgagcccgcgcccacctggaactcgcgctggctggcgagcgctgcgcgcagccccagttcccacacccgcctctccctccacacttccccgcaagcagagggagccggctctggcttcggccagcccagagaggggcccccacagcgcagtggcgggctgaagggctcctccagcacggccagaatggacgccaaggccgaggaggcgccgagagcgagcgagggctgctagcacgttgtcacctcgcattctgaaccacagactctccaactctccggcgcttttcgcccactcggtccctcagaacacgaagggctctctcatcctgtcactaaaacgattagctgtccggagacacggaaaaagtcgcccctcttctttgcaggattcctcccttgaacttctccaaaccctcttagtgtgacgtgaccccacccctagctaacccaggctgcttccttaccagcttcccgccccctggggaggcggcaatgcaaagaccgtccgctgccagctctgccgctatctctgtggggtgaatctaacatggcggacaaagacagtaactagtcccgtttctccgcgttttcgccaagaagattggctcttaccacttgtccctcaaaacgaccaccccattgactggtggcgattgcgtcgacggagacggggcaaaagcaagctgaacccgaaaaataacaaacactggggctgaggggtggaactacgagtgcgcagacatgggccagagcgcatttcccctgccccaggcaaattcggcgctcactgcgtccccgcaggccactgaccttacaagactacttgccccagactcctggggctggatgggaattgtagtctccctaaagagttgtacgtatctttttaaggcctagtttctgctttcaaaatacgaaaacataacactccagtccataactgttgacaagtacaagcgcgcacaggtctccaatctatccactggatttccgtgagaattgtgcccgctctggtattggatgttcctctccataagactacagtttctaaggaacactgtggcgaagacctttcattccgcaacgcatgctggaaataattatttccctccacccccccaacaatccttattacttatatttaccgaaactggagacctccattagggcggaaagagtgggggattgggacctcttcttacgactgctttggacaataggtagcgattctgaccttcgtacagcaattactgtgatgcaataagccgcaactggaagagtagaggctagagggcaggcactttatggcaaactcaggtagaattcttcctcttccgtctctttccttttacgtcatccgggggcagactgggtggccaatccagagccccgagagacgcttggctctttctgtccctcccatcctctgattgtaccttgatttcgtattctgagaggctgctgcttagcggtagccccttggtttccgtggcaacggaaaagcgcgggaattacagataaattaaaactgcgactgcgcggcgtgagctcgctgagacttcctggacgggggacaggctgtggggtttctcagataactgggcccctgcgctcaggaggccttcaccctctgctctgggtaaaggtagtagagtcccgggaaagggacagggggcccaagtgatgctctggggtactggcgtgggagagtggatttccgaagctgacagatgggtattctttgacggggggtaggggcggaacctgagaggcgtaaggcgttgtgaaccctggggaggggggcagtttgtaggtcgcgagggaagcgctgaggatcaggaagggggcactgagtgtccgtgggggaatcctcgtgataggaactggaatatgccttgagggggacactatgtctttaaaaacgtcggctggtcatgaggtcaggagttccagaccagcctgaccaacgtggtgaaactccgtctctactaaaaatacaaaaattagccgggcgtggtgccgctccagctactcaggaggctgaggcaggagaatcgctagaacccgggaggcggaggttgcagtgagccgagatcgcgccattgcactccagcctgggcgacagagcgagactgtctcaaaacaaaacaaaacaaaacaaaacaaaaaacaccggctggtatgtatgagaggatgggaccttgtggaagaagaggtgccaggaatatgtctgggaaggggaggagacaggattttgtgggagggagaacttaagaactggatccatttgcgccattgagaaagcgcaagagggaagtagaggagcgtcagtagtaacagatgctgccggcagggatgtgcttgaggaggatccagagatgagagcaggtcactgggaaaggttaggggcggggaggccttgattggtgttggtttggtcgttgttgattttggttttatgcaagaaaaagaaaacaaccagaaacattggagaaagctaaggctaccaccacctacccggtcagtcactcctctgtagctttctctttcttggagaaaggaaaagacccaaggggttggcagcaatatgtgaaaaaattcagaatttatgttgtctaattacaaaaagcaacttctagaatctttaaaaataaaggacgttgtcattagttctttggtttgtattattctaaaaccttccaaatcttaaatttactttattttaaaatgataaaatgaagttgtcattttataaaccttttaaaaagatatatatatatgtttttctaatgtgttaaagttcattggaacagaaagaaatggatttatctgctcttcgcgttgaagaagtacaaaatgtcattaatgctatgcagaaaatcttagagtgtcccatctggtaagtcagcacaagagtgtattaatttgggattcctatgattatctcctatgcaaatgaacagaattgaccttacatactagggaagaaaagacatgtctagtaagattaggctattgtaattgctgattttcttaactgaagaactttaaaaatatagaaaatgattccttgttctccatccactctgcctctcccactcctctccttttcaacacaaatcctgtggtccgggaaagacagggactctgtcttgattggttctgcactggggcaggaatctagtttagattaactggcattttggcttttcttccagctctaaaacaagctccatcacttgaaatggcaaaataaaatcatggatgaggccgagggcggtggcttatgcctgtaatcccagcactttgggaggccaaggtggtaggatcacg

SEQ ID NO: 1887149 - DNA, 4001 bp, Homo sapiens; identical to SEQ ID NO: 1244429

SEQ ID NO: 1887150 - DNA, 4001 bp, Homo sapiens; identical to SEQ ID NO: 1244444

SEQ ID NO: 1887151 - DNA, 4001 bp, Homo sapiens
aagacctacacaaccattctgtttttcactatcagcacagtaataaatgacatgaggtattcaacattttataatataggtttatgttagatgattttgcccaactgtaggctaatgtaagtgttctgtgcatgtgtaaggaaggcaggctaggctaagctatgatattcggtagatcgggtgtattaaatgcattttcaacttctgatactttcagcttacaatgggtttatcggaaggtagccccatcgttaagtcgaggagtatctacacaagttaggtgggctaagatcctgggttcggagttgaaaaagctgcgtttcgggaccttgattttaaataagcagttggacatattaacctgaaacttaaagggcaggtctggactgggggtaaaatattgagaatcactggcatatagacagttgtagctatgggcttagaagaaattgcctgagcgggaaattgagagtgagaagacggcctttgaggaataccagcaatgaataacaaagtagaggagggtgaggccgcaaaagagaggtctgagtcaaaccaggagcgaggcattccagaacacatgtgaagagtgctttccgtcaaggaagccatggtcaacaacgtcaaacgctgctgagatatcaaataagataaggattgaaaggtatcaattaagttgagggacaggtttcagtgggatgatggggcagaaatcagactgcagtaggttgaagggtgagtaggtggtaagcaaatggaagacaataaatatagacaactctatcaaatttcctgctgtaaactgggacgggaaaaggtgacagctgtgggggtgggggaagggtttaagatagagaagcttgattatgttaagaaggagcaggtgaatatacagatagggtctgaagtactggcagaaggactagccttaaaaggagaggccatggggaaaaggaagagaaagaagccaaactaaatgacctttaagatcccttcttactctagaatctcatgacctacaagtcccttcagatagggcatttgcatatatgcataaatctatgcaaacttattcaaaaattctgttataaatagatcagtcaatcacatctttcacccccaatgacgcagttaatgtcctcaggtttatgaccagtgtaatctccgggcaggactcatcccttgagagcttttagctcaaggcagactgcaatacagcactcaaccagctctctctcctcgccaaacccatcctacccaacgatcctaaaggctaaaggaggaagtaaatttaaaaccctgaaactacagcatatcctgctgcattcgaagcgagtgtcatccataaaaacaaaacgtgacaccccaaatccatcctcactccaagctaaagccaattcctgcctgacccgacagttgacaggtcccccagatggccgggctttaacactaaaagtcattggcaccccctcctctttcccaacgacctttaatttgtgaagagccagacatgggttcctgaagatccttcctacaccccttgccccgaatgcagcagaggtgctcccggcagttactccggcgccccctaataagccctcgcaagggggtgcggaaagacccccagagcccgtcagagggggcttcggcgaccgcgaccctgcggctgtgtggaggacgagggaacaagccccaagggatgggaagggaggatgacgggaggcgcagcagacgcgtgtaacgaggggtcatctcccctcgaggggggtggagttgttgaggagggctaatcccctgccaccgctcccctgctaccctcaagtcccgctctggcctcgcgccccattgctcggattcactcccactcctctggggccgcctggaccccagagtgcccgcgagcccggcgcccctgcctcaagcctgggctcccagaccggcactcacccggcccgccatcttcgcggacacgtccggctcggcggctgcagctctgcgctcggcaaagcccgcccccgccgcgcgcgcgcccccgccgcccgccctcgcgcaggcgtgcaaccgccgtgaggacgcgcgcgtccctggccgcgtccccggcgtcctcgctccacagggcgcgcgcgcgggctcggcggccgcctggggtgcgcggggtgggcagagcggcggcgccattttggctggagctgcggggctgtggtgggtgactccgtttccaacgtgcgtgtcagtccgccggggcctggagggctgcgcctgcgagtctcatcccccactggcggttcgcgccggaatttgtctcaagggctttaatgcttcggatcacttatccctttgccagctgctgttcgccctcgaatgtccattttggtctgtgcttccacactctctttaaacatggtcttgctgatgagagcgcccggcgcgttccctggcttcccccaaaaaagatcagctccgaggagttggttctgagttcaaattctccatgaattttctcacttttctttgtaggcgtacttgttttcctagttgctggaattgtcatcgttggcagttttatttatgtgtagcctggaaaactcagtattttcagatttgaaagtgaattgtgattatttttatacattatttttattaaatatttgtctttatttaataaaggcaacttgcatcttcgaccaaccttttcattccccagtgttgtttcattttagacaatatatatggtagaatctgaataaaatatgccctaaattgagccttgttgaacctcaatgtttccaccataccatttctccactggaatctcagaatatctaactgcaagcacgctgagaggagaaagattctgccgaatggattccctgatgcttttatttaccccactatcatatctctcttcatatttgcacaagacaatagggaatgataggatttgttcgctttcatttctcacaattagaataaatcggggtttttttcccaacatgaggaaagaagggaaataactagaagagctgagcatgcatagtgatttaaatttgagaactaataaaatcagacagtgacctgaagatgaactagggacagaagaaaaaattcatgccagccaggcgcggtggctcatgcctgtaatccaagcactttgggtggatcacctaaggtcaggagttccagaccggcctggccaatatagtgaaaccccgtctctactaaaaatacaaaaattagccgggcgtggtggcgggcgcctgtgatctcagctactcaggaggctgaggtgggagaatcgcttgaaccccggaggcagaggttgaagtgagttgagattgcgaggctgggcaacagagcgagactccgtttaaaaaaaaaaaaaaaaaaaaaattcacgcctatttcattaagtctcacactgaacctgaggaccagggtgcttggttgaccaaatcagatgttagctaaatcatgggtgggtcggagaggttatcaggaaagataggaaactagttgagttctgacatactaacgtgcagaagctactaacttacaaaaacaaatattagaatggcttggggagtccaaagggttaggttcttttctttgtccctatctacccatcacctgtgtaccttcatctctctgagcccagtttccttatttgtttttgtttgtttgtttttgagacgcagtcttactctgtcacccaggctggagcacagtggcatgatctcggctcactgcaacctccgcctcccgggttctagctattctcctgtctcagcctcccaagtcgctggtattacaggcgcctgccaccacacccagctaatttttgtatttttagtagagacagcgttttgccatgttgtccaggctggtctcgaactcttgacctcaggtgatccactggccttgtcctcccaaagtgctgggattacagaagtgagccaccacgcctggcctagtttccttatttgtacagtgagaggtataat

SEQ ID NO: 1887152 - DNA, 4001 bp, Homo sapiens
aagacctacacaaccattctgtttttcactatcagcacagtaataaatgacatgaggtattcaacattttataatataggtttatgttagatgattttgcccaactgtaggctaatgtaagtgttctgtgcatgtgtaaggaaggcaggctaggctaagctatgatattcggtagatcgggtgtattaaatgcattttcaacttctgatactttcagcttacaatgggtttatcggaaggtagccccatcgttaagtcgaggagtatctacacaagttaggtgggctaagatcctgggttcggagttgaaaaagctgcgtttcgggaccttgattttaaataagcagttggacatattaacctgaaacttaaagggcaggtctggactgggggtaaaatattgagaatcactggcatatagacagttgtagctatgggcttagaagaaattgcctgagcgggaaattgagagtgagaagacggcctttgaggaataccagcaatgaataacaaagtagaggagggtgaggccgcaaaagagaggtctgagtcaaaccaggagcgaggcattccagaacacatgtgaagagtgctttccgtcaaggaagccatggtcaacaacgtcaaacgctgctgagatatcaaataagataaggattgaaaggtatcaattaagttgagggacaggtttcagtgggatgatggggcagaaatcagactgcagtaggttgaagggtgagtaggtggtaagcaaatggaagacaataaatatagacaactctatcaaatttcctgctgtaaactgggacgggaaaaggtgacagctgtgggggtgggggaagggtttaagatagagaagcttgattatgttaagaaggagcaggtgaatatacagatagggtctgaagtactggcagaaggactagccttaaaaggagaggccatggggaaaaggaagagaaagaagccaaactaaatgacctttaagatcccttcttactctagaatctcatgacctacaagtcccttcagatagggcatttgcatatatgcataaatctatgcaaacttattcaaaaattctgttataaatagatcagtcaatcacatctttcacccccaatgacgcagttaatgtcctcaggtttatgaccagtgtaatctccgggcaggactcatcccttgagagcttttagctcaaggcagactgcaatacagcactcaaccagctctctctcctcgccaaacccatcctacccaacgatcctaaaggctaaaggaggaagtaaatttaaaaccctgaaactacagcatatcctgctgcattcgaagcgagtgtcatccataaaaacaaaacgtgacaccccaaatccatcctcactccaagctaaagccaattcctgcctgacccgacagttgacaggtcccccagatggccgggctttaacactaaaagtcattggcaccccctcctctttcccaacgacctttaatttgtgaagagccagacatgggttcctgaagatccttcctacaccccttgccccgaatgcagcagaggtgctcccggcagttactccggcgccccctaataagccctcgcaagggggtgcggaaagacccccagagcccgtcagagggggcttcggcgaccgcgaccctgcggctgtgtggaggacgagggaacaagccccaagggatgggaagggaggatgacgggaggcgcagcagacgcgtgtaacgaggggtcatctcccctcgaggggggtggagttgttgaggagggctaatcccctgccaccgctcccctgctaccctcaagtcccgctctggcctcgcgccccattgctcggattcactcccactcctctggggccgcctggaccccagagtgcccgcgagcccggcgcccctgcctcaagcctgggctcccagaccggcactcacccggcccgccatcttcgcggacacgtccggctcggcggctgcagctctgcgctcggcaaagcccgcccccgccgcgcgcgcgcccccgccgcccgccctcgcgcaggcgtgcaaccgccgtgaggacgcgcgcgtccctggccgcgtccccggcgtcctcgctccacagggcgcgcgcgcgggctcggcggccgcctggggtgcgcggggtgggcagagcggcggcgccattttggctggagctgcggggctgtggtgggtgactccgtttccaacgtgcgtgtcagtccgccggggcctggagggctgcgcctgcgagtctcatcccccactggcggttcgcgccggaatttgtctcaagggctttaatgcttcggatcacttatccctttgccagctgctgttcgccctcgaatgtccattttggtctgtgcttccacactctctttaaacatggtcttgctgatgagagcgcccggcgcgttccctggcttcccccaaaaaagatcagctccgaggagttggttctgagttcaaattctccatgaattttctcacttttctttgtaggcgtacttgttttcctagttgctggaattgtcatcgttggcagttttatttatgtgtagcctggaaaactcagtattttcagatttgaaagtgaattgtgattatttttatacattatttttattaaatatttgtctttatttaataaaggcaacttgcatcttcgaccaaccttttcattccccagtgttgtttcattttagacaatatatatggtagaatctgaataaaatatgccctaaattgagccttgttgaacctcaatgtttccaccataccatttctccactggaatctcagaatatctaactgcaagcacgctgagaggagaaagattctgccgaatggattccctgatgcttttatttaccccactatcatatctctcttcatatttgcacaagacaatagggaatgataggatttgttcgctttcatttctcacaattagaataaatcggggtttttttcccaacatgaggaaagaagggaaataactagaagagctgagcatgcatagtgatttaaatttgagaactaataaaatcagacagtgacctgaagatgaactagggacagaagaaaaaattcatgccagccaggcgcggtggctcatgcctgtaatccaagcactttgggtggatcacctaaggtcaggagttccagaccggcctggccaatatagtgaaaccccgtctctactaaaaatacaaaaattagccgggcgtggtggcgggcgcctgtgatctcagctactcaggaggctgaggtgggagaatcgcttgaaccccggaggcagaggttgaagtgagttgagattgcgaggctgggcaacagagcgagactccgtctaaaaaaaaaaaaaaaaaaaaaaaaattcacgcctatttcattaagtctcacactgaacctgaggaccagggtgcttggttgaccaaatcagatgttagctaaatcatgggtgggtcggagaggttatcaggaaagataggaaactagttgagttctgacatactaacgtgcagaagctactaacttacaaaaacaaatattagaatggcttggggagtccaaagggttaggttcttttctttgtccctatctacccatcacctgtgtaccttcatctctctgagcccagtttccttatttgtttttgtttgtttgtttttgagacgcagtcttactctgtcacccaggctggagcacagtggcatgatctcggctcactgcaacctccgcctcccgggttctagctattctcctgtctcagcctcccaagtcgctggtattacaggcgcctgccaccacacccagctaatttttgtatttttagtagagacagggttttgccatgttgtccaggctggtctcgaactcttgacctcaggtgatccactggccttgtcctcccaaagtgctgggattacagaagtgagccaccacgcctggcctagtttccttatttgtacagtgagaggtat

SEQ ID NO: 1887153 - DNA, 4001 bp, Homo sapiens; identical to SEQ ID NO: 1244446

SEQ ID NO: 1887154 - DNA, 4001 bp, Homo sapiens
aatacaaaaattagccgggcatggtgatgcatgctggtaatcccagctactcgagaggctgaggcatgagaattgcttgaaccgaggttgcagtgagctgagattatgccactccagcctgggccatagagcaagactctgtctcaaaaaaaaaaatacacacacacacacacacacacacacacacactagaacccaacagaagaatataaattttcttttaaaaaggccaggtgtggtagctcatgcctataagcccagcactttggggaggctgaggaaggaggattgcttgagctcaggagttcaagaccaacctaggcaacatagtgagaccccatctctacaaaaaatttttaaaattagctaggtgtaatgttacatgcttgtagttccagctactcagtagggctgaggcaggaggatcacttgagcctaggaggtcaaggctgcagtgaacaaagatcaagccattgcactccagcctgggtgatagagtgagaccctgtctcaaaacaaacaaacaaacaagctctgccatttggctgtatgaccctgggtaagttgctgaacctccagaatgttcaaatctcttgtaaactctatagccaacagtaaatataatgtccagttccaaccattaatcatcatatgtcctggccagtaaggaaaagctgtcttaatgtattaaaactagaccctccttagcaaaacaacaagtttttaaaaattaattttctaaggtctctatactggaatctttggttccaatcaggaaccatttgaagtagcaaatgacaaccatttctgagcaaaggacgggagcaacccacctctttccgacactcctcactgatgatcttgctattatccagaatatctggaaaaagagaaaactccttttacttgtcccttagaacccatcgtcttgtcaagctcaacaagggaagctagaatgtgacttactgtaagaagaagggcatcgctttccattatatgcaaacctgctcaaggtcatgtcaaaatcagaaatcacctataaggcaaaagagagatgatgcctaaataggcaccagaattctagtgtggccctgcctcagcctgggggatgattatggaaatcaatacagctcagtggccaggatgtaggcaaagccctaggggagttaccgagtgacacagagggatagaggggaagtgatcctaattagtacccgttaaccctgaggaaaacgcagtctcctagtgtgggggcaagggtgaatactcaggacccctctgactccttcaatatcaggtccctcctaagagatctctaccattacggcccatctggacatcttcaacttactggggagccgctggcttggggaggataaggccctaggtactggtgtgggcgccttctgtccaattagaggaagcagcatgaccatattgagaaatctgaaatttgggttttaggacaggcgaaccaacccgctctccttcaagctcccggccatttcttggggcagagagctaggaggggtccgcggcagagcaaagcgggaaggcccaatgggcaggaagcctctccagccgcccccagcccggccggcccccgcacgccccagaggtacctgtaaccggtctccgccgcccttgcggagggcgcccacgatctcctgcacccgcccaggctgccgcatcaggaccgtggccttcatcagggtgctcacctgtcccgagacccgagagaaccactgacccctgcgccacgctgggcccgaggggagcccggggctcgctcgggcgcgcgtgtgaggcggggccggggtgcgcgagggggcggctactggcctgggtgaagcggcggtgcctcggtgaccagctggggggctcgaagcgccccgggggtcggagtccgggcccgccccactccggacgcttcctccctcctcacctcctctgccatcccgttcgaggcctggtcggcggctcgcgggacaacgacagccccgcgaccgcactgcgcaggcgtcgcctcccgcctggagcccgggcgggggttggtggggccgggggcggggcgggggtggggccgagaatcgagcggtcccggagatggccgcgatccgggtgggcttgccggttgcgctaggcaaactggaggagggttctatttattatgaagagcagggtgaaggtcccaaggtgttggggttacgtgggtaggtagggttctgccactctttgtggaggaaaagccttgccaaacgtggtcatttccaggctgaaagtttgtgacaaaaacatgactggggctgggcgcggtggcccatacctgtaatcccaggactttgggaggccgaggcaggatgatcgcttgagccgaagagttcgagaccagcctgggcaatatgacgaaaccctgtctctacaaaaaatacaaaaattagccgggcatggtgacacgcacctgttgtagtcccagctactcgggaggctgaggcacgaggatcacttgagcccgggagatccaggctccagtaggccgagatcataccactgcactccaccctgggtgacagatgacaccctgtctcagaaacaaaaacagaaaaaccacacggctggatgggaggagagatgaaggagccataaactgaattctgttaatcacccagaaagggctctgttaactaggccattcctcattccagaagaaactgagtgactaacccatccagcgggctgggagacccgggacagctttctgaaatgtaatcagcgttggctgggcacggtgcggagcacttgtaatcccagctattcaggaggctgaggtgggaggatcacttaagcccaggaggtcgaggctgtagtgagttatgatcacaccactgcactccagcctgggtgagagagcgagacccgtccctagaaaaagaaagattttttttttgagatggagtctcactctgtcgccaggctggagtgcagtggagcgatctcggctcactacaacctccatctcctgggttgaagcgattctcctgcctcagcctcccaagtagctgggactacaggcatgtgccaccacgcccagctaatttttgtatttttagtagagacgaggtttcaccatgttggccaggatggccttgatctcttgaccttgtgatccatccacctcgtgctgggattacaggtgtgagccactgcgcccggcctaagaaagaaatttaatcagttttacttctcccttcagcctcaattgacttggatttccttgagttcggtgtctagggagccaagtgttgggctgtggaaggtagatgaatgctccagggatagagacctgtatcaggtgagtaacaggagctggaatcaataaacactcagatggtgctagtggtcatggttctgttttgggttcaaggacacagaaggaggtgtgaggtggttttcagcctaagtggggtggtaaggaggggagaaggaagaggacaagtccaggaggcagttccagaacctgagagcacaatcctgtgtgatctcactgcagggccaggattctggaacttgggttgcctgatagaccctatacaaaagatgtagtagggaaaaggagcgacagctggctaaaggggccccccacaaccctccccgacaccctaggaaagcagcctctctccgctgtcccagggtgccatggagatggagagcgcggcggcctccacacgtttccaccagcctcacatggagaggaagatgagtgcgatggcctgtgagatcttcaacgagcttagactagagggcaagctctgcgacgtggtcatcaaggtcaatggctttgagttcagtgcccataagaacatcctctgtagctgcagttcctactttaggtataacagggttgccaaattcagccaaaggggtaattgggctcattttgagacactttgatccattttctgtttcccaccccatcaccttaactttagggacactgtcaa

SEQ ID NO: 1887155 - DNA, 4001 bp, Homo sapiens; identical to SEQ ID NO: 1244447

SEQ ID NO: 1887156 - DNA, 4001 bp, Homo sapiens; identical to SEQ ID NO: 1244457

SEQ ID NO: 1887157 - DNA, 4001 bp, Homo sapiens
tcttcatcaccctaatcttgatgttatctttagtttttaccaccattcttcccactgtagtctttactcatgtcttttctttctttgctcaatgttccaggggtttgttcacttcattttattttaaaagaacctatctttggcttttaaaatcctcttcattgtatttttgttttatattttattgagttcgattcccaatttatttattaaaatatctcctttcctctatgttctctgggatcactaaattgttcatttgttccagaatcctccccttctactggccatactaccactgctatttatgaatatgcatttatgtttgagagttttgttttcaggggtggatggaattcttgcataaagagaaggaaggtgaggaactacagaaataaaagataggatggtctttccaagggcaaggtctgacttcctacagagaaaaggaatgcagggaaaaggcaagagagtgttgctttgaggccccaaagataaaatcaacccagagcacaagaggaatcttgttggcatttctgcatgaaccatatgagctgtgtccagagtgactatatgtcaacattgaagtggtgcgtgttgtacctgttagaacatcaagaaaggggaagcctcacccagggcatctgtggtaggggtagtgcaaagtgtcttctctaaagagcttgaagatagcaggctccttagagaagccaaacctctgggtcataagtgaatgggtgctagaaaacatgagagccctccctaagctatgactgtgtatatatagataagcctaggactgtgggcctatgatcaagcaggtttaaatatttgaccctgtaaaatcctggtagtagtgttagcatgacattatttattgccaaggctggtgaggtctgggaggcactgggatacacattgtgtcttttcttcaccacaggtagatatgctcatcctgatctggagctgtactctgactgttgcatatcccaaagcataatgccttatgtgtggagaaggatatttccggtctccacttcaatcccctttccaaaattaccttcatttaggcctctgaaagggtctccataggactcttcccggagccccatgcatgtctttgttcctcagcctgtagatgaaagggttcatcataggtgtcagcacagcatacatcactgtggctactgagtccttcatggagtaggtatggaggggctgcaggtacaccatagcaagcatcccataaaagagggagaccacacccaaatgggaggcacaggtagagaaggttttgtatttcttagaggctgagggcatttgaaggatggttctgacaatacgtacataggatgtggtcatgaaccctaagggggtgaggaagatgaagcagccagtggcaatcaacactgtgtgaatgatgtgggtgttggaacatgccagccacagcaggatgtacatgtcacagaagaggtagtggatctctcaaggcccacagaaggtcaccctggtcaggaggaaggtgaggaggaggccatagagaacagacagcccccaacacaaggagaggagcaagacacagagcccagggctcatggctgtgacatagtggagggggcagcagatggccacatagcgatcatacgccatcacggccaggatgaggttgtccagggtcaccaaggagaccaggaagtagagctgtgtcagacaccctgcataggagatggctttgttctgggactggaagttcaccagcatcttggggattgtgttggtgacaaagaagaggtcagtgaaggagaggttggccaggaagaagtacatgggggtgtgcaggtgggaatcagagctgatggccaggatgatgagcacatttcccagcaccgtgaccaggtacatggacaggaacatccaaaacaggatctgctgctgctcaggactctctgagatccccaggagaaggaactgtgagttctcactctggttatctccatccattcccccaactttctgtaacattaacaccaacaaatgtttattaagtgccctcatttgaataaggacacgaagataagcaaaatcaactcttttcttagaattaaaatatcttggactaaactttaaaaataataaaagcaacaggtcattataggcacaaaaatagaatatggaaagtatgcaacttatttattccagcaacttctcacctgacataatgaatattataaaaacaatgtctaagccttatttttaatcctgccatcttccaatagtcttgaagtgtttaaagtttagtgtgttatgttatgattttatacagggttttaagtggtatttaatacaggtatatgcattacaagaaaagattattgtccaattggaggaagtggagaaataaaatattggaaaggagaaagaagaattattattacttgttgatataatgatctctctgggaaatctaagaaaatgagtggaaacatcattagaaaaaaaagatgtctgtgattagtcagtgaagtgacccatgacaaaatgaacaggctctcagctttcatggtccccgtaagccacgtagtgcagtgctaaagaccgtcctgtgggaactctttttttttttttttttaattttaattttagatttgggggtgcatgtgcagatttgttacaaggatatattgagagatgctgacgtttgggcatctattgatcccgaactcttaaattcaagtcaaagcactgcctcttcttggctgtaatgcctcaggcaggtcacttgtgttctttaagactcaggttttttaaatgtgaaaaatgggttggggtgaggagaaaattaaggaataaagtacttaacacaaagagctgacatgtggagagcactcaataaatagtacctgttattatatatgaatgataagaatactaagattaaaatatgaaacacattatcagcaaacaatctatgcattaagatattaataagaatcaggtatggtcttcaaattctctattgaggcataaagtaaaaatttattaaatggacagatataaccaagattctagataaaaaagatgagatgttgcaaaggtgcatattctgagttgttctaaaatttaacctatttgaaagtcaaaattgtaacagggttttaaagaaacaagagctagtttaaatttcctataaaataggaatgaaaataagctaggaaaatgttgaagacaaggagacacttgctctattaagaactttaaaatagtgggggtactggtgctagaatgaacagatcagtagaactgtctagaaacttaagaaacagccaagttcatgtggaatgtgacactttaattcaccagggaaaggttgcattatgcaataaatgacattaggacaactgtctacttattttttgggaaaagttacatcaatgttttgtattttatcaaacatactaaaacataccaaacatactagtatattttatcaaaatatactaaagattaaaaaattattttttccttttgaaaactgaatgtatatggaataaaacattaaaaatctgaaaagttataaaggagataataaaaattgtatcaaattccagcatgtagagttagataaccatggctaatgtctttttagccgagacatgaaggaccacaaaaagccagtcttgtaacacaataggcaaagagctttgcagaaaaacagccaccctgagcagagcccctgagcagggaaaggtcgttcttgtgtttaaggaagtaaatataggccagcatgtctgggagcaaagaggatattggtgagacaggatgttgtgcaatggccagtaatgaactgtaaagcagaagtggctgtgcatatttagcaactattgtttttcttcatagtttatcaacagtatttaaaaaatcaggtatggctgttgcatttttaataaaacactttttcagtgtcactcaagatacattatgtgaatagccttcttaatatg

SEQ ID NO: 1887158 - DNA, 4001 bp, Homo sapiens
atatgtttcaattgaacaatcattaaattaaaaaaatacaaaatagtttgtctcccgctacctgacccacatcatatttttctcttgtcttcaattcactttgtatcagtaacttagatactctctcacctaagcttttgcctttctcctcaatccaaggcagaccacactctaccctgaccaagactatctactttcctcccattttatgacccgacgctgaggatttttcctgcccatacctagtccttcagcataagaaagtcggggggttgctcgaggagggaggttgcattttgaaccccatcttctcaagctgggggcctcttccctgtcagcacccttttcagggtgccctgcacatcagggttctggaggctgtaaatgactgggttcagcatgggactgaggatagtgttgaggatcccaatccccttatctttgtctgaggctgagactgagcccagacacatgtaactgaagaagccagttccataaaagattcagaccacagtgaggtgggagccacatgtggagaaagccttcttcctcccctcagctgagcggatttgtaatattgcagctgtgacgtgggcataggacactgagataaagatcatggggatcactcctatgaaggtggcccccacaagcagcagctgcccattgaggtggatgctggagcaagagagctggaaaagaggtgggaggtcacagtagaagtggttgaccacattagggccacagaagtcaagcgcagacacagccactgtgtgagtcagagcattgatgaaggagacagtgcagcaaattcccaccagggcaccctggacttcacagctcatgcgagtgctgttggtgagaagctgacagatagccaggtagcggtcataggccatggctattaagaggtgacagtccaccccagccaggaggtggggaaagaagagctgtgaactgcaggcagcatagggaactctgcactggtgggcctggagacacgccagcatcggaggaacagtgactgatgcacccgacgtccagcagagatgtccagtagatgagtgggttcagcatggggctgatgacagtgttgaggatgccaatgcccttgtccttgtccgaagactccactgaacccagccttgtgtagctgaagacgcccgtcccatagaagatgcccaccacagtgaggtgggaactacacgtggagaaggctttctttctgccctctgcagagcggattcgcaggactgcagctgccacatgggcataggacacagtgatgaggaccaagggggccacacccatgaaagctgctgctacaaacagcaactgcccattgagatgaacactggagcaggagagctggaagggctgtgggaggtcacagtagaagtgattgatcacattggggccacagaagttaagaggagacagggcaacagtttgggtcagtgcattggtgaaggaaaagacacatgacatgcccaccagggcttgctggattccccagctcatgcggctgctgtaggtgagggactggcagatggccagatagcggtcataggccatgatggtcagcaagaagcagtctgccccagccaggaggtggaagaagaagagctcggagaggcaggccttatagggaatgcttctgtcgttggatatgaaatggctcagcatggcagggacagtgacactgacacaccccacatctggcagggacaagttccccaggaagaagtacatggggctgtggagtttggtttccataaggatggccgccaggatgctgagggtgcctccaatggtagtgacgtaagcaagaaggaagatgacaaagaggatgggctgtagagctgcagtctctgtgaggcccagcaggacaaacttggtcacaactgaatcattccctgagttccccagatccatggctgtcttccactagcagtggactgagcagtgttagatggggccggtggtggcagaagcaggatgaggtgttgataacaatcatcaatgagatcttgatagcaatgtccaggacagggccgggatggaagaacgcatgaaatgtaaggggaaggaagttgaagatttagatgtagtatgaaaagacttgatatctgactcttaatgggtaacaagagtggcattggacagactcaaacagagatccatgaattgatgtagaaaggggaacaaatgttacattagaaaggtaaagggaaaaattattttcctgaggccaaagttctgggaggaaaccccaagtctacagatggtggcatggccatagttgaggtacacaagatcccagaggatgaaagggaagcttcggggaagcaggaaagcatgctccccacaacctgtgtccctgcaccccccgcatacacgtgctgtcatacaccatggcagtagtgagatgcctgtcgtggcccagactattaaaagattaacatgcgaggccatgagatttggtccggacatttcagaaaaaaagcgaaatgagatgaaaaacagtgaaactaaacgaggaaacatcaccgaggacatttccagctccatagctggtgactaccagccttttagattttccaagtagtaatattacattgcatttctccgtatagagtctgggaaatttgggctcaaaagtactgaccgtttaccaaatatgaagaatgtaaaaagggcttttgagtagggtgagtctccaggcttaggctcccaggtgggtttggtggataccaagtaacgctgtttcattgaatatacaggtgaactctcacacaaatagagtcttaggtaagcagatacccacaccctgaattccccatgcctccaactccaccatcactgagcttttcactcttctgtctcctggttctaattacgcatcatccaacacacatgctatttatctgatcaccagatagggccaaagtcttttacagtgccatgaactgcccacatatatgatcacttaggtaatgcttttcttttcccagccctaatcactgctaataaaatactcggccgggcgtggtgactcacacctgtaatcctagcactttgggaggccgcggtgggtggatcacctgaggtcaggagttcgagaccagcctagccaatatggtgaaaccccgtctctactaaaaatacaaaaattagctgggtgtggttgcaggtgcctgtaatcccagctactcgggaggctggggcagaagaattgcttgaacctgggaggtggaggttgcagtgagctgagacagcgccactgtactctagcctgggtgacagagcgagactcagtctcaaaaaataaaataaaatactcagtgatccacctcaacctctggctgagggatagatatttaagtctctcacatggaggctaactcatccagggaaggggtggagttggagaccactagggggcaaaaggcatgagcagaggaagatatttcccaatgattaaatgtggagaatgccgtcctcaggtctccagagggtcaattaccatctaatagtatggccttttctgcatggacatgctcttaccattacctcaaactcagtctctccaaatcagaaccgtccttcttcaatctcaatctgctttggactaagtattttggtagcagcattgccatcctccccgtgagtagcgcttgaaagcttagtcattactgattcttccctctctctaaccctgcacattgaagcacccaaatcccactggatctttttgggtggagtgagaagctgtttcagagcccagagggtgaacttcatttgtatggagaccaagctgtgagagtacagtgaggagtcttgagatgagactcacccggccaaagagatgggcaaagaggaggagggacagtcccgccggcccagcagcctctgcagaggggatggcttataaaggacagacagacaaagggacaagcaactccgctgacatcattttcacactgggatttttctcctcc

SEQ ID NO: 1887159 - DNA, 4001 bp, Homo sapiens; identical to SEQ ID NO: 1244478

SEQ ID NO: 1887160 - DNA, 4001 bp, Homo sapiens; identical to SEQ ID NO: 1244486

SEQ ID NO: 1887161 - DNA, 4001 bp, Homo sapiens; identical to SEQ ID NO: 1244500

SEQ ID NO: 1887162 - DNA, 4001 bp, Homo sapiens; identical to SEQ ID NO: 1244512

SEQ ID NO: 1887163 - DNA, 4001 bp, Homo sapiens
ggtctttagtaatgcatctgggtagcatctcaactgctggtagcatttatctgacttggaaagttggagaagaggcattcctactggagaaaaatgtcagtgttttcctataagctctgtgttagctattcattatatttgtgcttaaagatgttccttcattcatcaactaggggaagtccagatgcgggttatcttgaaagaaacaaactgacattctaggcagacagttgtctatgtggtctgagggtcagcagctgttagtctccttcctttggctcttgagacccacacatatcactttagccctaacaagggctcctcccacctccacctgttgccccagttgaaaagcatccattatgagctgaggtcagcctggatctggaattgcagcccacataaacataaaggaggatgtccctggtctgttccatccccacggatggtgttgctgctgggcaacagtgttggcttcttttaagtaccccctttcctcctcacccacctccaaactgactagcactcagagggacttatgataaaggttcagctccaggggtagtacctgagtgtgtgccatgccccttcagaccagctgcttccatcagaattccagggtcacagccccaacagaagcagcagtgcctctgtaggaggggtgctgggctctggccttctcatgcagagaggtccgggacagggtcagtatcgtgggcatgtgtatagcttcccaagttcttttacagtccctgctgggactccctgacttactttggttggttcctagtgctacttgttttacaaactacactttgtagaattgattagattaccttgtttatttaatgtgagtttgtgcctttttgtctcaatcttccaatacaggtatattgagaaaaaaagcagtctaataaaatcctagacagaactttctggagtccagtttggtgatgtccattttccagctgtatgtatcctcaaacttgcactgataaccgccattttaccagggcaggattaggaagaggtacaaaggtgtgtctgaaaatttttgcacgtggatttctgcatataatagtcccgtgtcagtttacttatgcaaacattgcacatctgaattgtaattcggccgtttcctactgacaggatgtccttttgcttttgtctgcctcctcttcacatcttcctctttatccaccctaccaaacaagcaaaacatttatttaaagtagttttaggccgggcgcggtggctcacacctgaaatcgcagcactctgggaggccgaggcgggtggatcagctgaggtcaggagttcgagaccagcctgaccaacatggcgaaaccccatctcggctaattattattattattttttttttttgaaacgaagtctcgctctgtcgcgcaggctggggtgcagtggcgcaatctcggctcactgcaacctccacctcccgggttcaggcgattctcctgcctcagcctcccgagtagctgggattaacaggcgcgcgctatcaagcccagctagcttttgtgtttttagcagagacggggtttcaccatgttaaggccaggctggtcttaaactcctgacctcaagtgagccgcccgcctcggcctcccaaagtgctgggattacaggcattgagccaccgcgccccggcctacgtttcatttattgacggctaattctgtaggagtccaggaatccccaaacgtcccatatgcaataggtaatccaataagtttggagtagaagcctgaaagtgggcgtggagaacggaggcgctcccgcagtagcaggaatggggagattacctgcagccggggggcgggggagaccggatcccaggcaggacagtggctaggctgcgtgtccccacccccgaccctcgtttgacccctgggagccggggcgaagacagcacaaggacggagccctcggatccctcacgagtggggcagaggctgcggcggcggcgaagagacaacttccgccggaagacggcccctggcgcggggcacgctgggagctgcggacggcgggcgcgggctgggccgggtctagtggcggccgcacacctcgcgtcgtctggggcagtgttgcgcgtgcgctgatgacaggcccgacacgcccctcttacgtccgcgaacccgtcttcgctcagcctctcgcagctttgcgctcgtgggagagtcccgcctccttctgcgaaccgcaccacccagatcccggggtgcgcggagggcgcgtctctgacggaagccggggcggacggtcggagtccggaagaaaaacagtccgcgacagctaggcgcgtgagaccggccgcccgcagggctgctctggccgggacccgctggccgggagacgcgaacctgccggaccaccgcgcggggacgacggcggccatgagctcgcggaagctgagcgggccgaaaggcaggaggctcaggtgagggcaccctggcggcagaggcaggcctgctcggggggatcggcgccccttgggctgcgggctgggggtggacaaggcaccagacctccatgactgcctttggttcagaggcgctctcgccttctcccacgcctgtgtcaggtgggctgtgttgggcccgagcctcgcgccccctctaagccgaggccgccaagctcgttcccactggggcgcagcaggtgtcccggttgctttctggagaggacagccgtgtggggttgtttgaggttaaagacataacgaggccgtcacccttcggctctcggttagaaatctttttcctacttttcatcagcacatacatcaggaggtctgcctgatcccatggtgaaccccgggaatccgaaatcagattgagataagatcctttagggaagtgacttagcctggtctcttgcctgctctttcacggggaacaacgctaatcgcccacttagtctaagtcacgatgcttggatttgctgctaatcgtcggatttgagagtgggaacaagaaatccggacttttgctctccatcctcttagagtgagtctgggaaaagaagtctctgagtaaaaggtctttgttccttaagcctctgtcggacagcagggggagatcgtaaacaaatgaagctcaaaatctcaggccgagtgcctgggaaggtggtttctgtatagtgttgtttatgctaacagggagggacaggaagttgctttaaactggccaagaatttcttgaagtgcttttgagaacgtcgacctctaaggacggggtctgttggaggagagatgttttggcattaactgcccttttctcccatccccctgtaccctctgccattccagatctccagctgctgcaggtactcctcatcgtgtgcctaggactcatgctaggctgttcctggtctctgcagggtctgtagctcctgcccgctctgtgctccgcacagtctgaggcttcttgaagagctgctgtgactgactgttccactaaagacatctgtaggtctctctttcctgagcctctgactggatccagtgtcattgaggccccttatctagttttcttgcttccctaagacttgtaagctgaggtggaaaatatccaactgatgacttttccccagagagtactctttatttttcacggaatactacgcagacatagagcatagactcttaagagagatgtcgagaaacctgttacttaaaaactccttggccgggcgcggtggctcaggcctgtaatcccagcactttgggaggctgaggcgggcggatcacctgagagatcaggagttcaggaccagcctggccaacatggtgaaaccccgtctctactaaaaatacaaaagttagccagatgtggtggcacacacctgtaatcccagctacttgggaggttgaggcaggagaactgctggaacctgggaggcggaggctgcgatgagccgagatcatcccagtccactccagcctgggcaacagagtgagactcagtctcaaaaaa

SEQ ID NO: 1887164 - DNA, 4001 bp, Homo sapiens
cgggtgtctgctcccaagctgggcacccctcccccaggctgtgggaaccgctgggccattctgacctcgaaccagaaatagccccgacccccctctttctccccgcgcccccagccggaccgccccccgggaccccagccaaaccacagcgtccggcatagggcctctcccttattgcacaaccgctaggggagacagagaggatgggggtcccgggaacatgctggggtcgccagactatgggacgtaggggcgtagctcacctgttggagacaggcccgctcctcactggctgagtcagcgtcacttccaggggaccctggggagacaggcggggaagccctcagggtcagagcccttcctgcgcaaggttcgtgccttctgccctcaggacagggctgctcaggggattgaggaaggaggagtcacagagtggggtcgtgactagggtggagcacgctggagcccctgggctcgcccctcccgccagtcttaacaggacaagctcttcagaacagcaggagctaaggagccaaggctcctctcagttaccctttgaaaatacaatcaggggtagggtagggtggaaagagcactgggcagagagtcaggagacctgggttccaattcccgccccaccactaactcactgtggaaccttgggcaagtctcttcccgtctccgggccttagtttccccatctttgaaacaggagaggtgagctcgttctgccaggctccaaggcaccctctcctcctcattttcccttcttccacactgcctccctggccaaggcaggacaggtggtaggcacagaggtgaatgaagggcagagggaccctttcagtatagggctttctccaaaagcgtcttacattctcccatagacactcctgagactcaatggtgagcagagaccctgcccctttgctggggcttaggaagggcgggccagactgaggaatggcacaccctctggaggcaggtgtagttcagggttttgccctccccctccccctcctcctcccttccccctgtcctggaacttcaactgtagactggggtctgagagaggccacaaacccaacccggaggccagtcaggcgggaaccgtgccatcctcatattgctcccagactgctagagccaagagggggaggtgggggagggggccagggacacctgtccccaggctcagggaaggggggagttgaggtggagcatgagggaggcaatggcctggtaaagccgaccctgcccaagctggaagcttggggacgcctgggtcctgcacccttcctacgtgaacctccacctattttctggaaggtctgagtggggctgtcagccacaccacatgtggcaggtactgaccaccctcttaggctaactcccctaatcgcagtgccctgcttccctccctcccccctcctctatatttatccaccctccgcctccgccaggtgctggcgccggccccggcggcgcagcccgccccacccgggcaccgagccactgggcctgctggggacccctgcgcgggggatgggagcctgacccgggccacagcacacgggagtctggccgccagtgtgcaggagggatgggggaggagacgtcaagggatggaggtctcccacaccaatcgtgcctccgtttccccacggggagattcgacaaaaccaggcagcagcccagtgtccctcaccatccatcccctcaggggtttcccaggagcctcacccgggaaagccgagagttctgtcctgagtggcagggtaatgaggaggggtcctcaaagagctcccacctccctctccttggggtccccgccacagaccccaatcctgggatgacttctccccctcgtccaggtctccgcagcgggagctctcgcatctggcctccgcacttgcgaactgggagcggagggggacccaggcgttcgagccgcccagccggcctcgccacattcctcggcgctggcggaggcggaaggagacgggatgggacgcgggcccagcggggaagggagaggcagggccaggtcgggccacgcgtgacgcctcccctgcctcagggcccccagcaggtggatagcgcccagcctgcagcgggaggcccacaggcacatcccgagtagggctgctgctccgagagctcccgggggctttggcccccaggcaaaaaactctccctcatccctagttcgccaagcgcgcagcgtgtggctggaggctggagcggatcagcgtgacggccggttacagcgagagtgattgagacgaggctccgaacccccgggacttaccctcccgccgcccgctggactcggggtccgcagctcaaaggtttcctcgtcctcgtcctcgtccccgtccccgctaagctcgccgtccccgtagtcccggtgcagaagagtgaagcctcgacggcagcagagaagccaccatagtcccccggggagaggcatccgggcgaggagctgcggatgggggcgcgggcagccgcggccgagcagtagggggtcggaggaactggcggggctccgacccgagcaggggaaagatgaggtgggaggagcagaagggagaagaggacagggaggaggcagtgtcctgggctggggtgcaaggggacgctagccagacgctgaggggggctcagtgtctgggcccccggaggggggagggggaaaagcgtccagggccccgggagaggagggagcaatgtccggagctgggaagtagtgtccgttggagtgtccagccctgtggggggcagtgtccggtgcagcgtccgaggtgggcagttgtccaagctccagggagggtcgtgtccggtagggcgtccggtggccggggcccgggccgcgcgcgctgcgctccctgcagccccgggactggcgcgctgggggcgcgagcacagagctgggaccccgcccccccggccccctccctcccggggggccccccctctctcttctttctctcctcccttctttactaggcagggtccaggtttcgtcacagtctcctctgtccaatccctgtgcctggcgccgggcgcggctaccaatcagacggctgaaaccgcgttgggttgcatcatgtgcccctggcttggtgacagcggggaggggcggggaaacagggagggaggggacgaggctatgttagccacgccccagtctctgaggtcggacgcggggtgctagtgacgtcacggaagcccgccttcaggctcttgttttaactcttggctcaccaaccaattaaaaaccctgttgaggagttttggcacaggacagaggaaaacccaactgccgctctctgaacccctgtctcgtctcagggtccctgagaaagggaaacgccttggctactaagaggatgtccagacctgcgaggacacagctctggaggtggccctccacgtctggggagaaggagtccagtttctccagtttctcggtctgattcagctctcccccacccttttttttttttcttccagacagggtctcgctgtcttgcccaggctggggtgcggtggagccattatagcttactacagcctcgaactcctcggctcaagggatcctcccacctcagcctctccaggagctgggactacaggcgtacaccaccatgcctggctaattttttaaatttattttttgtagaaatggagtctcactatgttgcccaggctggtctttaactcctgggctcaagcgatcctcccagcttggcttcccaaagtgctgggattacaggtatgagccactgcactcggcctcacctccttttcgaggtgaaggagttgaggcaggcactctgggaaggtgcagacctaggccggaaataaaatcgaatatagagctcacagctcaccgaactcagctggggagactgacttggattctaaggaattctgtggtctccgaatacagtggaggcctcttagggctaatatcctgcggctctgtataggaaggg

SEQ ID NO: 1887165 - DNA, 4001 bp, Homo sapiens; identical to SEQ ID NO: 1244522

SEQ ID NO: 1887166 - DNA, 4001 bp, Homo sapiens; identical to SEQ ID NO: 1244523

SEQ ID NO: 1887167 - DNA, 4001 bp, Homo sapiens
acaaaactagccgggcatggtggtgtatgcctgtaatcccagctactcgggaggctgaggcaggagaatcgcttgaacctgggaggcagaggttgcggtgagccgagatcatgccactgcactccagcctggggaacaagagtaaactccgtcgaaaaaaaaaaaaagaaagaaagaaaaaagctgcaatcaaatggcccacccatctgatgccgggtcctcaggattcagagaaaatgtgtaccaaaaagcccccaggaaaccataaatgctgagcataggacttgggtgcctctggaatgtccttctgcctcagctactctgagataacatggtcccctgtgttcatggaacccagatggccaaaagtcaatgatccagcacttataagaaaagaaagcgattcaagagcctctgtacccacctaggcctcagcctccccaggacctactcacctatactcttcacaacaggtaacgttgcctctggcacccatcatatcccctgaattcagcatcaggactgatctgccatcagctctggcagggagagtcccttacaagtgccaagaaaaggaacatgaacaatattctgtgaccacagccaacaccacacagaacttcccagaagctctccagggcgagaacaccaaccagaaggaagtgacagcttccatcattctgtgctaagtgagctgagtgagtggccatctctcaccttccagatatttgaatgatacctaccattccagcagccagcacaagtcatttaatatgaatgccagaaacacaatccctgaggacaggtacaggagaccagatgccaggaaaaaccccggccccacccaagagttggggagagcccactgctcctccacccttatttaccacctgagcccctgcacccgccaatcatgctgctcagtctgtaactgcgggtctgagtgagcacctacatttggctgttgaggggcagctggtggagttggcaggcgactctgcactaagttctcaggttgaatgggagttgggtcgagggaaggaatggacgcagagttagggtgaagagttgcggtgggtcagcgggggtgaaaggacatggagatgtcatttttaacaagattgggtgagggtggtaggaaaggaggcagcaagagttcgggacagtttggcaaagacttagggatggggtgtcctcagtacggcaggagacgcaaaggaaggtatacagtgggctaggagactaaggacgagaagacacagttacgacttggaataaggctgagatcggagttatccagaagaaagcggtgagctcaacagggcacctactttgggggtgggtcttagatgagagggcggaggtagaatgtttaggatgagcagatcttggggagctggacaggggatgggggtgactgggataagaaagctgagccagaaaaggggaaacctgaatggtgggtctcggggaggtgagcgcggagcatcgggattaccagaggggtggggagagaggatgaggtgtgtcagggcggggcgaagggacgtggccgagatcggggttggaactggggtaaaatggggtcacgagtgaagctgcatttaagcaagaccgctggtgaggggatgcgggcgcgggctgggggctggacagacggaggggacggggccacagcggcggtgcagggggaaggctgggtcggagcggagcgggcgcgggctggacagggctgagggctctgaagccgggcagtctcagggtaaccaggggctgggaatcgcggagggagcgggaggcccaccgcccgttcgcgcctcggccctcccaccactccgccgccctcctcgcatcttgaccccctaactcaccaagcggagcgaggagcgaggcgaggggggctcccggctgcggcagcccctcagcctccgagccgacgatgcggtctctcggccactgacaacaggaagcagcgccccggcccctgacgccatcacgttggctcggcgctccggccctgcccccggcccgcggtgccaatcgcgcagcccgaaggagccttggggcggggccagctgctcccggaagtccctgggagctgagccccggggcagatgcgaggtctgggaggctggggaactgggggcgcctgcagggcgcagagaggcgacggcaccggtgtcagggagaacgcatccgttaccgcccgcctcccgcaggtctgcgtcaaactagatcctggcttctgggttcctgacctcgtttggcctcagaaccatctgtgcaacattggggctgtcacttcgcctccctcagctgaagagttcccacttgtgagtgggactaataacgcctgccctatctttgcctctccgagggcagcagtgcagcccgtggggcggagcccgggcccaaattggagcctccgcgttgcgctttcaggataaacacagctgttttgaccacactttatcccaagggaacgccttgaggtccccttgggcacactcccgtgtgtaactcgcccattagcaccgcctggcttgaagcttaggggtctggttattctcttctagcccgtgtagaggatttctttcttcctttctgtttttttttttttttttttgggacagggtctcactctgtcgcccagactggagtgctgtggcacgatcacggctcaccacagctttgacctcacggactaagcggttctcccacctcagcctccacgcagctgggactacaggcgtgcaccaccacgcccagctaattttttcttcttcttttttttttttttttttttgcgacggagtctggctctgtcgcccaggctggagtgcaatggcgcgatctcggctcactgcaagctccgcctcctgggtcgacgccattctcctgcctcagcctcccgagtagctgggactacaggagcccgccaccacgcccggctaatttttttatgtttttagtaggatggggtttcaccgtgttagccaggatggtctcgatctcctgacctggtgatccacccgcctcggcctcccaaagtgctgggattacaggcgtgagccaccgcgcccggccaatcttttcatttttaaaaaaatttatttattttgtagagacagggtctcactgtgttacctagcctggtctccaactcctggcctcaggcgatcctcctgactcggcctcccaaagtgctgggattacaggcatgaaccaccacacctggcctgtatatcttctttctaacgcaaaagtgacatttctctttcagatgaactcggaacaaaatgtcataagtggtggccacaggtagtgaagagcagggcagggagtgttggcagggacccatgctctggacactttatacttgcaggctttggtcaattgggagcctagggcctgagtgtggatgaggagaggtactgctacatgccagtcgtaagtgggcacaggggttggctggggaacgggccagttcttggaagcaagcttcactgccctcggcctgggcgtcctgtgctcttttggcttctctgggtaggaaggtgtccctcttatctctgcaaaggtcagagtcccactgtctgctttcaagtataaaaccagcacttgggggtatgaccctggactgtatgagggccgccctttcagtaattctctctccaggagtgagaacctccccttctcaattttagactagatgggtctgagtgtgtttagtgcagttaatggttgagcaggaagattagaaataaggacatagagacaaactattctctcggtgttaaactcattttaaacaaagtggaaagtaagggatttagtagggaaatcctttcaccttggcaaaacgatagtatacaactggcacagcatgatccttggtggcttggcacaagcattccctgtccccccccatcaagcacataatgtccctcagtaattccactgcatttttgtgcagcggctgtgtgctggagtgtggggaa

SEQ ID NO: 1887168 - DNA, 4001 bp, Homo sapiens; identical to SEQ ID NO: 1244526

SEQ ID NO: 1887169 - DNA, 4001 bp, Homo sapiens
cagctggcgctccttatcctgccagcattccctgtgcaggaggcacaaggcagggctcaaggctgttctacgctcaggcctctgttgccccaaccagccactctatgggaagcctcctccccaaccctcaccccccagtccttaccccttgccctcaatgaggcaggcatgttggctgtacatgctccagttgaaggcccccggctcctcctgcagccagcgccccagctcctggcggttgacctccaggaaatctgtcatggtgatgtcctcaaagtggctgcaggcactgagcagctggtacacggtggggcctgaaccaatgtcgatgagggtgcgtccggacacttcacctgggcagggcagaggaagagggtcctggtgccagccagcccaggcagcccctgcctccttacccttccctcccctgcatctccctgcctctctctagttcttccttctcctctgcaaatgtgtctccatctggaaaaagcattggccccagagttagactgaacccagctccaacatgggctgcccttcggaagggaacttcaccgctctgagactcaggtttcacatctagaagactatacctactggccgggcgcagtggctcacacctgtaatcccagcactttgggaggccggggtgggtggatcctaaggttgggagttcgagaccagcctgaccaacatggagaagtcccgtctctactaaaaatacaaataaattagccaggcatgggggcgcatgcctgtaatcccagctactagggaagctgaggcaagagaatcgcttgaaccggggaggcggaggttgcagtgagccgagatggcgccattgtactccagcctgggcaacaagagcgaaactccgtctcaaaacaaataaaaaataaaaataagtaaataaatgaaaataaaataaagaaaaagaaagaaaacaactatacctaccagccaggctcagcgaggaaatcctggcagtttctcacccctgtcccacatctgcctccatttcctcctatgcatctccacctcagtctgtcctgcatcccccaccttagctctcaattctgagcactctccgccccctctctccacctctctctcctctgcccctctcctaagggatgttgctcttttttctcttctgtttgcacctctcagctatctcttgtttcttggtccccatctgttaggcgcctggtctgtctccctttccttctttttatttccctgcgcctgctttcactccccgacgacctcttgtccctcgtgcctcagtttcccccgctcaccggtggcgaaggtctgcgccaagcagcgcagcttccacggcccgacgccgttcgggttgcacaggtccccgcgagggggcgcgtagttgttgcggaggtaggcgcgcggctcgaagcgctggtaggccgaagccaccgccgcctggcccggggccgagtcaggggctgcgcccgcattggggctacggtctgcgccgctcatgctgccgccgcggtccgcccagtgccccgctcgcctcgcggcccttttttctaccgcccgacccccgccccgaccggtccgctgtgggggcggcagctgaccgccgagccgcccggggccatgtgcgccgcatcctccccacccattcatccatctcccttagtgtccgggctgcagacacaccggaggtgagtggggcggcggctgcagcggcaatcgtcccccacacccccggctccgtacttgctcccgcagccctcgccctccgcctcgcctgccccgccccgagtcccgcctctgggcgccccccaccctcagttcctcacccccacaatctttagaccccctcacccccgccggccggcccctcccatctctcttctccagccccccgcagccattcacctcttttgcccagcagcccgccccttctctttcctgattcgaggtggagactggggaattaggccctttccccagtttccccctcgcagcgccctccgcgacgaggccccagaccccgccaggctcccctccctcccggacacccgtcccagcacccacccttcccttagaactgccacacaactccccctccccgcccctcctccaggcctctctcgtccgttgctatgccaccgggccctccagcgacaccccctccccaccccgccccagaaaggacagtccgttccggcctccgctgtggtcgctccgggggccccagagcagggcgcggcactgcccgtccgatggcaggcgcgataggggaggtgagctgtgctaatgcacttagcgggcggaacagccgggcctcccctgcgggccccgcgggttcccagccgcttatctgggggctcccgaggacagaaggttcgggttcgggttgttcccgccacttcgggggcggcgccggacccgggtgagggcagagggcttgggcaggggaggggcaggacgcattcgcggagggccgccggggccaccggggagcgcagtccgggccttggggcccagccgatttggggtcctgcggatgtaggggctctgaccccactcctctcgcagcccaccctccagcttccctccgaaggagcggccaggccaggcatgaagattctgctcagcaccccaggttctggctgtcaaaatgccagggtctccccacctatctcccagatgggaagccaattctgcctgtggcatctccgtggtcttcctgaagaccccttccttcccctctggatgagtcccgggcccttctgccctgggtaggtcaccagcccagctcctgccaccgtgggttcctggccccgcttgatgtgggcctcctccatgccattccctcccccttgtccccaggggaaagtctccttgggagaggcagctaggttgggacatgagtcaccacaacagctgcaggggtcacagaggggagcctgaccccctagcacctccaaccttccctggcttccagggcagggggtgtggagcgagacacagctgaggattgattctgtctggattcagaactgagaggcaggttagttttagaggtcactgaccccgttcacaccccgaggcaaagccaaggacagtcctggcaccagcccctccatattctccacgagacatcattgaaacaaaccctggatgcggatgccagctggcttgctggttaccacccagtgccagggggctggacacagaagccaggactgggcagcggtcagggtacgggaaggagactggagacagcaccctgtttacagctctgtcctgcccccacccccaccccaagtatggggtgtacccattagctctgccatatttagctcagatgcggagcctggtcccagaagtgggcattgaggggacacccatgggccagcccccccaaccacaaggaaagagatgcaactctggcacatgattgagcatttattgcggcactaacagagggtgctgggggccccaccatccttgcctctgcccttttcacctccccctccctcccagcttcttctgcctagagcgttccagattcccctcacattttcctggatcagggccactcctcccaggcacctcttgccctcaccagtaccttttgtcccttctcctggggctgagggtcctcagctgtgctggcccccaactctccacccttagtgcccactgtctctgccaccctccctttgggaactcagggggctcaggcatcctggcctctggctcccccctcccctagcccccaactctgggcaaactacaaagcagccatggccagcagctcccctccacagtcctagccaggaagggcccagcccagggcgggcacagcggagcccaagtcacagtccctctcagcctctctgtgcttcctgggacatggagcgggacagggagcgacgaagtgcaccgggcttgctgacaggcaccacagggggcagctgctttgtgatctcagccacctcctggcggtccacacactg

SEQ ID NO: 1887170 - DNA, 4001 bp, Homo sapiens; identical to SEQ ID NO: 1244535

SEQ ID NO: 1887171 - DNA, 4001 bp, Homo sapiens
gtagtttcagctacttcagaggctgaggcaggaggatcgcttgagtccaggaggtcaaggctacggtgagctgtgctcatgccactgcactccagcctgggtgacagagcaacacctgtctccaaaaacaaaaaatcaatctgagccaagcagctgcaccctcttaaagctctttgccttttaggacctggttctacttccaggtcatttgcacacaccagattgagtcaggacttgaggggaaacacaattgtggagtcacttccatggggtctgtgcaaggtgctgagctcaggaaagtggacccctcatcctccaaacccataaccccatcccttcaggccaagcatgtgggggaggcaggagaagccattctaggaaccagacacattctagtttcctcacttctcccctttacacatacgcacacatgcgcgctctgtccccacctattcaggatgactgagaagggccaggaagagacaggtgcactgggactccgggcagtcctccttggggcaggatccaggtctttgccctcccagagctggagtgtggaatccacagattggattcatggcagtggctggaactctcagctaatctagcctcctccctttccacagcagcttgaatacctcctgcgcccaggatttcactacctctccggacagcccattctctccaaatttctggacggcagctcaggcccctggatgcagccatgactgccatagcaccagaattgtgcctccatgctgggctgatgcccctgcccccatgccaaggatgctttagtataccttttggtgctcctgctgcctcagccacaggaacgcactggtgcacttggggcagggttgtcatggggctgggttgggagggtctacaggtgctgaactgggaagattcaagctcaagactgccacttcaccgattgccgaatgaccacagaggagtccctgccttcctctggccacaacttgtccctctgtggagaggatgagctgagtgactgatgacctcatggacgttctggatgatttacaagcacagcctgctttccctgttgcgtccgccctgccctcccctttccatgcatttggctcttcctgctgccccccaccaggggtccacagagacacagagataagctgtgctttgacttgctttattgagcctgtgcaggaacagggagtgagcttcggccagagccaacagtgtggaggggagagctgggctggcactgcccgtggagtggtagggggcgggaggtagtgttacaagtccagcgggctgagctctctgtgaggacagagtggaacatggcagtgtggggggcaggcctcgtgcgtcaggaggcctcaggccagccctgggctcctgttctccctcttccaccccccaccacaccttttcaaaccctgattcagtcccaccatccccatttcacccccagggagctggacagacagggtagggagtcgaactcacctgggggcagcagcatgggaagaccccactctgagaaggccagcgtgtcctctttgtctctttctccatacctggaagcactgtgcccaggtgccagcccaccggtttcatatccgcctgtaggcaccctcttgcccagggcacatgggcccaggcctggtcagcacagatgctctgtttccccaagagtggcctggaaggggctgggactggggctggagatggggcttgggctggggatagggtgtggccaggaatgtggagtgggcccagggtcccaggggctgggatctctctccttgtccatggcacatgcctaggcttggtcagcatgttgatgtatctacggagctcagctgtgtactgggccatctgctccggtgtggtattgtcccctgggtacaatggctccaacggggctccccgggcacccagcagtggctacagcaacagagccacacaggtggacaggagcaggagggagaggcagcggcatgcggcagccatctgaggagctagcagaggggaggtggaggtggaggtggaagagcccatgctgaagattttcctatgccccggaagcagggcccatctacccagccgtttagcccatcatccatttctccaagcctggggacgagagggcagagaaaagggccactccgagctgaccactccacctcctagacagtgtgctggaggcacggacagcctgtcctgtgagcagcccagcagccagggcctcgcaagttagagaagtgtagcagagaaaatggagacatgagtcctggagacacatgtctcatgacatccaggtcctcatggctctgaggcagcagtagctagtgggaaataagggcacaccaggtcacccacagggtgtgggacatggaatgaactggggaagcaaaggacagaaatccatggtcttgtgggtctggccctccacccaacagtagagacagatatgggttctggagaagacatcctgcacagaccggcacagccactcacacagggacacattccagttcacagccatgcacacgagtgtgcacacacacttgcagtcatctgatggctctcctagtgtgacaggtgtgtccagatgcagagcaatacccaagcaggaccttagggctttgaaggcccctggccctgcaaagcacgaactccttccctccatcccagaccccagcctgggggagttctccagatccccaagcaggctgagcccacttacccagagtccagagtaaacggtcactggaccaagcaaggacgtgtccctgccctcagctgggccgctttttcagtcctcagtcccctagagtccccgtctcctgtcagcctctcccactccgcagcccttactccctcctcccactgtctccctggtactcgcaacgccactactgggccagagatgggagggggacgggagtgctgggggtgccagactagcagcatagtcaataaaactggatcacagcaaaagtctcctgtgggcccccattgctgagaccccttccttttgggcaccagagcaggcttggttcaagaaagatggggttatgggacttcagggtgactgaaaggttttggtcacaggccttggagctggccctcccatctcccaaggatcaaaccaaatcaaatggattctctcggggcagaagattgaggctgcagctggagcctccaggatgaagaatggaaactcaggccatcctttgcagtttggaactagaacaaggtgggaacagggaagaggcttcaggtcctcaggcaaggtggaaagaagtggggtgccaggtttggagaaagccgtttggtgggtgcataggatgcagaatgagaactaatgtgcctaggttcaggggaaaggttgagggggtaccagtttctggtagccatcctagagcccccattccagcggagtgctaaaaaccagcatcatttgtaaagcctcaccttttccaaagtgctcccagctcagtcacctcactaaatccccacaacaacccactttacagattcaggttccaaaatctgcacagaaatgtcaagtaactgactccagaccacacagctagtcagtgggagatccggggtttggaacaaaatctaactccaaagtctaactccaaacctggattgtttttttttctaagtgggactgtcaaagtattggtataatttcccaattttttgctgagaaacctgaggctcacagaggtaaagaggcttgttcaagatctcatagctacctaggtctccaattctggcttagattctcaaccccactaacccatccccaccagaagcccccaggtttcccctgcccagtgtctcttcccaaccccaagtctccctcccctgctcaggccaaggagtggtaactgtgtctgaatgacacggtgacacccaagtagggagaaaaggacttctcagtgctgacgttctgctgtcccagatcaggacaccaagaagttggtgggggtact

SEQ ID NO: 1887172 - DNA, 4001 bp, Homo sapiens
cttcctgcttccagagaaaagggcttttttacaagggccaagagagactggaaagagagctggctgggcgcgagccccagtgaatcagaaacacatggcccaagttccccagcacgctgcccgtcctgccctccccaccctgccctagggactaagatctctccaaaccccaaacattttgaaacggccgaagtctcctcctccgcccacttctgctccttgtggactgaatggagatgggctaccgtggaaactggcaccccatgggggttactcccagctgtcaagtggtggggtggtcccctcatccctttacaccctctagcccacccctagtgtccctggcctgagcctgcagagcctccctgctgccagggtccccatgggctcgagggtaggatggagttacagagtagagtcctagaaggccctcgcccaacttctcttatcagggaagcaggggtgggccaggcgccactgtttattgagccgtctctgctccagggtgtgcgcctttgcgtgggtggggggtggggggggggcgcaatgactgcagggggcgctgtgtgtaccgagaatacgagaatacagatgggtggcccgaggagggacgagacaggccggacagaatgcgccacgtttcagaattaatggaaaaagagctcacattggtatcgtgctttgcagtttgtgaaacacttttttacccagtttatgtcacaagacagacattattcacattttagagaaaaagatccggagctcccatgggccagtagacttgcctgagatcacacagcacgttcgtagcaggacggagactagaacttgggtctcacggttgctttcaactgcactgtgccggatctcttggcaggaagtgagcctcgccagccccaggtcctccccctttcccccgagggtccttccctgcctctggtaacgtttgtccttcccttcctatctcgtccacagcccaccggccacactgccctcttcggggccgtaggacccctaactccacccccctccctggcagcacctcgagcagaaggccgagttctgaagaccctccttgacgctccatttctgggtgccaaggaagctggaggaatccctgactcaacttccccgaaggaggcctctgtggcggccagggtccccccctggagctgctgggaggcggcgctggctgcctggatgctgaccccagcgcggcgggcagagcggggcccactcttcttagcttttctactcactgttagagagagacctagctgagcggctggcaggaagcgggacaggtctaggagtcccttagggaataaaccagccccgtttctatcagcccggccagcatgcaggtctccacatcaccatctagagtatcacgcacacatctaccatatatacagatatattctatatacgagctatatataaatatatatatacatatatatatacacacatacatatctagaatgtgtatccgcggcgcccagaagcctcggtttggcccacctgtgagtggggcagggaggggttccggttgtgcagagaacagagtgttctggcaaagaggaaatcccacagcagcgcagaggacctgggcctggaggggcagggctggggcaacccggcttggcggcaaagcccagccccttctcagaccagctccccacattcctgaattccacttccaggcagaaaggagtgggctccccctactccctcagaggaactgactcaccggctgtcctagaatgggcaggggcagagcgaagttctgggtgggatgaccgcactgggggaggggcctcagtccagaaacctcgaccgctagctccacctgccttggccaccagggcagccccgggggatccgggctgctgggcagcaggtcggcgggaccacatgcctgggtctcaccctcagctccgagggccgagggctttccccaccccaccctcctcctggccggcagtcggccctgtctattcatctgcgtcaggcttgccaggggggccccccgtgtgtgccccttggtcacgtgtgtcgtcttcaaggatgttttgctgctgtggctcctgctgtgtcccctcctggcccatcctcatcctcatcttcatcctcatcctcatctgtgcaaccgcccgtcctccttttctagtttctgatgtttgtaaccagacccagctgtgtcattaaacagacccgttcttgctgtacctgtgcacactcgtgcagtctcttcctgccaccttccctcacctctgtcccccatccccggttctggacgcaggcctttttcctgaaagtcctcccctgacctcccacaccaagggcgccccatccactgtcccacaccaagggcgccccatcccctctcccacaccaagggcgccccatcccctgtcccactaccaagggcgccccatcccctgtcccactaccaagggcaccccatcccctctcccacaccaagggcgccccatcccctgtcccactaccaagggcaccccatcccctgtcccactaccaagggcaccccatcccctctcccacaccaagggcgccccatcccctgtcccacaacaagggcgccccatcccctgtcccactaccaagggcaccccatcccctctcccacaccaagggcgccccatcccctctcccacaccaagggcgccccatcccctgtcccacaccaagggcgccccatcccctgtcccacaccaagggcggcccatcccctctcccacaccaagggcgccccatcccctgtcccacaccaagggcgccccatcccctctcccacaccaagggcgccccatcccctgtcccacaccaagggtgccccatcccctgtcccacaccaagggcgccccatcccctgtgtctcacctttggctccccctgggcttctctctaaattggggattaagattgctgtgggttcctcacctggttcatcaggaacgcagggctggaaactggaactggggttttgtgggggttgggggaggtcagccttgttaaaaggtcaggaggcaaggccgggcacggtgcctcacacctgtaatcccagcactttgggaggccgaggtgggcagatcacttgaggtcaggagatcaagaccatcctggccaacatggtgaaaccgcatcgctactaaaaatacaaaaattagccaggcgtggtggcgcgtgcctgtagtcccgctactcaagaggctgaggcaggagaatcgcttgaacccaggaggaggaggttgcagtgagctgagatcgggccactgcactccagcctgggcaacagagcaacactcagtctcaaaaaaaaaaaaaaaaaacaaggccgggtgtggtggctgacacctgtaatcccagcactttgggaggctgaggcgggcagatcacgaagtcaggagatcgagaccatcctggctaacacggtgaaaccccgtctctactaaaaatacaaaaaattagccgggcgtggtggcgggcacctgtagtcccagctactcgggaggctgaggcaggagaatggcgtgaacccgggaggcggagcttgcagtgagccgagatctggccactgcactccagcctgggggacagagcgagactccgtcttaaaaaaaaaaaaaaagtcaggaggtttttaagatttggttctggaaatcgcctcccagcaagggtacaatagagatgaaggaatcagaggcgagatatccagacagaaggcagaagggccctgtttgtcccagtgctttagtgatagatccaaggattgaaccttgaaccttgaccttcttttatttatttatttatttatttttgagacggagttttgctgttgttgctcaggctggagtgcaatggcacaatctcagctcaccgcaacctctgcctcctgggttcaagcgattctcttgcctcagcctcccaagtagctgggattacaagcatgtgccaccacgcccggctaatttttg

SEQ ID NO: 1887173 - DNA, 4001 bp, Homo sapiens
ctatgaagccactagaaattgtttttaaagactagtttagtgacatgatgttaagaagagtggcaaggtacaaatgcctataaatagaccagaatgaaaatatacttaaatgtacctggagaaaaaggccagaaggaagtgcgccaacatgataacgtttatctctcggtgctcatagaatgagtagttttttttttctttatactcttccacattttccaaattttcacaaatgggcttggattacttttataatcagtaatttaaataaaccttttaaaagcacagcttgtctatatttcatagtaaagtctagataatctctgctgactttaaattcagcagtattatatacttaactatgattgagctaaaagatgctgtcattgaatttttaattttgatacgatgtccatttagaaaataagttagaacctcctttggactttttccctcagtgaacagcttatatcaaattagcatgaggttgattctgaattggctcacacttgaagtgaatgtcctttgtaattttcaaagtgatcagtgagggattagaagcttgctgtaaagtggcagtttacctacacttgctcagctgtaaattattaacttttggcccaaaggtagccctggaagtcctgagctattcattcaggagcacggtaggcagaggccaatgaccttaaaaccaaacggccagatttctaagcgcagtcttaaagcattcttctttgtttccacaaagatcaaagatatccttaaatcgatgttagagaaagcgttcaaagaagtgttcagcttcaaagaaaaaaaagtggtaagctttctagccctttccagctcgaagtgccctggggtctgttggtttctgggtaggttgggcgatagggactttgcctggttgccttttttgcgtctgcttcctcatctgtgaaatggggataacaacagtgcctgctcaaacttgttgggtggactgaatgaatccgtccatataaaatgcctggcacataagcactcatcagctgttgttataattaaggtcagtccttgaaaggcttaaagaaacctgggcaggaggctgctgtaagtgacaagccacccacactgtcaggctgcatgcattcccattcgttaggtgcctctttgggaattctggatactgactggcacacagtgggcattctgtaaatggtggttaaatggatgaatgaaccggtaagaccccctccctcactatgggtttctcttactcatctgtaactaattccaaagtctaccatcatgaaagagcctgcactgttgtcacctgcctctactgaggtggctgatagactagctgctgctggtgtctatcacacaggctacaggtcctggacccctgcaggatgggcaaccaccatcctgactggctgagagtggacacccaggaaaagatgggtgtgggccatgcagaaagctgcagcggaatggcattagtgcaactccacgtgtgtgcccgacgtgctggaacagggagagggaagcagaggcagcgtagtgtcagaagcgtacacaggcagaggtggctaggggagtggggagcatccatgtggccggcagctggggactgacaggcacagctggatcctctcccaccgtgtagccacctgcccaaactccactaagccttttcaaggactgaccttaattataacagctgatgaagcttattgtgtgctgggcattttacatagatgagttcagtcaatccacccaatagtctcaagcgggtgctgttgttatccctagtttagagatatcaaagaagttgaacaagccccatcacaggaaaaaggaggtgctgggatttgatccctggcagcctgactctgaagcctgtgtaaccttgtgcttcctcctcctgctggaaacatcctgttcctgtgtgtggactgcacaccccgggtgccagaaacctcactgtggattgtctgtctgagatctaccctgtccatgtgtcacagtattggaaaaggttctggaactctggcctttgtctcaaaaaaagttgggggtgggtgggcggtctcgctctgtcacctaggctggagtgcaatggcgcgatctcggctcactgcaacctccgcctcctgggttcaagtgattctcctgcctcagtctcctgagcagctgggactacaggtgccccctaccacgcccagctaatttttgtatttttggtagagatgggggttttgccatgttggccaggctggtctcaaactcctgagctcaagtgatccatttgcctcggcctcccaaagtgctggaattacaggtgtgagccaccgtgcccagcctggccttttttttttttaatacaataaaaagattaattgaaaattattaaatccatagcatagtttactgcagtttaccgtattgttcaatttaggtataattacagatacaggtgccctaataccacaaaactgtctggctagtgtgaactttggtccctaaagatctggtgaaatccctagccaggtgcagcagaggaatttgtctttgcctggattatcatctttggttcttactgtcctgtgttgcctctgtggcccatccattcctaggctgcaaggatggcttcaggccatttctgcttgtagagacttgcattctctctctggaattgctctaagcttagattttcagttgagcaaacactcatcacatgtacctgcagagagctcctgctgtctcttttctcagttgcataccaccccaggtaaggagggtccctctgcctccagtgtcactgcaaagcgacagctacctgttgcccattgcccaggctcacgtttggtcttttgtttggctgcctctcaggtagtggaaggtgaaacacaggacttttcctgatagagatagttattcctctgttgaaatccaatttaaatatcgttctcttcatggcaaaaaagagtcctagagttgctcaggccattctttggttcacagtccccaggatgcatgcaactgggatttttcttaaactacttacctcttttatttctatggtaactcccatgctaggaatacaaaacacaaatctgcacagcaatgttgcacactctctgttttattttccccaaattagccatgtttgagcgtggacctcttcatgggcagtgaggatcactcagcacacatttctgtaaactttttggtgcgcgtgggttttactgtcttctgttgaagctgtgtcccccatttggaaggacgtgcaggtgtgaaggaaggacagttcttgctgaaaaagatgggaatggcttgcagatgtctgtggattaagcagatctaaaagctatgagaaaactgcctacttgtgtgtgtgcgcgtatgtgtatagtaaatgtatatatgcatatattttatattgacattctgtagatatgtttgaatacagaaacttgtttttactccgactactgaatccagaagtaccaaataatatacagtaaacagtaaaaccaagatttaaggttgtgtcaaaaaggtacagtgattcagtcatatccatttgtcatttgttttagccttttttttttttttgagatggagtcttgctctgtcaccaggctggagtgcagtggcgcgatctcagctcactgcaacctctgcctcccgggctcaagcaattctcctgcctcagcctcctaagtagctgggacttacaggtgcatgtcaccacgcctggctaatttttgtatttttagtagagacggggtttcaccatattggccagggtggcctcgatctcctgacctcaagtgatcttccagccccagcctcctaaagtgcgggattataggcacgagccactgctcccagccggtttcagcgtttttctttgtttgtttgttttttaagagggagtctcactctgttgcccaggctggagtgcagtggcgcgatctcggctcactgcaagctccgccttctgtgttcacgcc

SEQ ID NO: 1887174 - DNA, 4001 bp, Homo sapiens; identical to SEQ ID NO: 1244559

SEQ ID NO: 1887175 - DNA, 4001 bp, Homo sapiens; identical to SEQ ID NO: 1244561

SEQ ID NO: 1887176 - DNA, 4001 bp, Homo sapiens; identical to SEQ ID NO: 1244562

SEQ ID NO: 1887177 - DNA, 4001 bp, Homo sapiens; identical to SEQ ID NO: 1244568

SEQ ID NO: 1887178 - DNA, 4001 bp, Homo sapiens
tatctagtccaggggaggggggtacatgggagggtgtccctatggccttgtcactaggaaagcacaattcctgacttatccactgagtgtggattcagcgagatgagagagggcggttttttagcgatcgggcagcctccacactccccattgctcctctgctcggggaaagggggacggtagaaattacctgcctctcccgcggctcctgtccacgctccctgcccctttttccagaaacccatccacccctgcccccactcaactagagttccttccacagcagcccctggtctgggcgctgtccagccccaggctgggtggtcgaattttccttgggctccgagcagagggaacccccgcgctcgccccagccttgtcctggagcgcctctgtccgagtaggttttctctcctctggcccccacgcctccaccctccacttccacgagacgccacctccacgaaggagaaaggaaagaaaatacaaaggcacacattccgtttctgtgcaattcgctctttattttgggaccagggaaggaccacacacagccctgcagctcagggggcgggggcatccagacgcgggactgcagtacccgaaccctgcccagacgccgctgtccggaggcgaaatccgggtttccagggtcgggagtgaacatgtaaatgaggtgggcgtggtctgcaggtctcccaggaggcctcgggtgtcctcaccacaggtctgcgcctccggcctgcgggatcgaagggaaaggaatccgatccggggaggcaagcctgggagacgtcgtaagtgatggaccagggtggggccagaccgcgctctcggaggcaggatgttatgtgacttgatgggggcgcttttaccgccacctgccgaggcggtcctcgcagtctgggaagaacgttttggagaggcgcgcgaccgggcggcctagtttcccatacctgagggcggggcctggaagggcgcggtcagatctagccacgcccccggtggagcggggccgcagggggagagccccaggggtcccgctccgcccgccccgcgcctgcgctcacgacggctgagtgaccaggatgaggtagtggcgaggataggcgtagcagcggctcagctaccccaggaaggcgtcttcgccgggagcctcgggtttgatggggtaggcgtcgaccagcgcccccaggtagacgagcagggccaaaagcaccgtggccatgagaggccacgacctgcgaaccgacaccacctgggaaggcgacattggggtgtgggtcattccgagcctcgaccctccacggcgggaggctgcggctgccgtcggggccgtgctccggtgctctccctggggctggtagcggaccaaggttcagccaccagcttgccatatgttctccggcactgcaccgtctcctgcctcagtttcctaatctgtcagagggacataagccctgcctgacgtaaccccacccccacccccgctgctgtccagagaggtagattaaagagggttgtgctggcaacgggactcccgggcctccttcccacctccaatggccccctccaatccagtttcccaccactcacccccagcttccaccatcccagcctcagtttccccacaaaacagcctggatttcctagtaccagaccatgcttgagctccagccactcacagcgacagcttgtgaagcagatgagcaggaggtggaaggcgaggaaagtttcaagggcgcactgggacaggtcaagctgaggcctcctctgctcagggctttcctttcggggcttatatccccgcctggaaaggaaagggagtcccacggggagggggagccagcagggggtgcgcccttcttcctccttccacccgcaccagatccttgagcttacgctcagccactgtgtgacgtctccacctcataggagctcagggggcagctgccatgctcagatttggggtcccactggatggggtacctagcctgaaccctgtgttcagcccacagccccgcaggggcaggtccagcctcctgaggaagtgaagtggttggattagactcctggggcagcccctaggaccaggaatgagattctgtcttccctagccagtccatggtgggagtggggggtgggagggtagacacatttcttccagcctgtgggatctgtgaccactctttccaaaacacaactcttttcagcctctgctcagtaataccttggagaagggctgaggagtgacaggacctctgggggaaagtctttctcctggaggcaggggtgggagcacctgaccttgggctcctggcctgcagtttatgatatcctgggggagaggcctctctgaacactccgttatgttctctctccattaaagagttgggaaaagaggcaggaggaggcagaagccagtcccccaaccagaagcagctgagtcagctacctgtgtatccagcctggcacacaaagaccctggtccagccatgtgtggcatagagccctctccccaggcaatgtccccacccctatgcaggtgtcaatcagggcactggtgtcttctgggcctgagtgatgccaagccttcccaagcacatgccactgtccccagcccatggcagtctccactgggctctgaagcccagatcctttgaaggaaaggactcatgtttattaagcacctactgtgcaccgggtagtacataatttcggacatcacaaaacaatgagctgagtttatctccattttccagatgaggaaattgaagccctgatgaagcagccaaagtcacccatgattcaaacaggaaaaggagggtgaggcagaccccaggaagaggacctctcaattgtgaggggcagaaagcctcagcacctggagtagccatgtggtgccggaggcaggcctgggagcagggaccggaagcctaagtctggggcccaccacccactatgagaggctgagtaggggaagggcctccagaatgccaaccccctcaaacccacctgcccagtaggagagagggctgtgggaaggtctctccataaagcccttccagcttcctctccctggcctggccagacctccagtacttccagatgtcccatcaacccatgggggctgaaggggccaacttgtccaggccgctggttctgagccagcccctccagccccaggacagatggctgtgggtgctatttttagagctctcctgagagggagagttcagggctctctcagtcactcttttttttttttttttttaaatttatttttttattgataattcttgggtgtttctcacagagggggatttggcagggtcatgggacaatagtggagggaaggtcagcagataaacaagtgaacaaaggtctctggttttcctaggcagaggaccctgcggccttccgcagtgtttgtgtccctgattacttgagattagggagtggtgatgactcttaacgagcatgctgccttcaagcatctgtttaacaaagcacatcttgcaccacccttaatccttttaaccctgagtggacacagcacatgtttcagagagcacagggttgggggtaaggtcacagatcaacaggatcccaaggcagaggaatttttcttagtgcagaacaaaatgaaaagtctcccatgtctacttctttctacacagacagggcaaccatccgatttctcaatcttttccccacctttcccgcctttccattccacaaagccgccattgtcatcctggcccgttctcaatgagctgttgggcacacctcccagacggggtggtggccgggcagaggggctcctcacttcccagtaggggcggccgggcagaggcgcccctcacctcccggatggggcggctggccgggcaggggggctgacccccccacctccctcccggacggggcggctggccgggcggggggctgacgcccccacctccctcccggatggggcggctggccgggcagaggggctc

SEQ ID NO: 1887179 - DNA, 4001 bp, Homo sapiens; identical to SEQ ID NO: 1244589

SEQ ID NO: 1887180 - DNA, 4001 bp, Homo sapiens; identical to SEQ ID NO: 1244590

SEQ ID NO: 1887181 - DNA, 4001 bp, Homo sapiens
cccggtcacctgtcttgatcctgtggctcctgagaagctggatcatctcctcggtaaggccagggcacagtccgaccctgagcacgcccatgttccccgcaggccggaacagccccagggggactgcacgtcacgtgggcattcgcggggggtcctctccagacgcccctcccctaccccttcctagagaggacacaggcgcgctggctgccggaggagaaaggagagaggaggaggcggcaccaagggtagggctgggggtcatccgcccgcccgggatccgccgggattcccgcgcccagagcccgcccgccgggtcgcgccgcgctgccgcttccgggttccaggctggcgcgcggcgaggacctggcctgcagcgccatctgcgggccgcacggggcagagccgctgcgcccctctccaccgcctgcacaggttcccgagtcccacgaccccctccgcgctcaacacgccacccgcggccacattcggcctctaccttctgccgcaacacacacaccgaccttctaaagagccttctgtgcgccagcttccgttccaaacggaacggatctccgctggagacaaaatgcgacacaagacgacccgcccttacccccagggagcttactgtgagcaagggaaagacagacaatgaaaaggaatcgcagaaatcacatcattacagattatacgacaggtgtcaagaagcagcaaagcatccagagggcacctgcgtctatttttcaaaagtttgttttgttttggttgagacagggtctcgatcggccgcccaggctggagtgccctggtgagatctcagctttgcagcctcgacctcctgggttcaagcgatcctcctgcctcagcctcctgagtagctgggactacagtcacgtgccaccttgcccagctaatttttgtattttttgtagaggtttcgcctctacaaaatggggttacaccatgttgcccacacaggtctcgaactactgggctcaaacaatcctcctgccttggtctcccgaagtgcggggattacaggtgtgagccaccgtgcccggcctctattttttattttattttttattttttttaagggcaagaaaccttggttatatagaacacacacaaaaagatatgatttggtatttttaaatgtcctttgctttgcctcatccataggaagaaataaaactttacatggttatctcatcacaaatctgtgagggaggcgctattttttatccctgtttcaccaatgaagaaactgaggttcagtgaggttaaatcacttgccaaaggtcacccagctaggcggcacagggctggacttcacatccacatctgactctgcaaagccagtgctttctaacagcccccctccccacccctgaagctgtgtacatgttttcctactgtaaggtggtttctctgagagcagagatcatgtgtggcccatctctgtatcccactgcaactgccaccattgtcactccacacaggaaagtacttgggagtgtgggtgtggcacatttagaattctagcagtgaagtctgatcatatgtgagccatgaacccctatgaaccatgtgggctttccctttcactaaccgactgggcacagtggagtctgcagcctatggtttcaggatagagagccttagcttctacggacaaagtttccctccccagcagacactttccaatactgcctatctctcagggccacaccaccatcctctacatcccacgcccatctctcaccatccttattctccttcccagggcagtgcggaaggacacaggtgtcaggcattttgagatcttcagagaagggcagggctgccatcaccatggagtattagagctggaaggggcccaagggctcatgcagtctgttccttggttttacccctctcatgatgctgcttcacagtcacactggcccttggtctggccagccacatagctagcctggcagcagtagcctcaaatcaaggggggaggctggcctgtaattgttacactctgtgatgattatgaagtcagctcattgcacctgcagactgtccaaactaaaggtgggccactgcccccacagtttctctctgcttctggtcagctgggttgtcctgcatggtgacgggtgtcatcccgaacaaatcagatggcatcagaggcactccatcaagtgggagatggggaggaggctgtactgaagaaagaaaacttcaacatgatgaatgcccttgaccaactgccaaaacccttttcaaaccccaagtctatgaaccggaccgtcactaccaaaggactcccactagcctcaaagggcaatttggtcaacttcttggaggatgataccatcaacctactgtaagtcacaaatctggtccctccctccctccctccctccctcccttccttcctcccttccttcctcccttccttccttccttcctttttttttttttttttgacaggatcttgctttgtcacccaggctggagtgcagtggtgcaatctcggctcactgcagccttgaattcttgagctcaagtgatcttcccacctccacctcccaagtagctgggactattgacgcgccaccaccacacctggctaattttcatatatatatatatatatatatatatatatatatatatatatatatatataaatttttttttttggtagaaacggggtttcaccgtgttgcccaggctggtcttgaacttccgggctcaagcgatcctcccgcctcagcctcccacagtgttgggattataggcttgagccaccatgcctatagtttctaagaaaggctggagccgagggctgggcagagagacaaagaatctatacttccctgacttgtcacaacccagttccttgactcccagagaagagcgtgtgggcaggttggatctatttatgtattcctgagccccaaatcacttcttggaggcatatggagctcccactccaggaggccttcttggattagtcagtttgttgacagtgctccttatcctgccttgactggctgtggtcctcaccatcaccaaatccctgacacacccatggctcctcttcctcaaccctctctctttggtaccttcatctacctgactgctccccagtagcctgccttccttcggactgggttttgctgttcctcctcaccaagtctggttttcctctacttcattccacaaaactctttgagcacctgcaaggtgtctgtcccagtgtttaagttctgggaacgcagagctggaaagcacagtccctgcctttaaggagctcccagtctggcatgtggaggtcaggggtgaaaggatggggatcatgcaataaccagaatgatatagcatggtctggtaagtgccaggacaggatgccttgagggaccagaggggcttagtatagcttgagactgggtgcagttgaaggaggcttcttggaggaagtgatatttgagctgagtctccaaggaaggaaaggagttagccagtgaaggggtggtggtacagggtgatgtgggctgagggaattacttgcaggtcacccaccacatgggtgaatgacctgtgcagtcacaaatagccctgcacttacaaggggcctgtgcttagtttaatgcttttctgttactatcttcaaattcagaatttttgaataaggggctcagggtacttcaatttgcactgggctccacagactacatagctggtcttgagtatgtgagagggatgtggtgtccattccccaaagtgcccgtaagcaagcaggtatggctaaagtgatggatgctcgtaggaaacttcatggtatactgggaatcttggactagaagcccaaactcagatccaagttctgccacttagagatttatggtcttagacaacttaattaagatcggaggccagatggggtagcccacgcctgtaatcccagcactttgagaggctgaggcggatgcatcacttga

SEQ ID NO: 1887182 - DNA, 4001 bp, Homo sapiens
ttttttttttttgagatagggcacaatcacagctctctgcagcctcaacctctggggctcaagtgatcctcctgcctcagcctcccgagtagctgggactacaggtgcacaccactatgccaggctaattttttaaaaatttttttatagttttttttttgtagagacagggtttcactatgttgcccaggctctattttaaatctaacatttgcttttgtcccctttaatcttgaccccaaccccagtcctaacccatagtgggctcatgtgcttctggccccaacccagtgaaaatggcttgttttgctttctgcacctccttgctccttcctcccatcttatcactcagaaatctcccatgcttccttcttgaaaggagcaatcctaggcaggcaggaaggactagatttggtcccagcctgaaatgtctcagagactgcatggctcttttctgcatcattgtagaaatgatccttaccaggaggactttggagttcacgtcaagcaggccattgactctctcccactggattctttgcaaaagcagcctcttgaccatagaggaggacaacaggttatccgtgcccatgatccaagagcttgagatcctgagatgaagacttcaggagagatcaggacagataatttgtggtgggcaggaatcagtaaactgggacaacagcagcagctgagtccaagggtcagtgtctgggagtaatttaggaaagtttggtgctgacagctgtgtctgggacttgaacgtcatggccaaaccagctcctgggctcctcagctgcttcagactaatgaacctctggcccaggacacaagaagcagctgtggtgtggctgaagtcaggacccccggaggcccagactcagccttgctgcttccttaacagtgtgaccttagataagtcacttaggaaaagaggaaaggaaactagcatttagcgagtgcagtgccctttcacagctgccatcatacagtgaggaggggaatgtccctatttcacatgagaagtcctgaaggtaaacgtgtcattcaaggctctatagctggggagtaagaagacagaattagaacccagagcttctgaattcaaatcccgggctgttggccctgagctttagcttctcggtctgtaaaatggtgttacactcacctggcacatgaagtcgcacactgaaggttctaaaacccctccattctttctcccaaccgtggtcctgaagagctgtggcaccttcttcctgggaacgtagtcatcgtattttgccctccccacaacaggtttgtggggtctaggccccaggaggtgtctgaagggaaggtatttggactttgctttcccctctaccccactccccagaccttctcccgactccagagggctggctcccgcttctcctccctggttttggctggcggactgacatcagctggtattcctagggataggataaggaaccctgagctgcatggctcagctccaggcgccccttcccccacaacccaggacagccccttagaagcagcggcgtcgagaggccgctggagctcccagccccctccctcttctccacgtctgggagagcagcttgccgacccctccagacccgaaagagagagggggcgactcgaattcggggagcgatcctgggagaccctggagagtcctgggcgccacgcagccgagcccccgaaatagatcccggttccggggttccgggagctgtccagcctcgcggggtgagctacgagagggtgggccaacgccggcgaggcggagggagccgcgggcgccaggcgcgggtgaggcagcgactccccctccagccgcgggccccgagcgtcgcccccgccccccacgtggccgccgccgtcccagcccctccgaggaagcggcgcggcttcctgcagcttgggctggggatataggcgcccccacacccgggcccggctcagcgccgccgccgctcctcgcctccttgctgcacgatggcctcgctccgggtggagcgcgccggcggcccgcgtctccctaggacccgagtcgggcggccggcagcgctccgcctcctcctcctgctgggcggtgagcgcggcgccccgaggcccgggcgggaggcgcgagaggccccggaggggagaggggagaggggagaggggctggatggccgaggccggaacgggccctggggtgcgggttaggaccgacgtacctagcagcactggccctcggacggtccctgaccccacctcggggcgggcgcagcatgagctgcttcccacccagggaaagctggggtgctggccccggcccctcgaagagggcttaggaggacggaagctggccagagatgagggggctttgggcctgggtgtgagtgacaaggagctggtgccagcccctccctccccggcactgaggcgtccgtgggggctagattattcctccttttcttccaaggtagcctattttcggagggtctcagtcccccaacccccctcgcaggctccactgccggggtccccgctatgttaccctcctctcccgtttcttcccacagctgtcctgaatccccacgaggccctggctcagcctcttcccaccacaggcacaccagggtcagaaggtgggtacccagggtgtggaagggtggccgagggtaaggacgagagcaagttcagtggggagggttcctttcccacgaggcctgcccaaccccagctgatgccccactacactcccctctgttctttcttggggttcctcgtggtctttctccctgtcctcctacaaagcccctgcacggctctgagctgcccacctcacaagtgggcgagaagaccccaggaaaaggtgtacgtggaagttcttatcaggctgggatggaaagtgcttagcacatggaagtcattataggattcctgagctgggactctgtcctcagccagaatgttttgctagggaaactttctgaagggttcccacgtttgaagacaggcagttcaccttgcaagcacctgggcaggagggtttgtagggaggggtaggggtgtggtcattgtgtagcatctgtacctacaggggggacggtgaagaactatgagacagctgtccaattttgctggaatcattataaggatcaaatggatcctatcgaaaaggattggtgcgactgggccatgattagcaggtaggggcagtgatggagggtggctcaggccagggggtggacctgctcattgcaggtagaccctgagtgagagtggggcactcttctccctgggtccaccccctctctcactcaagtcctcttctgcccctaggccttatagcaccctgcgagattgcctggagcactttgcagagttgtttgacctgggcttccccaatcccttggcagagaggatcatctttgagactcaccagatccactttgccaactgctccctggtgcagcccaccttctctgaccccccagaggatgtactcctggccatgatcatagcccccatctgcctcatccccttcctcatcactcttgtagtatggaggagtaaagacagtgaggcccaggcctagggggccacgagcttctcaacaaccatgttactccacttccccacccccaccaggcctccctcctcccctcctactcccttttctcactctcatccccaccacagatccctggattgctgggaatggaagccaggtggggtcatggcacaagttctgtaatcttcaaaataaaactttttttttgtacaatgtccttctccccatttcagtggaacctgtgtccttccctgccactgccacaggccctcagccctgggtagtagaactggaaaaatctggatggcccattgttctgttcatttcacctgcccccctgctccctgcctccatgaaggtcacacccctatattctttcctcccaggcgggcctttcctgcctatatccaaactcggctccaggaaacaa

SEQ ID NO: 1887183 - DNA, 4001 bp, Homo sapiens
cttccagtgaaacgtgcatcccgagggcttctaggatgaagtagtccactggaaggcaccagctcttccttttatctctccagagctggacagtgcaccaggggccggtactggttccccagctaggagacaccttgggcggggctttgctcgccggaagcacgcagagcgtggggaggagggccccctctgcctgtgtttgtgccaacagcacccgcgctgccgcgtcgggttccggcggccggagtcacacatgatgtcacagacaatgacacaagccggtgtctcattccgacacagcgtccgagctgcacaatgtcacacccgggtgccaaacacttggccccgcgcgacccggccctacgcctcctgccgccgctctccgcgtctccgggggaggtggcccggttcggccgggcagggggctggcgggcgagccccgcgggcgggctggcgagcgggtgatgtcacgggcagcggtgggtgggtcactcggaggtgaggcgccgccaggcgagttcagcgagagttcagccgcattgcattaggcaaatgaggcccggcctgggtgggggtgtgtgttaaggggaggacaccgggaccacccccctcttccccgccccaccacctcctccaccacggcttcgctcggccagggactgaccaaaccttgggggagcctgggagccggaactggtacaagggaggacgcccgcccctcttccgtccttgtcccctcgcagccccctcctctccctgtactcggcgtccctctgtactctgtgtactcctcatctggagcctttcccccttcctgcttctctcctctcctcccccttcccaggctgcccccacttgcctgtccacatgccgcctctccctctcggttccctgcgtttctcccgctgcagccggacgcgccgggaatgggttaagccaggggcggtgcctggacggggcggggcggtggaaagggggtggtgcccggaggggagggggcgcgcagagctggggtgggggggccgtggcgcgtaccaccagagaccgagcgagtcgccagctgcccctggcctggcgggggcggaaccgcgcgggatccccacccccacccggaatcctcgccacggagaatccctggagaagccccggatccccggctgggaggaggaagtgctcgttgacccccagccccgcgctgatcccgcccccggcctgcggacttggggagccgctgtactctgcctcggacgccacgagactctagacgggagtcccctcgaggtgaagccgctgagttcccgggccccgccaggcttccctgggagagccgacggaccccccctcccagcacacacaacttccctgcttttcaccgggactggcggagcggccggcggacttagacgcggggacttcagggcagggggcgccccctgcccgggtcaccagtcggggcgaggggacgtctcctctcccccagctgctctgctcggatggcgccgccggctgagtgacgggggcggcgcgcaggacttcccagctcggacctcttgccttcgaggggaaagatgtacgagagtgtagaagtggggggtcccacccctaatcccttcctagtggtggatttttataaccagaaccgggcctgtttgctcccagagaaggggctccccgccccgggtccgtactccaccccgctccggactccgctttggaatggctcaaaccactgtacgtaccggcctctcagtctgctgttgtagggggtgggagtgggcggtagggcttccactactactcgggggtgagagtcccggggtgtagtggaggtcctgtctctacctttcacttaacccgtgttgcccttgctggacaattgaaccctcccggccgcaccctccccccagtaaccctaagtgcaatttgtgttagattagggctgaggaactttgagagttccttctttcaagcaacattccttcatctcttgtttcacttcttccaggagaaatgaagcccaagccccttgcccccagtttatatcttcttgcctggaatccaacagcttcacagcaggctggagggtggggtaaaggtcctgtctgtgtgggtttgtctgctcccgggggaaggcccccccgccagatcccacttgccaaagcccgagggagagccccttcctgtgcgacagctgctgcccccagcccttgctcttgcgtcattagagtgggtgtcaggggagcactcagtgtctttggtattgacagtggggtgtggcagaaaggggcaacttcatcagacacccgtctgccatcctaaccttccatcttggcaaggggcactgggtccttatggggttgttgtcctggccccagacacttggctgtcatctttgaggctttcatccccaggagtggaggggagaagctgctctggtgagaagaatccctctccccctaatcctaatccggtttgttctctggggaatgagtttgtttttgtgggtctggggctgctctggaaatgaggactgcatcccttcccagctccgccaccgagtccttttgttaccctgacttcacttggggatagggccaggtcctgggctgtgccttcctaagaggggcactgatgagaatcctagcatcctggcagcctggtcactttctctccttgttgccccctgcctgggtgcaggctcctctgggaggaagggctctgtgcacactcaggagctcggagcaccagggtgtacacctgggcattttcctgcgcagctgtgaggcagtgtacactgggtgggcgggagcaggcgcaagggggttattgttagatggctcaggtttcttcccctcctgggctttgggctctttgctggaggggaagctcttccgtggaggatctcccaccttcctggacctgctgcctccctcctgcctgccagggaggaggggtggagtgggtctcgggggggccctggcagattggagaaggttgaagggcaaaggacttaccccacccctcttgctgggagaagagagacctgagatggacagacagcccacctctgccctcccagagccacttctatcccagcttttcctattgtcctgcccccgaccatttcctctagggccgaatctgctgtgtggctgtagacacaagagggaaggtatcacccttgactttggaagaagagagagtgagaggatgactctaggaccctttttctcattctcccagtgctggagcaagacccccctcccctagggggatagttggagcagggctgccagagtcaccccttccactgccttggccaccttctccagagggctggagagaagctgggatctgagaccttggtctccagcccctgtctcttcttagcccatggggacagctcagctcttcctggcccagaactggagagggaggaggatcacagagagtaggacaggcagtgtattggtgagcccttcccctaaaccactggacatggggaagtggagacctgtccccacatccattctggggtggggtagtagacctagaggcctgggtttccagttcccgtagtctgagcgtgggtgtgcatatataagtgagtgaggtgtcagtggactcgggtcctgaggctgtgaggttgggagtgatgggggtctgggggcttgccttgaggcacaggaaggacccggagtctgagggtggcaactagactcagtctagaatatgtggggccaatgccaccaccttggaagggtccccttgggtgtgtggaagtccgctggtgactggagctgcctccagccccctcttggggaattctccactctcccctttactgccactgaaggtgggaagagcaggttggctctgggaggaggtggcctgggttctgcagggccctagggacattgcctccctccccagagccctcatttcggtgcattagaggacaaggggggtgcacaggatgtggctccccatctgtctcccac

SEQ ID NO: 1887184 - DNA, 4001 bp, Homo sapiens; identical to SEQ ID NO: 1244604

SEQ ID NO: 1887185 - DNA, 4001 bp, Homo sapiens; identical to SEQ ID NO: 1244603

SEQ ID NO: 1887186 - DNA, 4001 bp, Homo sapiens
gacagagtgagactctgtctccaaaaaaaaaaaaggtgttcctattagatggtaccaagcagagttatgtcaactggcttggtcatgagagaaggtttgaaagaaattgatttttaaggtttctgagaagagctttctttttttgtgcatgttattttggaggctggttaaactggtcgatttaaatatttacaacccttgatcccaatgtaaacaagaaatcacaactgtctacctgatcaatatgaaagtttttaacaggctggtctttgtaattagacgggcattaaaatgagtgcgtcctagattacatgaacattttcttcaatcacaatcaagatattagccctgccacatcaatctgcaattgttatgaaaatatacccaaatattttcaaacttaagaatacctctaaataaactgtaacttctgaattgtactctaaaattcagaattaggaaatatacaataaaagttcggaaacctttgccatcatctacttccttgaatgtgaaagagaatgtaatcagagaaaaggataaagaagttgtcaaacctgaaatcccctgaacagaaaggagctgccacggctaggctgcagccctagaactctgtacacaaattcagcccagtaccttgtcccctgcctactcccattcctagaagaatggtataataaacgggcagcccggcccacatttcagtaaattgaactgtcacggggagaataaggcaccccaaacagttgcagcgacagtggttaacaggaagtctctctgtcctccaaaccaataatcaaagggatacataaggaactcactgctttcttagaaggccacatgcaccccgggatgtttgctcatcacgtcactctggcctttaaccagggagcaaagagacagttgtgggtaaaaccctatttccaagctaacaattatccttccttatggtagactggggggtgcacggtacactcttgattacacaagcagtcttcttcccccctagaacaaatgacagaccaacaaaaaggagaaaatgatatgctgttgtttatctcttctgccagcctgaactcaagctctgagcagacgtgccagcggaggctctggctcccctggttcgccagacttccccatgtctggtcaactgtctcctgggcagccggctgaagagaggccccatttccctctcggtcttgaccgctgccgcacagtggcgacctcacacacatcgcgaacagaggacaactcccaagcgagggaacagtggaccctgcggggagaaccgcattcccaaacttctccatcaaacctccaaactccaaacctccctcctccagccgcctcctctaagacggagatagggacgggctggttcctttaaaggggtaagcaggccgccgcggacctgcctcagtttcttctgacgtacaaagaggtatcttttccccacaagccaactagacctgccggtctgcagggcgcttggggataatcgaggacgcacgtctcctgttactgcccccacaggtgaaacgctttctttgaggggacttttcaaaggacaggtgtgggctgccctgaaggcggggacttccagccagccaagggcttccccccacccctgtagggcagggagagtcccaggccgcgccccacacagaggaagggcccccagaccacagcctgacggcacccgaccgtcccccttcccgtccttccccaggccgggcgcccagcggcccccagcgccgccgccgccgcctcctcacctgctgcggccgccctcccggccggcacctaggagaggaggcgaggggaggggccggatcccggccgcggacgcctcaggcagggaggctgcggactccgccgcggcggcgtctctggggctgaggggcacccgggggcggtcgcgacatcctcacgggcggccccaggaagtcggccccccctcccacccatccccagccggcccggcccggcccggccgctcccgccctccgcgcggccccgcccctgactcggccccgccccctctcgggatcgcgcctccgctcccgccgcgcccgagccaccatagagaagagcgaggcgcccggcggcctcgagcgcggcctccgctcgcgccccctggcggagctgaggctcccgacggcggggccgggctggcctgagccgtggggccgtaggaggcgtcgtttccccaaagtcgtggggtcggccgctgctggttaccttggtcacacaactctgcgggaggcgcccaagggtccaggtccaagtttcagctgggtcaagacccggcttggtgaccttgagcgagtccctcaacacctctgaacgcatgtcataaaactttgaaaggtgcctgactttcatgtctcattgactctctcctcggtgcgatgagcaggcgatggtttcccccgcttcatgattgcagaaacccagccccactaggggttacgagcttattcagcgtcccacaactgggaggtattagaagccgggtctgtgggacctaaaaacccatgcttgtcccactcactctagcactgcccagtctaaaccgctaggactagctacttcccctcaggaaagtcaggaagctgctgaggaaggctgtggtagaatgagaatgactcagcgaggatccatccctgcctttcacccatgcacctttcagcaaggtacctaacctttacgaactctggttttctcatcccagaaacgcaggttggcgtgaggatttagtgagcgcatgcatgtagctgtggttagtaaaccgccaagcagcagggcggcccaggggatggttagccagcgtgggctacgatgcctagtcatgaacataatattaagttctaatccttcttttaaatggtgtctagtgacacaattttcttaggctttaggttctattgagaactcctagtttttctgaacaatttgtattttcaaacaaggaatatcgtaaggaaaataagatcatgagccaggcgtggtggctcatgcctgtaatcccagcactttgggaggctgaggtgggtggatcacctgacgtcaggagttcgagaccagcctggccaacatggtgaaaccccatgtctactaaaaatacaaaaaattagccaggaatggtggcgggtgccggtaatcccagctactcggaagacagaggttgcagtgagccaaggtcgcgccattgcactccagcctgggcaacaagggcgagacgacgcctcagaaataataacaataagatcacgtatacatatcagactctgtcactttacaagtattattttcaatcctcacaacccagcaaactgagtactattattcccatgttatcaatgaggatctacatattaagtaatttacccaaaactacatggttagaaaaaggtggagctggaatgtattgcttttttttctttcaaccagcagtgtcttgaatacacggagctgcaatttatttatttttttgagacagagtctcactgtcacccaggctggaatgcagtggcgtgatctccgctcactgcaacctccgcctcccaggttcaaaggatcttcccaccctatagctgggtctacagtcacccgctaccacgcttggctaatttgtttatttgtttgcctgtttttggtagagacagagtttcaccatgttggccaggctggtctcaaactcctaacctcaagcgatctgccgcctcggcctcccaaagtgctgggattaccaggacgagccactgcgccccaaaaagctggaatttaaaactgattttttcaatcacctggaatgcacggaaagactgacctgctaaaggcctcccacatccgaattaaatgtacccttcattttccttcctggctatttttgtaactttccctgatgcaattctgtctggtttgcttctctctaagtcttcatttccagccctaccctccaaaggcatttatggtctcctcctttccctctaattcct

SEQ ID NO: 1887187 - DNA, 4001 bp, Homo sapiens; identical to SEQ ID NO: 1244612

SEQ ID NO: 1887188 - DNA, 4001 bp, Homo sapiens; identical to SEQ ID NO: 1244614

SEQ ID NO: 1887189 - DNA, 4001 bp, Homo sapiens; identical to SEQ ID NO: 1244614

SEQ ID NO: 1887190 - DNA, 4001 bp, Homo sapiens
atttcataaatacagtaaatccagtagttcccccttacccatgggggacatgttcctaaacccccagtggatgcctaaaatcacagatagtacaaaaccttttttttttttaatctttgtaggtagtgtattttaaatagctttcaagacacacatattttttcctttaaaaaagtctgttggtggccgggcgcggtggctcacgcctgtaatcccagcactttgggaggccaaggcgggcggatcacgaggtcaggagtttgagaccagcctgggcaacatggtgaaaccccatctctactaaaaacacaaaaaattagccaggcgtggtggcacacgcctgtaatcccagctactcaggaggctgaggcagaagaatcgcttgaacccgggaagcggaagttgcagtgagccgccgagattgtgccactgtactccagcctgggcgacagagctagacttcctcaaaaaaaaaaaaaaaaaaaaaaaaaaaaaaagtccgttggagcagttttgttcctgaattttgctggtcattctcatggtcccgagcccccaaactccaggtcctggaggcagccgaggggaaggctgggagcccacgcggcctattctgacggcgctcgcagcactggtggagcagcggtgccccgtcttgccacagatcatgcatggccgccatgtgagctaaaacttccatttatttcaaagcagtaataatttaaaattctaaaaatctttccaccgctgaacgtttagagggtgaggttagacaaaagacggggaggctgaaggcgccccagaggggaccatgtggcccacgccttcccgagccagggagccggtgggccggtccaggatcctgccctggaacaggcggggcctgtagcgctgaccagccaagactggcgcctctggggcacccagtctgtgggtgccgtgcggccctggctgagggtggttgggaaagtccccgcggtttccccgcagcctcaggcgcagcgggcagtggtgggtgccggcccacgcgggctcaggagttacttgtggcgttctctttactgggcgagctggaggagggggaggacgacgaggaggagcagttcatcccagtcgggcccggggcgggggtgttcgtggccgtgttgtgtcccgggaggctttttcggcagacggggcagctgtcgtgctgctccagccggtgcactatgcagccatcgtggaacaggtggttgcggggcagctgctcgcccagcgcgtagtcgtccttgcacacggggcactcgagcccggagcctacgtgctcctcggtgacggggacggtggggaggtactggattttctcttcatctgccggtggggggcccgtgttttcaaactgattgaggagctgtgcgaaggcgtccaggccgttggccactcaggcgtaatccatagggtttgagtgcaggactccccaaggacccaggctggggatggtggcgggcgtgatgatgccgttgacgagctgctggatgatcccttctagcgtggggaggccttcgtgccggccggtggcccgccgcgtggggaggcggaggcggggctgccgggcgcagtacggggccgggactgatgctctgtctcccacggtctctcagggtccttgctgccgtcagcctgcgccccaggagagaacgtggggatctcgaagctgtcgtcaaagatgccgaaagcaaactgtccgtagccctgcggcagcgtgaacaggtgctggtccgcgttctccaacggcggccggctctggtccgtgggggcagtggaaggggcagagctgttttctgtgctcctggtctcttcaggaagctcctcgataaaatcagacgcacatcttgggcagatataatccgataggcgcgggacggtgtccagggagcagcagtggcagaagaaccgtcctagctgctgcgacgcctcggccctggccaccgccccctactctgcgccgcccgccccccgcgaggcgccaaccgccggccatttgctgctccctcgctgatcgacgcccaaaccttttatatactatgtttttcctacctacatatctatgatcgagtttaatttacaaaataggcgcttactaaggaagcgattaacaacaataacgaataataaacacaacaattgagtcaaataagggttacttgaacacaagcactgcaataccatggattggtctgataactaacagctactaagagactaatgggcaagtagcatctacagttcagatacactgaacagccggaggattcacaggccgggaggggtgaagcaagacggtgtgagatttcatcacgccactcagaatggcaagcaactgaaaacatgaattatttctggaattttcagtttaatatttttggactacagttgaccgcaggtaactgaaaccgtggataagggggtactactgaatgtgtattttgaattttctagctaagaatatcgcctttttttttttttttttgagatggagtcttacgctgtcgcccaggctggagtgcaatgccacgatcttggctcactgcaacctctgcctcccgggttcaagtgattctcctgcctcagcctccggagtagctgggattacaggcacccaccaccacacccagctaatttttgtatttttagtagagacggggtttcactatgttagccaggctgttctccaactcctgacctcaggtgatccgtccgccttggcctcccaaagtgctgggattataggcataaaccaccgcccccggccagaatatcacttttttacaacttttttttttttttaattttgagacagaggttcttttcgtcgcccaggttggactgcagtggcgccatcacaggtcactgcaacctctgcctcctaggctcaagcaatcatcctgcctcagcatccctaatagctgggacgacaggtgcccgcaaccatgcctgactaattttgtgttttttgtagagaagtgtttcaccatgctgcctaggcttgtcttgaactcctgggctcaagtgattcacttgcctcagcctttcaaagtgccaggattacaggcatgagccacatggccaagaatatcacttttacctttaacagatatttttctttttctttttctttttttttttttttggagacagggtctcactctgttgcctgggctggagtgcagtggcatgaacaaggctcactgcagcctcaatctcttcggctcaagtgattctcccaccttagcctcccaagtagctgggaccacaggcatacaccaccctacgtggctaccttttaaaattttgtgcagagaccaggtctcactatgctgcccaggctagtctcgaactcctgactcaaatgatcctcccacctcagcctcccaaaatgctgagattacaggcatgagccatcacacctggccaacagttatttttctttactgcaagaaccttacattgtcatagtagaaaagattagactccatagattaaataaaaacataaaatcatgttaccccacatttagagatagccactaatagccttcagatatattcctccagggcctttttaatgaatctcgatgcagggatatatatgctcccaagtccttcaactttctgtggtcgcctgttctttgacagccaaacaaaatgtcttggtcccatgccacgtgctgagggacatcaagccttcttctggtaattttccaatccctggttcagctgaatccccacatccgtttcctaaagttgctgtctgctctcttctctgctttgtccctgcaccctctactttgtctccatctatctcctcctttgtccccaaaggtcaccaagtactaagtggataacagattcttctttactggagttcgggatcaagaaggtgacccccaaccaagcacaatgtgggagatgacataaggctcagcgctggccattgctgccagcaatggagatttcttgtgt

SEQ ID NO: 1887191 - DNA, 4001 bp, Homo sapiens
cactacagtggggacatcaagaatgcaatatttatggattgctgcatgattcttaaaaatgaataaaactgtttacaagggaaggagagctaactgcaaagtgagcttatctgtgaaagtttctgtctgactttcgccagcactctttaatacttttactcaagaggatctggagttggaggagtgggagaggcaagggctagggaaaggcatgttggcgggggagtgatgcgccatagccgggccttcttcatggtctgggcaccagcctccccgaccccggctctccagctcctgggcagaggcggggtaatcaacccagcccccaccactgcctctgcagccgccttaaaccggagaacgtccaaccctgcagctcctcaataattaaagagcaggaaagctggtgacaggagggaggccaggggaagggaggaggaagggacacagtccccagagtccctctactcttaatccctgtgacttaaaggttggtgaaattaattgggcaaatgaccccgctaggagaatttgacaagtccatgacttcagagttttacccacgggctctgcttcatcagctgtctccagaggagtgagtgcgcttctgcagaagcctctggaatgtcagcttcctggaacctcgaggatacgggtggggaaggagctgcttactgggacacactggattaccctacccccttggtgtgtctgccgcctctgtggatgtaagcggcaggtggcatcggaaagtcagacctgcctgggacaccagagaaagaccctaagagtcgggggagagggaaaggctgcagaaacatgagaaagtgccactcgtagcggagaggaaagaaaacctcaaggatacggttcccgagcctgagcccgctcccagccttagccccccaaccccaggctccgtcccaggagcagtcgacgcctcaaagcgtacgggacaggaagggggtgggggcgagagtcttggttccccagaacgaacggatccatagcggttcccggtgccgcaggccgcgcgcttctccgaccccagcgcggggccctcgggcgggaatgagccgagccgggacttagcggcgggtagggggttgggtggcgcgggagagggcggcagaaggagggagttcgaagagagttgccgccagggagagtggcaagtgcccgcggtctccttggagacgtgctggccaatggcagaggcggaagctgtttatgggggcggagcgtcgccatggcagcaggagaagcctttggagcggctacttaatgccggtcccggggccgcggtagctcagagaagcgccgtcgggcgggggggcggcaagaggcgctggcagggcccccgagctgggggcagagagccgcagggggtgggagcaacttcttccagaaccttcctctggcccgggctgcgctctgagccaggtaagggatggggagggctgcaggccagggggaagggtgggcaacggtaccaacccgctctctcattcgtccttaacggaagtggtgggcccagggactgacatcggagaagtctgggggaaactcgcctcctgccccccgttactgttccgtccccttccttcccaatgatcccctatcataatattccttttcaaggatcagaggacctccaccgcccccgccccgtcgtaccgccctcccaaacttctcgccccacttccatttgttgcgaggaggaagggggtcctgatttcctgctcttcgggagaaaaggatagcctcggatgcccctaccctcttcatttggctaataaaacctcgaagaggaaaggaagagggaggcagatctgatgggggtgggaccccagggccttgcttctgtttcccatacctcggcactaaaagatcctccccagctgcggggatgatgttagagagggcgtccccgtacacacactgtcccctcgggggtggggtagtgctcagctcccaccgtggtcctcgcaggcaccacatacttattcggaggaggcgcccccggggtcgcgagatggaagcgcgcgtccgggaggccgtgtaacgggagctgcgggactcagcgggccagagagcgcggcgggccacccccggctcagcccgtggatgctgaccgccccctcggagagtccccgcagacatggcggagagctggctgcgcctctcgggagccgggccggcggaggaggccgggccggagggcggcctggaggagcccgacgccctggatgacagcctgaccagcctgcagtggctgcaggaattctccattctcaacgccaaggcccccgccctgcccccggggggcaccgacccccacggctaccaccaggtgccaggttcagcggcgcccgggtcccccctggcggccgaccccgcctgcctggggcagccacacacgccgggcaagcccacgtcgtcgtgcacgtcgcggagcgcgcccccggggctgcaggccccaccccccgacgacgtggactacgccaccaatccgcacgtgaagcctccctactcgtatgccacgctcatctgcatggccatgcaggccagcaaggccaccaagatcaccctgtcggccatctacaagtggatcacggacaacttctgctacttccgccacgcagatcccacctggcaggtagaggaggcacgggcggcggccgctccctccccattccctcctcgctccccacgctgcactggattcatatcccaaatctgcaggccaagtaggctctgcggtgcggccagcgccccagaagggagccctgcaaaggagcccagttcttgcaactgcccctcctttgacttccagagagagagagagagagaagggagaatgtccagaggtggagggctttaggggtgcagaggctgagattcaaggggaaataacctgccattcatccagcaggcccaggccaaagaccagggctagactctgcgtggacagaatctccttggggagagcgatgaactgaaggcgcattcttgtcccaagtcctagaattcctagacactgccctgccccgggatggtttgtcggggccgggagtcagaaacggaaactggaacgtggcctccctgccaggctctacgtcctgcccttttgcagttggcttggggagggtggaatggaaggggtgccttagcatgtgagggccaggtgtgtcccaatggagggtggagggggtaaggggccttcctaaagctgctgtcccagccccccacctcaacctctgctcagtttcctgcctccaacccccgctgtcagccaacctccctggggggacaattacctgagccaggtgccttccactggggctctgcctaccacactcacttcgtgttccacgtctctggaaccaggcactgagcagccaaggggcccaggccaccatgtaaacatcccagccttgctgccgggcattatccacccacctgccctgccgtcccagcccaggacccctgtcccccagcaggctttggacaagattaagcacctaagaatggacaaggcaggaggatggtggatttgaggctgggtaggcagtgccctaagagtcttcagccatcaccatcaagggctagttggagtcaggggccccccaaggacgcccagactcttccctgaagcacccaaagcgggcaggccacaggaccgcagtcccaagccatttccaatgcccctgaccctagagcagggtcatttgcagctgcaccgaaaaagcagagaccctcagccccaccctaccctaagcctgtgcagctgcgcttcgagaaacgggccccaggaatgagtgctatgctcttagctcttggctgggtaataatcaactgagcctggagtggggggagggggccgtggggggtgaaggcccaggccagcagccggctcaacaaacaaggaaagtcatcagatcccccacctctcatccctgcgcgctctctctctctctcccccttcctctccactctcg

SEQ ID NO: 1887192 - DNA, 4001 bp, Homo sapiens
gcgcgagtctggcgcctggcgtgtggaaggcgctcagtaaacgtttgtggagcgaagaaacgacgcaaaggtgatgagcacgacgcagttaggaggctattggcccggcgcgggggaaaagggggaaggtcgggctcggggtggcaggaccccagagggcaggggtgactgccggggtgctcttggggcaaggtgggcgtcaaggcccccagcaaggttgggataaagtttctctccgaggcacagactgccgcctgcgggctcagcatttacctctcccttcctccttcctaacgcaacttcagcggagggctgagggctctactgcgcattacctggaaaacttatttcactccacggccctaagaggtgggccttattattagccacggccagggttagggtgaggccactcctccagggcagaatttcagggggtgcccacccccccgccctaaatcattcagcaatcaacataaattatagttcaacgcaatatatcttatcttgtgggccgcaagccacccaggtgcccaggcaagagcctgaaggcacaagctgttccagtacagcaaagaaaataattagaataagaaaagttttactagagataggaaacggataggattatatctgactattattaatcattagtttgtagcatcactctttgttctattaccataatgatctctgttctattatgattaccttgggggaaaccaggccacacagagttaggagctgaagggccacagtgagaggtgaccagaagacaagagtgtgagccctcattcacgcccagagaagggccgctggagggctccttggcctagcggtaatgccagtgcctgggaaggccctggttacttagcaggccttggtctagcggtggccccagtgcctgggaaggcacccgttacttagcagaattactacgcagccataaaaaaggatgagttcatgacctctgcgggaacgtggagggaggaaaaggcctcattctcagcaaactgacacaggaagcgaaaacaaacaccgcatgttctcgctcctaagtgggagttgaacagcgagaacacatgggacacagggaggggaacatcacacgccgggccctgacggggcgtggggggcaaggggagagagagcattaggacaaatagccaacgcatgcggggcttcaaacctagacgactggtggataggtgcagcaaagcaccgtggcacacgtgtacctatgttccaaacctgcacgtcctgcacatgtaccccagaacttgggagggggtgggggaaaccaaaagagcgagggagaggcggggggggggaagagagagagagagggaaagagagagagagacagagagaggagagagagagagagagagagacagagagagagagagagagacagagagagagacagagagacggagagacagagagagagagagagaaagagagagagagagagagagagagagagagagagacaggagaaagaagaactccgggtgggtcccattcctttaaaaggtcgccacccactcgactgccaagctgagatcctaaggacctccccaaaggaggaggtcgtggccttcccaaagcgcagtagccacggtggaaacgacagcgtgccgcataagcctaccgtctaccgcccgcacatcaggaacctcaaggtacttcagggaagcagttaagttaagccggcgcgtcacaggcactcggcgtgcaagccgccccgcaggtgctaccgtctcttacctccctctacttttaggaaacacgttgtatccccggagggggtgcaccgttcctggaggtactgcaataccaggtcgatgcgtggagtggacggagcaagctcctattccatctccctgctccaaaaatccatttaatatattgtcctcggatagaggacgtatcagatattaaactgataagaacagatactacacttgatcttagccaaaaggccgagaagcgatgcgctcgccttcgcgcccgccgtcaccgtcccactctcatccacattcaagtcgcggtgagagccccagcctcgctccttgccccattccctctgtctcgtccacagcgctattgacgcccttacactctcgggctgatttcttattctctgcctttgaaaagggaaatcttacacccgtgcttcttccggcgttcccgggctttcatttcgaatttgcatgccccgccctttcacagagggcgtggcctccgccgttgactccgcccccggggccgcctctgcctgggggagccggggctccgctgggggcgacttccttgttcgtatcgagccagcgaaaagacagaaccggaagagaccgggggcgaaggcgacaggggtctgtggaagagacctgtcggcggagagcggtccacgttttcctggagaaagacgaggctccagggcaggagcgcgggctgcgctgggcctttacttcgccgcccgcgggcggggagaccggccccgtacccgaggggacgaggggacgaggggcccatgcccagtcagggaagccgaaggcctggaggggcttccgggagcaggggctggagttcctctgccaggcaggaggctggcaccagacacccggcagagggaggcggcgagggcccagcaaggattctccccagcccctgtgcctgcgtctcctgcggcttctgtgcgcggaccgtgtcctgtgctgtgtagggaacgctgcctctctgctcgggacgtggattcctttcccctcctcctcgcccggctacttctgacgcaggtcgtcaggactccgcttgggtgtcacccgtgcaggaagcctcccttagtcaagggccctcggcacccgccccatatgtgactagcagccctcctgtgtatttcatcgcgcccccgttgtttatatcagccattccactcaccacccttctgggcaaccctttatctcccgctctgaaatcccatcgctgagggctgggacccctcctcagtgcttatccctgtttccccgcgcgagtctggcgcctggcgtgtggaaggcgctcagtaaacgtttgtggagcgaagaaacgacgcaaaggtgatgagcacgacgcagttaggaggctattggcccggcgcgggggaaaagggggaaggtcgggctcggggtggcaggaccccagagggcaggggtggctgccggggtgctcttggggcaaggtgggcgtcaaggcccccagcaaggttgggataaagtttctctccgaggcacagactgccgcctgcgggctcagcatttacctctcccttcctccttcctaacgcaacttcagcggagggctgagggctctactgcgcattacctggaaaacttatttcactccacggccctaagaggtgggccttattattagccacggccagggttagggtgaggccactcctccagggcagaatttcagggggtgccacccccccgccctaaatcattcagcaatcaacataaattatagttcaacgcaatgtatcttatcttgtgggccgcaagccacccaggtgcccaggcaagagcctgaaggcacaagctgttccagtacagcgaagaaaataattagaataagaaaagttttactagagataggaaacggataggattatatctgactattattaatcattagtttgtagcatcactctttgttctattaccataatgatctctgttctattatgattaccttgggggaaaccaggccacacagagttaggagctgaagggccacagtgagaggtgaccagaagacgagagtgtgagccctcattcacgcccagagaagggccgctggagggctccttggcctagcggtaatgccagtgcctgggaaggccctggttacttagcaggccttggtctagcggtggccccagtgcctgggaaggcacccgttacttagcagacccggaaagggaatctccctctctccaggggagacagaga

SEQ ID NO: 1887193 - DNA, 4001 bp, Homo sapiens
gctttctacaaactggttcctttatttttatgtttatttatttgggacggggtctggctctgtcacccaggctggagtgcagtggtgcaatcactgctcactgcagcatccacctcccagcgtccacccatcctcctggcctcagcctccggaacagctggggtacaggtacgccccagcccgaacaggttttcactaggttgcctgggctctttctttctttgtctgtgtttgtttgttggttggttggttggttggttggtttttgtttgtttgtttcgagacggggctccggctctgccgccgggggctgcagtgcaatggcgcgatctcacctcactgcggccttctgggctcaagcgatcctcccactgtgcccggcctgaagacagcctttagagaaagaagcagggggagttcttccgaggacagacaagatttctggagtttggaaagggtgagagactgggtcagcgaaaggaacattccggtctttatgttgggatgcaacgtatagatacagggatgagacccaaaagagccggcagaggtttgtcatcgtgctcgcaaggcaactgcgtatggctgatcccgtaaaggatacacatacctagagcggcacgtaaagatgcatccagcatgacgggtggagcacgatgcttggactcgagctctgctcctgtgcgttccgtgatcaatggcttatactacctgcacctcagtttttcccgggcaaaaaaggaagcttgctgccggtgcgttggcacctgccttaaagtgccagctactcagcgggctgaagaggaagaagttcctactaggaagacacgtggacacgtatgtttactgcagcactatttacaatagcaaagacttggaaccaactcgaatgcccatgaatgataggctggataaagaaagtgtggcacgtatacagcatggaattactacgcagccataaaaaaggatgagttcatgacctctgcgggaacgtggatgaagctggaaggcctcattctcagcaaactgacacaggaagcgaaaaccaaacaccgcatgttctcgctcctaagtgggagttgaacagcgagaacacatgggacacagggaggggaacatcacacgccgggccctgacggggcgtggggggcaaggggagagagagcattaggacaaatagccaacgcatgcggggcttcaaacctagacgactggtggataggtgcagcaaagcaccgtggcacacgtgtacctatgttccaaacctgcacgtcctgcacatgtaccccagaacttgggagggggtgggggaaaccaaaagagcgagggagaggcggggggggggaaagagagggagagagggaaagagagagagagacaggagagaggagagagagagagagagagagagagagagacagagagagagacagagagacagagacagacacagagagacggagagacagagagagagagagagagagagagagagacaggagaaagaagaactccgggtgggtcccattcctttaaaaggtcgccacccactcgactgccaagctgagatcctaaggacctccccaaaggaggaggtcgtggccttcccaaagcgcagtagccacggtggaaacgaaagcgtgccgcataagcctaccgtctaccgcccgcacatcaggaacctcaaggtacttcagggaagcagttaagtcaagccggcgcgtcacaggcactcggcgtgcaagccgccccgcaggtgctaccgtctcttacctccctctacttttaggaaacacgttgtatccccggagggggtgcaccgttcctggaggtactgcaataccaggtcgatgcgtggagtggacggagcaagctcctattccatctccctgctccaaaaatccatttaatatattgtcctcggatagaggacgtatcagatattaaactgataagaacagatactacacttgatcttagccaaaaggccgagaagcgatgcgctcgccttcgcgcccgccgtcaccgtcccactctcatccacattcaagtcgcggtgagagccccagcctcgctcctttgccccattccctctgtctcgtccacagcgctattgacgcccttacactctcgggctgatttccttattcttccgccttttgaaaagggaaatcttacacccgcgcttcttccggcgttcccgggctttcatttccaatttgcatgccccgccctttcacagagggcgctctgcgggacgtggatgatgctggaaggcctcattctcagcaaactgaaaggaagcgaaaaccaaacaccgcatgttctcgctcctaagtgggagttgaacagcgagaacacatgggacacagggaggggaacatcacacgccgggccctgacggggcgtggggggcaaggggagagagagcattaggacaaatagccaacgcatgcggggcttcaaacctagacgactggtggataggtgcagcaaagcaccgtggcacacgtgtacctatgttccaaacctgcacgtcctgcacatgtaccccagaacttgggagggggtgggggaaaccaaaagagcgagggagaggcggggggggggaagagagagagagagggaaagagagagagagacagagagaggagagagagagagagagacagagagagagacagagagacagagacagacacagagagacggagagacagagagagagagagagagaaagagagagagagagagacaggagaaagaagaactccgggtgggtcccattcctttaaaaggtcgccacccactcgactgccaagctgagatcctaaggacctccccaaaggaggaggtcgtggccttcccaaagcgcagtagccacggtggaaacgaaagcgtgccgcataagcctaccgtctaccgcccgcacatcaggaacctcaaggtacttcagggaagcagttaagtcaagccggcgcgtcacaggcactcggcgtgcaagccgccccgcaggtgctaccgtctcttacctccctctacttttaggaaacacgttgtatccccggagggggtgcaccgttcctggaggtactgcaataccaggtcgatgcgtggagtggacggagcaagctcctattccatctccctgctccaaaaatccatttaatatattgtcctcggatagaggacgtatcagatattaaactgataagaacagatactacacttgatcttagccaaaaggccgagaagcgatgcgctcgccttcgcgcccgccgtcaccgtcccactctcatccacattcaagtcgcggtgagagccccagcctcgctccttgccccattccctctgtctcgtccacagcgctattgacgcccttacactctcgggctgatttcttattctccgcctttgaaaagggaaatcttacacccgtgcttcttccggcgttcccgggctttcatttccaatttgcatgcccccgcccctttcacagagggcgtggcctccgccgttgactccgccccccggggccgccttctgcctgggggagccggggctccgctgggggcgacttccttgttcgtatcgagcccagcgaaaagacagaaccggaagagaccgggggcgaaggcgacaggggtctgtggaagagacctgtcggcggagagcggtccacgttttcctggagaaagacgaggccccagggcaggagcgcgggctgcgctgggcctttacttcgccgcccgcgggcggggagaccggccccgtacccgaggggacgaggggacgaggggcccatgcccagtcagggaagccgaaggcctggaggggcttccgggagcaggggctggagttcctctgccaggcaggaggctggcaccagacacccggcagagggaggcggcgagggcccagcaaggattctccccagcccctgtgcctgcgtctcctgcggcttctgtgcgcggaccgtgtcctgtgctgtgtagggaacg

SEQ ID NO: 1887194 - DNA, 4001 bp, Homo sapiens
ccaaacctgcacgtcctgcacatgtaccccagaacttgggagggggtgggggaaaccaaaagagcgagggagaggcggggggggggaaagagagggagagagggaaagagagagagagacaggagagaggagagagagagagagagagagagagagagacagagagagagacagagagacagagacagacacagagagacggagagacagagagagagagagagagagagagagagacaggagaaagaagaactccgggtgggtcccattcctttaaaaggtcgccacccactcgactgccaagctgagatcctaaggacctccccaaaggaggaggtcgtggccttcccaaagcgcagtagccacggtggaaacgaaagcgtgccgcataagcctaccgtctaccgcccgcacatcaggaacctcaaggtacttcagggaagcagttaagtcaagccggcgcgtcacaggcactcggcgtgcaagccgccccgcaggtgctaccgtctcttacctccctctacttttaggaaacacgttgtatccccggagggggtgcaccgttcctggaggtactgcaataccaggtcgatgcgtggagtggacggagcaagctcctattccatctccctgctccaaaaatccatttaatatattgtcctcggatagaggacgtatcagatattaaactgataagaacagatactacacttgatcttagccaaaaggccgagaagcgatgcgctcgccttcgcgcccgccgtcaccgtcccactctcatccacattcaagtcgcggtgagagccccagcctcgctcctttgccccattccctctgtctcgtccacagcgctattgacgcccttacactctcgggctgatttccttattcttccgccttttgaaaagggaaatcttacacccgcgcttcttccggcgttcccgggctttcatttccaatttgcatgccccgccctttcacagagggcgctctgcgggacgtggatgatgctggaaggcctcattctcagcaaactgaaaggaagcgaaaaccaaacaccgcatgttctcgctcctaagtgggagttgaacagcgagaacacatgggacacagggaggggaacatcacacgccgggccctgacggggcgtggggggcaaggggagagagagcattaggacaaatagccaacgcatgcggggcttcaaacctagacgactggtggataggtgcagcaaagcaccgtggcacacgtgtacctatgttccaaacctgcacgtcctgcacatgtaccccagaacttgggagggggtgggggaaaccaaaagagcgagggagaggcggggggggggaagagagagagagagggaaagagagagagagacagagagaggagagagagagagagagacagagagagagacagagagacagagacagacacagagagacggagagacagagagagagagagagagaaagagagagagagagagacaggagaaagaagaactccgggtgggtcccattcctttaaaaggtcgccacccactcgactgccaagctgagatcctaaggacctccccaaaggaggaggtcgtggccttcccaaagcgcagtagccacggtggaaacgaaagcgtgccgcataagcctaccgtctaccgcccgcacatcaggaacctcaaggtacttcagggaagcagttaagtcaagccggcgcgtcacaggcactcggcgtgcaagccgccccgcaggtgctaccgtctcttacctccctctacttttaggaaacacgttgtatccccggagggggtgcaccgttcctggaggtactgcaataccaggtcgatgcgtggagtggacggagcaagctcctattccatctccctgctccaaaaatccatttaatatattgtcctcggatagaggacgtatcagatattaaactgataagaacagatactacacttgatcttagccaaaaggccgagaagcgatgcgctcgccttcgcgcccgccgtcaccgtcccactctcatccacattcaagtcgcggtgagagccccagcctcgctccttgccccattccctctgtctcgtccacagcgctattgacgcccttacactctcgggctgatttcttattctccgcctttgaaaagggaaatcttacacccgtgcttcttccggcgttcccgggctttcatttccaatttgcatgcccccgcccctttcacagagggcgtggcctccgccgttgactccgccccccggggccgccttctgcctgggggagccggggctccgctgggggcgacttccttgttcgtatcgagcccagcgaaaagacagaaccggaagagaccgggggcgaaggcgacaggggtctgtggaagagacctgtcggcggagagcggtccacgttttcctggagaaagacgaggccccagggcaggagcgcgggctgcgctgggcctttacttcgccgcccgcgggcggggagaccggccccgtacccgaggggacgaggggacgaggggcccatgcccagtcagggaagccgaaggcctggaggggcttccgggagcaggggctggagttcctctgccaggcaggaggctggcaccagacacccggcagagggaggcggcgagggcccagcaaggattctccccagcccctgtgcctgcgtctcctgcggcttctgtgcgcggaccgtgtcctgtgctgtgtagggaacgctgcctctctgctcgggacgtggattcctttcccctcctcctcgcccggctacttctgacgcaggtcgtcaggactccgcttgggtgtcacccgtgcaggaagcctcccttagtcaagggccctcggcacccgccccatatgtgactagcagccctcctgtgtatttcatcgcgcccccgttgtttatatcagccattccactcaccacccttctgggcaaccctttatctcccgctctgaaatcccatcgctgagggctgggacccctcctcagtgcttatccctgtttccccgcgcgagtctggcgcctggcgtgtggaaggcgctcagtaaacgtttgtggagcgaagaaacgacgcaaaggtgatgagcacgacgcagttaggaggctattggcccggcgcgggggaaaagggggaaggtcgggctcggggtggcaggaccccagagggcaggggtggctgccggggtgctcttggggcaaggtgggcgtcaaggcccccagcaaggttgggataaagttcctctccgaggcacagactgccgcctgcgggctcagcatttacctctcccttcctccttcctaacgcaacttcagcggagggctgagggctctactgcgcattacctggaaaacttatttcactccacggccctaagaggtgggccttattattagccacggccagggttagggtgaggccactcctccagggcagaatttcagggggtgcccacccccccgccctaaatcattcagcaatcaacataaattatagttcaacgcaatgtatcttatcttgtgggccgcaagccacccaggtgcccaggcaagagcctgaaggcacaagctgttccagtacagcgaagaaaataattagaataagaaaagttttactagagataggaaacggataggattatatctgactattattaatcattagtttgtagcatcactctttgttctattaccataatgatctctgttctattatgattaccttgggggaaaccaggccacacagagttaggagctgaagggccacagtgagaggtgaccagaagacgagagtgtgagccctcattcacgcccagagaagggccgctggagggctccttggcctagcggtaatgccagtgcctgggaaggccctggttacttagcaggccttggtctagcggtggccccagtgcctgggaaggcacccgttacttagcagacccggaaagggaatctccctctctccaggggaga

SEQ ID NO: 1887195 - DNA, 4001 bp, Homo sapiens
ctgtctttatctcttcgatctctcgtctccgcacacacgcgaagagaaaacccacagacccggtaggggtggaccctacattatctcagctacaacataatcaggatattcacgtggactactgagtctttcggtgcccccttgctgttttagttttgtcctgcggccgagtgtttccctcgcttcacgccaacacaatctccgccgccctgtcttgtcatccccattctacagcccagcacggtgtagtatggcagccgctagccacaggtatctagggagccctggaaatgtggtcagttctaatggagctgtgctgtaagtgtgaaatacacgtgggattttgacggcagtgggagcaaaattctcccaatttttttttttttttttttttttcagacggaggttccgctcttgttacccagcctggagtccagtggcgcgatctaggctctctgcaacctccgcctcccgggttcaagcgattccccttagatacagggatgagacccaaaagagccggcagaggtttttcatcgtgctcgcaagggcaactgcccggtggctgatcccgtaaaggatacacatacctagagcggagcctaaagatgcatccagcatgacgggtggagccacgatgcttggactcgagctctgctcctgtgcgttccgtgatcaatggcttatactacctgcacctcagtttttcccgggcaaaaaaggaagcttgctgccggtgcgttggcacctgccttaaagtgccagctactcagcgggctgaagaggaagaagttcctactaggaagacacgtggacacgtatgtttactgcagcactatttacaatagcaaagacttggaaccaactcgaatgcccatgaatgataggctggataaagaaagtgtggcacgtatacagcatggaattactacgcagccataaaaaaggatgagttcatgacctctgcgggaacgtggatgaagctggaaggcctcattctcagcaaactgacacaggaagcgaaaaccaaacaccgcatgttctcgctcctaagtgggagttgaacagcgagaacacatgggacacagggaggggaacatcacacgccgggccctgacggggcgtggggggcaaggggagagagagcattaggacaaatagccaacgcatgcggggcttcaaacctagacgactggtggataggtgcagcaaagcaccgtggcacacgtgtacctatgttccaaacctgcacgtcctgcacatgtaccccagaacttgggagggggtgggggaaaccaaaagagcgagggagaggcgggggggggggaagagagagagagagggaaagagagagagagacagagagaggagagagagagagagagagagagagagacagagagagagacagagagacagagacagacacagagagacggagagacagagagagagagagagaaagagagagagagagagagagagagagagagagacaggagaaagaagaactccgggtgggtcccattcctttaaaaggtcgccacccactcgactgccaagctgagatcctaaggacctccccaaaggaggaggtcgtggccttcccaaagcgcagtagccacggtggaaacgacagcgtgccgcataagcctaccgtctaccgcccgcacatcaggaacctcaaggtacttcagggaagcagttaagtcaagccggcgcgtcacaggcactcggcgtgcaagccgccccgcaggtgctaccgtctcttacctccctctacttttaggaaacacgttgtatccccggagggggtgcaccgttcctggaggtactgcaataccaggtcgatgcgtggagtggacggagcaagctcctattccatctccctgctccaaaaatccatttaatatattgtcctcggatagaggacgtatcagatattaaactgataagaacagatactacacttgatcttagccaaaaggccgagaagcgatgcgctcgccttcgcgcccgccgtcaccgtcccactctcatccacattcaagtcgcggtgagagccccagcctcgctccttgccccattccctctgtctcgtccacagcgctattgacgcccttacactctcgggctgatttcttattctccgcctttgaaaagggaaatcttacacccgtgcttcttccggcgttcccgggctttcatttcgaatttgcatgccccgccctttcacagagggcgtggcctccgccgttgactccgcccccggggccgcctctgcctgggggagccggggctccgctgggggcgacttccttgttcgtatcgagccagcgaaaagacagaaccggaagagaccgggggcgaaggcgacaggggtctgtggaagagacctgtcggcggagagcggtccacgttttcctggagaaagacgaggccccagggcaggagcgcgggctgcgctgggcctttacttcgccgcccgcgggcggggagaccggccccgtacccgaggggacgaggggacgaggggcccatgcccagtcagggaagccgaaggcctggaggggcttccgggagcaggggctggagttcctctgccaggcaggaggctggcaccagacacccggcagagggaggcggcgagggcccagcaaggattctccccagcccctgtgcctgcgtctcctgcggcttctgtgcgcggaccgtgtcctgtgctgtgtagggaacgctgcctctctgctcgggacgtggattcctttcccctcctcctcgcctggctacttctgacgcaggtcgtcaggactccgcttgggtgtcacccgtgcaggaagcctcccttagtcaagggccctcggcacccgccccatatgtgactagcagccctcctgtgtatttcatcgcgcccccgttgtttatatcagccattccactcaccacccttctgggcaaccctttatctcccgctctgaaatcccatcgctgagggctgggacccctcctcagtgcttatccctgtttccccgcgcgagtctggcgcctggcgtgtggaaggcgctcagtaaacgtttgtggagcgaagaaacgacgcaaaggtgatgagcacgacgcagttaggaggctattggcccggcgcgggggaaaaaggggaaggtcgggctcggggtggcaggaccccagagggcaggggtggctgccggggtgctcttggggcaaggtgggcgtcaaggcccccagcaaggttgggataaagtttctctccgaggcacagactgccgcctgcgggctcagcatttacctctcccttcctccttcctaacgcaacttcagcggagggctgagggctctactgcgcattacctggaaaacttatttcactccacggccctaagaggtgggccttattattagccacggccagggttagggtgaggccactcctccagggcagaatttcagggggtgcccaaccccccgccctaaatcattcagcaatcaacataaattatagttcaacgcaatgtatcttatcttgtgggccgcaagccacccaggtgcccaggcaagagcctgaaggcacaagctgttccagtacagcgaagaaaataattagaataagaaaagttttactagagataggaaacggataggattatatctgactattattaatcattagtttgtagcatcactctttgttctattaccataatgatctctgttctattatgattaccttggggaaaccaggccacacagagttaggagctgaagggccacagtgagaggtgaccagaagacgagagtgtgagccctcattcacgcccagagaagggccgctggaggctccttggctagcggtaatgccagtgcctgggaaggccctggttacttagcaggccttggtctagcggtggcccagtgcctgggaaggcacccgttacttagcagacccggaaagggaatctccctctctccaggggagacagagtcag

SEQ ID NO: 1887196 - DNA, 4001 bp, Homo sapiens
tcctttatttttatgtttatttatttgggacggggtctggctctgtcacccaaggctggagtgcagtggtgcaatcactgctcactgcagcatccacctcccagcgtccacccatcctcctggcctcagcctccggaacagctggggtacaggtacgccccagcccgaacaggttttcactaggttgcctgggctctttctttctttgtctgtgtttgtttgttggttggttggttggttggttggtttttgtttgtttgtttcgagacggggctccggctctgccgccgggggctgcagtgcaatggcgcgatctcacctcactgcggccttctgggctcaagcgatcctcccactgtgcccggcctgaagacagcctttagagaaagaagcagggggagttcttccgaggacagacaagatttctggagtttggaaagggtgagagactgggtcagcgaaaggaacattccggtctttatgttgggatgcaacgtatagatacagggatgagacccaaaagagccggcagaggtttgtcatcgtgctcgcaaggcaactgccggtggctgatcccgtaaaggatacacatacctagagcggagcctaaagatgcatccagcatgacgggtggagccacgatgcttggactcgactctgctcctgtgcgttccgtgatcaatggcttatactacctgcacctcagtttttcccgggcaaaaaaggaagcttgctgccggtgcgttggcacctgccttaaagtgccagctactcagcgggctgaagaggaagaagttcctactaggaagacacgtggacacgtatgtttactgcagcactatttacaatagcaaagacttggaaccaactcgaatgcccatgaatgataggctggataaagaaagtgtggcacgtatacagcatggaattactacgcagccataaaaaaggatgagttcatgacctctgcgggaacgtggatgaagctggaaggcctcattctcagcaaactgacacaggaagcgaaaaccaaacaccgcatgttctcgctcctaagtgggagttgaacagcgagaacacatgggacacagggaggggaacatcacacgccgggccctgacggggcgtggggggcaaggggagagagagcattaggacaaatagccaacgcatgcggggcttcaaacctagacgactggtggataggtgcagcaaagcaccgtggcacacgtgtacctatgttccaaacctgcacgtcctgcacatgtaccccagaacttgggagggggtgggggaaaccaaaagagcgagggagaggcgggggggggaaagagagagagagagggaaagagagagagagacagagagaggagagagagagtgagagagagagagagagagagagagacagagagagagacagagagacagagacagacacagagagacggagagacagagagagagagagagaaagagagagagagagagagagacaggagaaagaagaactccgggtgggtcccattcctttaaaaggtcgccacccactcgactgccaagctgagatcctaaggacctccccaaaggaggaggtcgtggccttcccaaagcgcagtagccacggtggaaacgaaagcgtgccacataagcctaccgtctaccgcccgcacatcaggaacctcacggtacttcagggaagcagttaagtcaagccggcgcgtcacaggcactcggcgtgcaagccgccccgcaggtgctaccgtctcttacctccctctacttttaggaaacacgttgtatccccggagggggtgcaccgttcctggaggtactgcaataccaggtcgatgcgtggagtggacggagcaagctcctattccatctccctgctccaaaaatccatttaatatattgtcctcggatagaggacgtatcagatattaaactgataagaacagatactacacttgatcttagccaaaaggccgagaagcgatgcgctcgccttcgcgcccgccgtcaccgtcccactctcatccacattcaagtcgcggtgagagccccagcctcgctccttgccccattccctctgtctcgtccacagcgctattgacgcccttacactctcgggctgatttcttattctccgcctttgaaaagggaaatcttacacccgtgcttcttccggcgttcccgggctttcatttcgaatttgcatgccccgccctttcacagagggcgtggcctccgccgttgactccgcccccggggccgcctctgcctgggggagccggggctccgctgggggcgacttccttgttcgtatcgagccagcgaaaagacagaaccggaagagaccgggggcgaaggcgacaggggtctgtggaagagacctgtcggcggagagcggtccacgttttcctggagaaagacgaggccccaggcaggagcgcgggctgcgtgggccttttacttcgccgcccgggtaagtaaccgggccccgtacccgaggggacgggggaacccccagcaagctggataaagttctttccgagcacagactggcgcctgcgggctcagcatttacctctcccgtccttccctaacgcaacttcagcggagggctgaggggctctactgcgcattacctggaaaacttatttcactccacggccctaagaggtgggccttattattagccacggccagggttagggtgaggccactcctccagggcagaatttcagggggtgcccacccccccgccctaaatcattcagcaatcaacataaattatagttcaacgcaatgtatcttatcttgtgggccgcaagccacccaggtgcccaggcaagagcctgaaggcacaagctgttccagtacagcgaagaaaataattagaataagaaaagttttactagagataggaaacggataggattatatctgactattattaatcattagtttgtagcatcactctttgttctattaccataatgatctctgttctattatgattaccttgggggaaaccaggccacacagagttaggagctgaagggccacagtgagaggtgaccagaagacgagagtgtgagccctcattcacgcccagagaagggccgctggagggctccttggcctagcggtaatgccagtgcctgggaaggccctggttacttagcaggccttggtctagcggtggccccagtgcctgggaaggcacccgttacttagcagacccggaaagggaatctccctctctccaggggagacagagaacgctccgctccaccacctcttgtgggaggtctgacattagccaggccggcccgcagtcatccggaggctccaacgtctgtctccctgtgatgctgtgcttcagtggtcacgctccttgttcactttcatgttcagcctgtacacctggctcctccttttaagttcttagaagacagcagtagcagaactagtaggagtaccacagtcttcgatctttctgataagtgcatagaagaaacgctgacgtttgctgtcctccctctccacctcggctaccacaaagggaaaggccccctgtccagtgcacacgtgactcgcgtgacctatcgatcattggagatgactggcactccttaccctgcccccttgccttgactacaataaatagcagcgcctccaggcactcggggccactacctgtctgtctccgcgctttggtggcagtggtcccccgggcccagctgtctttcttcctatctctttgtcttctgtctttatctcttcgatctctcgtctccgcacacacgcgaagagaaaacccacagacccggtaggggtggaccctacattatctcagctacaacataatcaggatattcacgtggactactgagtctttcggtgcccccttgctgttttagttttgtcctgcggccgagtgtttccctcgcttcacgccaacacaatctccgccgccctgtcttgtcatcccc

SEQ ID NO: 1887197 - DNA, 4001 bp, Homo sapiens
ttttatgtttatttatttgggacggggtctggctctgtcacccaggctggagtgcagtggtgcaatcactgctcactgcagcatccacctcccagcgtccacccatcctcctggcctcagcctccggaacagctggggtacaggtacgccccagcccgaacaggttttcactaggttgcctgggctctttctttctttgtctgtgtttgtttgttggttggttggttggttggttggtttttgtttgtttgtttcgagacggggctccggctctgccgccgggggctgcagtgcaatggcgcgatctcacctcactgcggccttctgggctcaagcgatcctcccactgtgcccggcctgaagacagcctttagagaaagaagcagggggagttcttccgaggacagacaagatttctggagtttggaaagggtgagagactgggtcagcgaaaggaacattccggtctttatgttgggatgcaacgtatagatacagggatgagacccaaaagagccggcagaggtttgtcatcgtgctcgcaaggcaactgccggtggctgatcccgtaaaggatacacatacctagagcggagcctaaagatgcatccagcatgacgggtggagccacgatgcttggactcgagctctgctcctgtgcgttccgtgatcaatggcttatactacctgcacctcagtttttcccgggcaaaaaaggaagcttgctgccggtgcgttggcacctgccttaaagtgccagctactcagcgggctgaagaggaagaagttcctactaggaagacacgtggacacgtatgtttactgcagcactatttacaatagcaaagacttggaaccaactcgaatgcccatgaatgataggctggataaagaaagtgtggcacgtatacagcatggaattactacgcagccataaaaaaggatgagttcatgacctctgcgggaacgtggatgaagctggaaggcctcattctcagcaaactgacacaggaagcgaaaaccaaacaccgcatgttctcgctcctaagtgggagttgaacagcgagaacacatgggacacagggaggggaacatcacacgccgggccctgacggggcgtggggggcaaggggagagagagcattaggacaaatagccaacgcatgcggggcttcaaacctagacgactggtggataggtgcagcaaagcaccgtggcacacgtgtacctatgttccaaacctgcacgtcctgcacatgtaccccagaacttgggagggggtgggggaaaccaaaagagcgagggagaggcggggggggggaagagagagagagagggaaagagagagagagacagagagaggagagagagagagagagagagagagagagagagacagagagagagacagagagacagagacagacacagagagacggagagacagagagagagagagagaaagagagagagagagagagagagagagagagagacaggagaaagaagaactccgggtgggtcccattcctttaaaaggtcgccacccactcgactgccaagctgagatcctaaggacctccccaaaggaggaggtcatggccttcccaaagcgcagtagccacggtggaaacgaaagcgtgccgcataagcctaccgtctaccgcccacacatcaggaacctcaaggtacttcagggaagcagttaagtcaagccggcgcgtcacaggcactcggcgtgcaagccgccccgcaggtgctaccgtctcttacctccctctacttttaggaaacacgttgtatccccggagggggtgcaccgttcctggaggtactgcaataccaggtcgatgcgtggagtggacggagcaagctcctattccatctccctgctccaaaaatccatttaatatattgtcctcggatagaggacgtatcagatattaaactgataagaacagatactacacttgatcttagccaaaaggccgagaagcgatgcgctcgccttcgcgcccgccgtcaccgtcccactctcatccacattcaagtcgcggtgagagccccagcctcgctccttgccccattccctctgtctcgtccacagcgctattgacgcccttacactctcgggctgatttcttattctccgcctttgaaaagggaaatcttacacccgtgcttcttccggcgttcccgggctttcatttcgaatttgcatgccccgccctttcacagagggcgtggcctccgccgttgactccgcccccggggccgcctctgcctgggggagccggggctccgctgggggcgacttccttgttcgaatcgagcccccgaaaaaacagacccggaagagaccgggcgcgaatgcgaccgggttctgtggaagataactgtcgacagagagcggaccccgttttcctgaagaaagaccaagccccaatgcaggagcgcgggctgcgctggacctttacatcgccacccgctgtcggagagaccggccccgtacccgaggggacgaggggacgaggggcccatgcccagtcagggaagccgaaggcctggaggggcttccgggagcaggggctggagttcctctgccaggcaggaggctggcaccagacacccggcagagggaggcggcgagggcccagcaaggattctccccagcccctgtgcctgcgtctcctgcggcttctgtgcgcggaccgtgtcctgtgctgtgtagggaacgctgcctctctgctcgggacgtggattcctttcccctcctcctcgcccggctacttctgacgcaggtcgtcaggactccgcttgggtgtcacccgtgcaggaagcctcccttagtcaagggccctcggcacccgccccatatgtgactagcagccctcctgtgtatttcatcgcgcccccgttgtttatatcagccattccactcaccacccttctgggcaaccctttatctcccgctctgaaatcccatcgctgagggctgggacccctcctcagtgcttatccctgtttccccgcgcgagtctggcgcctggcgtgtggaaggcgctcagtaaacgtttgtggagcgaagaaacgacgcaaaggtgatgagcacgacgcagttaggaggctattggcccggcgcgggggaaaagggggaaggtcgggctcggggtggcaggaccccagagggcaggggtggctgccggggtgctcttggggcaaggtgggcgtcaaggcccccagcaaggttgggataaagtttctctccgaggcacagactgccgcctgcgggctcagcatttacctctcccttcctccttcctaacgcaacttcagcggagggctgagggctctactgcgcattacctggaaaacttatttcactccacggccctaagaggtgggccttattattagccacggccagggttagggtgaggccactcctccagggcagaatttcagggggtgcccacccccccgccctaaatcattcagcaatcaacataaattatagttcaacgcaatgtatcttatcttgtgggccgcaagccacccaggtgcccaggcaagagcctgaaggcacaagctgttccagtacagcgaagaaaataattagaataagaaaagttttactagagataggaaacggataggattatatctgactattattaatcattagtttgtagcatcactctttgttctattaccataatgatctctgttctattatgattaccttgggggaaaccaggccacacagagttaggagctgaagggccacagtgagaggtgaccagaagacgagagtgtgagccctcattcacgcccagagaagggccgctggagggctccttggcctagcggtaatgccagtgcctgggaagggccctggtttacttagcaggccttggtctagcggtggccccagtgcctgggaaggcacccgttacttagcagacccgggaaaggaaatctcccctctctccaggggagac

SEQ ID NO: 1887198 - DNA, 4001 bp, Homo sapiens
gtggaccctacattatctcagctacaacataatcaggatattcacgtggactactgagtctttcggtgcccccttgctgttttagttttgtcctgcggccgagtgtttccctcgcttcacgccaacacaatctccgccgccctgtcttgtcatccccattctacagcccagcacggtgtagtatggcagccgctagccacaggtatctagggagccctggaaatgtggtcagttctaatggagctgcgctgttaagtgtgaaatacacatgggattttgacggcagtgggagcaaaattctcccaatttttttttttttttttttttttttcagacggaggttccgctcttgttacccagcctggagtccaatggcgcgatctaggctctctgcaacctccgcctcccgggttcaagcgattcccctgcctcagcctcccgagcagctgggactacaggcatgtgccaccacgcccggctaactttgtatttttagtacagatggggtttctccacgttgctcaggctggtctccaactcccgacctccggtgatctgcccagctgccgcctcccaaagtgttgcttgcgattacaggcttgagccaccgctcaccctggcttttttttttttttttttccaaacaaactctcgctctgtcgcccaggctgggagtgcagtggcgcgatctcggctcactgcagcctctacctcccgggttccagcgattctcctgcctcagcctcctgggtagctgggattacaggcgcaggccaccacgcccggctaatttttgtatttttagggggtttcgccatgtcggccaggctggtctcgagctcctgacctcaggcgatccgcccgcctcggcctcccaaagcgctgggattacaggcgtaagccaccgcgccgggctctttcattctgtctttattttctgagatcgagtctcgctcggccgctcaggttggactgcaacggcgtgatctcggctcgctgaaaaggcctcattctcagcaaactgacacaggaagcgaaaaccaaacaccgcatgttctcgctcctaagtgggagttgaacagcgagaacacatgggacacagggaggggaacatcacacgccgggccctgacggggcgtggggggcaaggggagagagagcattaggacaaatagccaacgcatgcggggcttcaaacctagacgactggtggataggtgcagcaaagcaccgtggcacacgtgtacctatgttccaaacctgcacgtcctgcacatgtaccccagaacttgggagggggtgggggaaaccaaaagagcgagggagaggcgggggggggggaaagagagggagagagggaaagagagagagagacaggagagaggagagagagagagagagagagagagagagagagagacagagagagagacagagagacagagacagacacagagagacggagagacagagagagagagagagagagagagagacaggagaaagaagaactccgggtgggtcccattcctttaaaaggtcgccacccactcgactgccaagctgagatcctaaggacctccccaaaggaggaggtcgtggccttcccaaagcgcagtagccacggtggaaacgaaagcgtgccgcataagcctaccgtctaccgcccgcacatcaggaacctcaaggtacttcagggaagcagttaagtcaagccggcgcgtcacaggcactcggcgtgcaagccgccccgcaggtgctaccgtctcttacctccctctacttttaggaaacacgttgtatccccggagggggtgcaccgttcctggaggtactgcaataccaggtcgatgcgtggagtggacggagcaagctcctattccatctccctgctccaaaaatccatttaatatattgtcctcggatagaggacgtatcagatattaaactgataagaacagatactacacttgatcttagccaaaaggccgagaagcgatgcgctcgccttcgcgcccgccgtcaccgtcccactctcatccacattcaagtcgcggtgagagccccagcctcgctccttgccccattccctctgtctcgtccacagcgctattgacgcccttacactctcgggctgatttcttattctccgcctttgaaaagggaaatcttacacccgtgcttcttccggcgttcccgggctttcatttcgaatttgcatgccccgccctttcacagagggcgtggcctccgccgttgactccgcccccggggccgcctctgcctgggggagccggggctccgctgggggcgacttccttgttcgtatcgagccagcgaaaagacagaaccggaagagaccgggggcgaaggcgacaggggtctgtggaagagacctgtcggcggagagcggtccacgttttcctggagaaagacgaggccccagggcaggagcgcgggctgcgctgggcctttacttcgccgcccgcgggcggggagaccggccccgtacccgaggggacgaggggacgaggggcccatgcccagtcagggaagccgaaggcctggaggggcttccgggagcaggggctggagttcctctgccaggcaggaggctggcaccagacacccggcagagggaggcggcgagggcccagcaaggattctccccagcccctgtgcctgcgtctcctgcggcttctgtgcgcggaccgtgtcctgtgctgtgtagggaacgctgcctctctgctcgggacgtggattcctttcccctcctcctcgcccggctacttctgacgcaggtcgtcaggactccgcttgggtgtcacccgtgcaggaagcctcccttagtcaagggccctcggcacccgccccatatgtgactagcagccctcctgtgtatttcatcgcgcccccgttgtttatatcagccattccactcaccacccttctgggcaaccctttatctcccgctctgaaatcccatcgctgagggctgggacccctcctcagtgcttatccctgtttccccgcgcgagtctggcgcctggcgtgtggaaggcgctcagtaaacgtttgtggagcgaagaaacgacgcaaaggtgatgagcacgacgcagttaggaggctattggcccggcgcgggggaaaagggggaaggtcgggctcggggtggcaggaccccagagggcaggggtggctgccggggtgctcttggggcaaggtgggcgtcaaggcccccagcaaggttgggataaagtttctctccgaggcacagactgccgcctgcgggctcagcatttacctctcccttcctccttcctaacgcaacttcagcggagggctgagggctctactgcgcattacctggaaaacttatttcactccacggccctaagaggtgggccttattattagccacggccagggttagggtgaggccactcctccagggcagaatttcagggggtgcccaaccccccgccctaaatcattcagcaatcaacataaattatagttcaacgcaatgtatcttatcttgtgggccgcaagccacccaggtgcccaggcaagagcctgaaggcacaagctgttccagtacagcgaagaaaataattagaataagaaaagttttactagagataggaaacggataggattatatctgactattattaatcattagtttgtagcatcactctttgttctattaccataatgatctctgttctattatgattaccttgggggaaaccaggccacacagagttaggagctgaagggccacagtgagaggtgaccagaagacgagagtgtgagccctcattcacgcccagagaagggccgctggagggctccttggcctagcggtaatgccagtgcctgggaaggccctggttacttagcaggccttggtctagcggtggccccagtgcctgggaaggcacccgttacttagcagacccggaaagggaatctccctctctccaggggagacagag

SEQ ID NO: 1887199 - DNA, 4001 bp, Homo sapiens
actggttcctttatttttatgtttatttatttgggacggggtctggctctgtcacccaggctggagtgcagtggtgcaatcactgctcactgcagcatccacctcccagcgtccacccatcctcctggcctcagcctccggaacagctggggtacaggtatgccccagcccgaacaggttttcactaggttgcctgggctctttctttctttgtctgtgtttgtttgttggttggttggttggttggttggtttttgtttgtttgtttcgagacggggctccggctctgccgccgggggctgcagtgcaatggcgcgatctcacctcactgcggccttctgggctcaagcgatcctcccactgtgcccggcctgaagacagcctttagagaaagaagcagggggagttcttccgaggacagacaagatttctggagtttggaaagggtgagagactgggtcagcgaaaggaacattccggtctttatgttgggatgcaacgtatagatacagggatgagacccaaaagagccggcagaggtttgtcatcgtgctcgcaaggcaactgccggtggctgatcccgtaaaggatacacatacctagagcggagcctaaagatgcatccagcatgacgggtggagccacgatgcttggactcgagctctgctcctgtgcgttccgtgatcaatggcttatactacctgcacctcagtttttcccgggcaaaaaaggaagcttgctgccggtgcgttggcacctgccttaaagtgccagctactcagcgggctgaagaggaagaagttcctactaggaagacacgtggacacgtatgtttactgcagcactatttacaatagcaaagacttggaaccaactcgaatgcccatgaatgataggctggataaagaaagtgtggcacgtatacagcatggaattactacgcagccataaaaaaggatgagttcatgacctctgcgggaacgtggatgaagctggaaggcctcattctcagcaaactgacacaggaagcgaaaaccaaacaccgcatgttctcgctcctaagtgggagttgaacagcgagaacacatgggacacagggaggggaacatcacacgccgggccctgacggggcgtggggggcaaggggagagagagcattaggacaaatagccaacgcatgcggggcttcaaacctagacgactggtggataggtgcagcaaagcaccgtggcacacgtgtacctatgttccaaacctgcacgtcctgcacatgtaccccagaacttgggagggggtgggggaaaccaaaagagcgagggagaggcggggggggggaagagagagagagagggaaagagagagagagacagagagaggagagagagagagagagagagagagagagacagagagagagacagagagacagagacagacacagagagacggagagacagagagagagagagagaaagagagagagagagagagagagacaggagaaagaagaactccgggtgggtcccattcctttaaaaggtcgccacccactcgactgccaagctgagatcctaaggacctccccaaaggaggaggtcgtggccttcccaaagcgcagtagccacggtggaaacgaaagcgtgccgcataagcctaccgtctaccgcccgcacatcaggaacctcaaggtacttcagggaagcagttaagtcaagccggcgcgtcacaggcactcggcgtgcaagccgccccgcaggtgctaccgtctcttacctccctctacttttaggaaacacgttgtatccccggagggggtgcaccgttcctggaggtactgcaataccaggtcgatgcgtggagtggacggagcaagctcctattccatctccctgctccaaaaatccatttaatatattgtcctcggatagaggacgtatcagatattaaactgataagaacagatactacacttgatcttagccaaaaggccgagaagcgatgcgctcgccttcgcgcccgccgtcaccgtcccactctcatccacattcaagtcgcggtgagagccccagcctcgctccttgccccattccctctgtctcgtccacagcgctattgacgcccttacactctcgggctgatttcttattctccgcctttgaaaagggaaatcttacacccgtgcttcttccggcgttcccgggctttcatttcgaatttgcatgccccgccctttcacagagggcgtggcctccgccgttgactccgcccccggggccgcctctgcctgggggagccggggctccgctgggggcgacttccttgttcgtatcgagccagcgaaaagacagaaccggaagagaccgggggcgaaggcgacaggggtctgtggaagagacctgtcggcggagagcggtccacgttttcctggagaaagacgaggccccagggcaggagcgcgggctgcgctgggcctttacttcgccgcccgcgggcggggagaccggccccgtacccgaggggacgaggggacgaggggcccatgcccagtcagggaagccgaaggcctggaggggcttccgggagcaggggctggagttcctctgccaggcaggaggctggcaccagacacccggcagagggaggcggcgagggcccagcaaggattctccccagcccctgtgcctgcgtctcctgcggcttctgtgcgcggaccgtgtcctgtgctgtgtagggaacgctgcctctctgctcgggacgtggattcctttcccctcctcctcgcccggctacttctgacgcaggtcgtcaggactccgcttgggtgtcacccgtgcaggaagcctcccttagtcaagggccctcggcacctgccccatatgtgactagcagccctcctgtgtatttcatcgcgcccccgttgtttatatcagccattccactcaccacccttctgggcaaccctttatctcccgctctgaaatcccatcgctgagggctgggacccctcctcagtgcttatccctgtttccccgcgcgagtctggcgcctggcgtgtggaaggcgctcagtaaacgtttgtggagcgaagaaacgacgcaaaggtgatgagcacgacgcagttaggaggctattggcccggcgcgggggaaaagggggaaggtcgggctcggggtggcaggaccccagagggcaggggtggctgccggggtgctcttggggcaaggtgggcgtcaaggcccccagcaaggttgggataaagtttctctccgaggcacagactgccgcctgcgggctcagcatttacctctcccttcctccttcctaacgcaacttcagcggagggctgagggctctactgcgcattacctggaaaacttatttcactccacggccctaagaggtgggccttattattagccacggccagggttagggtgaggccactcctccagggcagaatttcagggggtgcccacccccccgccctaaatcattcagcaatcaacataaattatagttcaacgcaatgtatcttatcttgtgggccgcaagccacccaggtgcccaggcaagagcctgaaggcacaagctgttccagtacagcgaagaaaataattagaataagaaaagttttactagagataggaaacggataggattatatctgactattattaatcattagtttgtagcatcactctttgttctattaccataatgatctctgttctattatgattaccttgggggaaaccaggccacacagagttaggagctgaagggccacagtgagaggtgaccagaagacgagagtgtgagccctcattcacgcccagagaagggccgctggagggctccttggcctagcggtaatgccagtgcctgggaaggccctggttacttagcaggccttggtctagcggtggccccagtgcctgggaaggcacccgttacttagcagacccggaaagggaatctccctctctccaggggagacagag

SEQ ID NO: 1887200 - DNA, 4001 bp, Homo sapiens
cccgctttctacaaactggttcctttatttttatgtttatttatttgggacggggtctggctctgtcacccaggctggagtgcagtggtgcaatcactgctcactgcagcatccacctcccagcgtccacccatcctcctgcctcagcctccggaacagctggggtacaggtacgccccagcccgaacaggttttcactaggttgcctgggctctttctttctttgtctgtgtttgtttgttggttggttggttggttggttggtttttgtttgtttgtttcgagacggggctccggctctgccgccgggggctgcagtgcaatggcgcgatctcacctcactgcggccttctgggctcaagcgatcctcccactgtgcccggcctgaagacagcctttagagaaagaagcagggggagttcttccgaggacagacaagatttctggagtttggaaagggtgagagactgggtcagcgaaaggaacattccggtctttatgttgggatgcaacgtataggtacagggatgagacccaaaagagccggcagaggtttgtcatcgtgctcgcaaggcaactgccggtggctgatcccgtaaaggatacacatacctagagcggagcctaaagatgcatccagcatgacgggtggagccacgatgcttggactcgagctctgctcctgtgcgttccgtgatcaatggcttatactacctgcacctcagtttttcccgggcaaaaaaggaagcttgctgccggtgcgttggcacctgccttaaagtgccagctactcagcgggctgaagaggaagaagttcctactaggaagacacgtggacacgtatgtttactgcagcactatttacaatagcaaagacttggaaccaactcgaatgcccatgaatgataggctggataaagaaagtgtggcacgtatacagcatggaattactacgcagccataaaaaaggatgagttcatgacctctgcgggaacgtggatgaagctggaaggcctcattctcagcaaactgacacaggaagcgaaaaccaaacaccgcatgttctcgctcctaagtgggagttgaacagcgagaacacatgggacacagggaggggaacatcacacgccgggccctgacggggcgtggggggcaaggggagagagagcattaggacaaatagccaacgcatgcggggcttcaaacctagacgactggtggataggtgcagcaaagcaccgtggcacacgtgtacctatgttccaaacctgcacgtcctgcacatgtaccccagaacttgggagggggtgggggaaaccaaaagagcgagggagaggcgggggggggaaagagagagagagagggaaagagagagagagacagagagaggagagagagagagagagacagagagagagacagagagacagagacagacacaagagacggagagacagagagagagagagagagaaagagagagagagagagagagacaggagaaagaagaactccgggtgggtcccattcctttaaaaggtcgccacccactcgactgccaagctgagatcctaaggacctccccaaaggaggaggtcgtggccttcccaaagcgcagtagccacggtggaaacgaaagcgtgccgcataagcctaccgtctaccgcccgcacatcaggaacctcaaggtacttcagggaagcagttaagtcaagccggcgcgtcacaggcactcggcgtgcaagccgccccgcaggtgctaccgtctcttacctccctctacttttaggaaacacgttgtatccccggagggggtgcaccgttcctggaggtactgcaataccaggtcgatgcgtggagtggacggagcaagctcctattccatctccctgctccaaaaatccatttaatatattgtcctcggatagaggacgtatcagatattaaactgataagaacagatactacacttgatcttagccaaaaggccgagaagcgatgcgctcgccttcgcgcccgccgtcaccgtcccactctcatccacattcaagtcgcggtgagagccccagcctcgctccttgccccattccctctgtctcgtccacagcgctattgacgcccttacactctcgggctgatttcttattctccgcctttgaaaagggaaatcttacacccgtgcttcttccggcgttcccgggctttcatttcgaatttgcatgccccgccctttcacagagggcgtggctccgcgttgactccgcccccgggcgcgcctctgcctgggggagccggggctcgctgggggcgacttccttgttcgtatcgagccagcgaaaagacagaaccggaagagaccgggggcgaaggcgacaggggtctgtggaagagacctgtcggcggagagcggtccacgttttcctggagaaagacgaggccccaggcgaggagcgcgggctgctggggcctttacttcgccgcccgcggcagacccggccccgtacccgagggacgagggacgaggggcccatgcccagtcagggaagccgcacgtggaggggcttccgggagcaggggctggagttcctctgccaggcaggaggctggcaccagacacccggcagagggaggcggcgagggccagcaaggattctccccagcccctgtgcctgcgtctcctgcggcttctgtgcgcggaccgtgtcctgtgctgtgtagggaacgctgcctctctgctcgggacgtggattcctttcccctcctcctcgcccggctacttctgacgcaggtcgtcaggactccgcttgggtgtcacccgtgcaggaagcctcccttagtcaagggccctcggcacccgccccatatgtgactagcagccctcctgtgtatttcatcgcgcccccgttgtttatatcagccattccactcaccacccttctgggcaaccctttatctcccgctctgaaatcccatcgctgagggctgggacccctcctcagtgcttatccctgtttccccgcgcgagtctggcgcctggcgtgtggaaggcgctcagtaaacgtttgtggagcgaagaaacgacgcaaaggtgatgagcacgacgcagttaggaggctattggcccggcgcgggggaaaagggggaaggtcgggctcggggtggcaggaccccagagggcaggggtggctgccggggtgctcttggggcaaggtgggcgtcaaggcccccagcaaggttgggataaagttcctttccgaggcacagactgccgcctgcgggctcagcatttacctttccctttctccttccttacctccctctccacctcggctaccacaaagggaaaggccccctgtccagtgcacacgtgactcgcgtgacctatcgatcattggagatgactggcactccttaccctgcccccttgccttgactacaataaatagcagcgcctccaggcactcggggccactacctgtctgtctccgcgctttggtggcagtggtcccccgggcccagctgtctttcttcctatctctttgtcttctgtctttatctcttcgatctctcgtctccgcacacacgcgaagagaaaacccacagacccggtaggggtggaccctacattatctcagctacaacataatcaggatattcacgtggactactgagtctttcggtgcccccttgctgttttagttttgtcctgcggccgagtgtttccctcgcttcacgccaacacaatctccgccgccctgtcttgtcatccccattctacagcccagcacggtgtagtatggcagccgctagccacaggtatctagggagccctggaaatgtggtcagttctaatggagctgtgctgtaagtgtgaaatacacgtgggattttgacggcagtgggagcaaaattctcccaatttttttttttttttttttttttcagacggaggttccgctcttgttacccagcctggagtccaatggcgcgatctaggctct

SEQ ID NO: 1887201 - DNA, 4001 bp, Homo sapiens
ggaccctacattatctcagctacaacataatcaggatattcacgtggactactgagtctttcggtgcccccttgctgttttagttttgtcctgcggccgagtgtttccctcgcttcacgccaacacaatctccgccgccctgtcttgtcatccccattctacagcccagcacggtgtagtatggcagccgctagccacaggtatctagggagccctggaaatgtggtcagttctaatggagctgtgctgtaagtgtgaaatacacgtgggattttgacggcagtgggagcaaaattctcccaatttttttttttttttttttttttcagacggaggttccgctcttgttacccagcctggagtccaatggcgcgatctaggctctctgcaacctccgcctcccgggttcaagcgattcccctgcctcagcctcccgagcagctgggactacaggcatgtgccaccacgcccggctaactttgtatttttagtacagatggggtttctccacgttgctcaggctggtctccaactcccgacctccggtgatctgcccagctgccgcctcccaaagtgttgcttgcgattacaggcttgagccaccgctcaccctggcttttttttttttttttccagacaaactctcgctctgtcgcccaggctggagtgcagtggcgcgatctcggctcactgcagcctctacctcccgggttccagcgattctcctgcctcagcctcctgggtagctgggattacaggcgcaggccaccacgcccggctaatttttgtatttttagggggtttcgccatgtcggccaggctggtctcgagctcctgacctcaggcgatccgcccgcctcggcctcccaaagcgctgggattacaggcgtaagccacgcgccgggctctttcattctgtctttattttctgagatagtcttcgtcggacgctcagctctgcgggacgtggatgaagctggaaggcctcattcccagcagaaccacacaggaagcgaaaaccaaacaccgcatgttctcgctccgaagtgggagttgaacagcgagaacacatgggacacggggaggggaacatcacacgccgggccctgacgggggcgtggggggcaaggggagagagagcattaggacaaatagccaacgcatgcggggcttcaaacctagacgactggtggataggtgcagcaaagcaccgtggcacacgtgtacctatgttccaaacctgcacgtcctgcacatgtaccccagaacttgggagggggtgggggaaaccaaaagagcgagggagaggcgggggggggggaagagagagagagagggaaagagagagagagacagagagaggagagagagagagagagagagagagagagagagacagagagagagacagagagacagagacagacacagagagacggagagacagagagagagagagagaaagagagagagagagagagagagagagagagagacaggagaaagaagaactccgggtgggtcccattcctttaaaaggtcgccacccactcgactgccaagctgagatcctaaggacctccccaaaggaggaggtcgtggccttcccaaagcgcagtagccacggtggaaacgaaagcgtgccgcataagcctaccgtctaccgcccgcacatcaggaacctcaaggtacttcagggaagcagttaagtcaagccggcgcgtcacaggcactcggcgtgcaagccgccccgcaggtgctaccgtctcttacctccctctacttttaggaaacacgttgtatccccggagggggtgcaccgttcctggaggtactgcaataccaggtcgatgcgtggagtggacggagcaagctcctattccatctccctgctccaaaaatccatttaatatattgtcctcggatagaggacgtatcagatattaaactgataagaacagatactacacttgatcttagccaaaaggccgagaagcgatgcgctcgccttcgcgcccgccgtcaccgtcccactctcatccacattcaagtcgcggtgagagccccagcctcgctccttgccccattccctctgtctcgtccacagcgctattgacgcccttacactctcgggctgatttcttattctccgcctttgaaaagggaaatcttacacccgtgcttcttccggcgttcccgggctttcatttcgaatttgcatgccccgccctttcacagagggcgtggcctccgccgttgactccgcccccggggccgcctctgcctgggggagccggggctccgctgggggcgacttccttgttcgtatcgagccagcgaaaagacagaaccggaagagaccgggggcgaaggcgacaggggtctgtggaagagacctgtcggcggagagcggtccacgttttcctggagaaagacgaggccccagggcaggagcgcgggctgcgctgggcctttacttcgccgcccgcgggcggggagaccggccccgtacccgaggggacgaggggacgaggggcccatgcccagtcagggaagccgaaggcctggaggggcttccgggagcaggggctggagttcctctgccaggcaggaggctggcaccagacacccggcagagggaggcggcgagggcccagcaaggattctccccagcccctgtgcctgcgtctcctgcggcttctgtgcgcggaccgtgtcctgtgctgtgtagggaacgctgcctctctgctcgggacgtggattcctttcccctcctcctcgcccggctacttctgacgcaggtcgtcaggactccgcttgggtgtcacccgtgcaggaagcctcccttagtcaagggccctcggcacccgccccatatgtgactagcagccctcctgtgtatttcatcgcgcccccgttgtttatatcagccattccactcaccacccttctgggcaaccctttatctcccgctctgaaatcccatcgctgagggctgggacccctcctcagtgcttatccctgtttccccgcgcgagtctggcgcctggcgtgtggaaggcgctcagtaaacgtttgtggagcgaagaaacgacgcaaaggtgatgagcacgacgcagttaggaggctattggcccggcgcgggggaaaagggggaaggtcgggctcggggtggcaggaccccagagggcaggggtggctgccggggtgctcttggggcaaggtgggcgtcaaggcccccagcaaggttgggataaagtttctctccgaggcacagactgccgcctgcgggctcagcatttacctctcccttcctctcctacgctacttcagcggagggctgagggctctactgcgcattacctgggaaaacctttattttattatatctgactattattaatcattagtttgtagcatcactctttgttctattaccataatgatctctgttctattatgattaccttgggggaaaccaggccacacagagttaggagctgaagggccacagtgagaggtgaccagaagacgagagtgtgagccctcattcacgcccagagaagggccgctggagggctccttggcctagcggtaatgccagtgcctgggaaggccctggttacttagcaggccttggtctagcggtggccccagtgcctgggaaggcacccgttacttagcagacccggaaagggaatctccctctctccaggagagacagagtgtgagccactgtgcccggctgggagcaagactggagcaagactccatctcaaaaaaataaaataaaataaataagtgaattaattaattaaaggccaggcatggtggttcacacttgtcaacattttgggagacttaggtgggaggattgcttgagtccaggagttccagaccagccagggcaacatagtgagaccctgtctgtattacaataataaaatcaaataaagtttttaatttttttttgagacaagagtctcactctatcactcagg

SEQ ID NO: 1887202 - DNA, 4001 bp, Homo sapiens; identical to SEQ ID NO: 1244626

SEQ ID NO: 1887203 - DNA, 4001 bp, Homo sapiens
ctgggtgacagagctagattctgtctcaaaataaataaattaattagttaattcacttgtttctttttttcaaattttttttagatggagtcccactctgtcacccaggctggagtgcagtggcgcaatctcagctcactgccacctctacgtcctgggttcaagcaattatcccacctcagcctcccgagtagctgggattataggtgcccaccaccacacccagctaatttttgtatctttagtagaggtggggttttgccacgttggccaggctggtctcaaactcctgacctcaggtgatccacccacctcacccagcacccaaagtgctgggattacaggcatgagccaccactcctggcctttttttctttattaaatgagatatcagtcaggaggctgaggcaggagaatcgcttgaacctgggaggtggaggttgcagttagccaagattgtgccattgcactccagcctaggcaacagagacactgtctcaaaaaaaaaaaaagagataccaggcaattttaaattgcatatgaagccttcatcttaagtgtcctttgccacctcatatccagtggcctcctccttcctgttccagctgccactcccatgccacgccctgaagcttgctgttcacaaccgctccacgtctgagaaaacccactcagacctcctgctcccggggcccagcttcctcccctgcatcccagcattggtcctcaagttctcccaacctgcttatttttcagaccactgacccctggtttttcttcctgttaaccccctccctacttcacttcctcctccacagaccttggtatcctttattttagccactctctcgccaatcctcactcactttgtctcattctttagtctaaacctcctgacaaaacgccagtgctggctaaatccgactgtcctcccctcgagcccctgtgggaaaggctggagaaggtcattgtgggaaaggctggagaaggtcacatgaccacacagcttggcaccaccgtgactcagcctgtcccacctgggttctccaggctgcatccctgttccctaacctgccctccctcctgttctcacaagtcactacctgcaaatcctttccactcttctcaaacctggtcttcctgttgccctgttgccctctctgcagaaagcctcacctcctatatcacagaaataaaaggccatcaggtgagaattccatccacttccagctgtaaaacgtatgcacttacctgtttccacgctacaatttctcccatttatgataggacagtccctcctcccacccaaggctaacccttcttcctgggctgcctattctttttttttttttttctgcctcaggcttatttgtaccaatagcgcaggaggaccccagccccatgcagacggcagcccggggtgggtggcacctgtccttctgtcctcacgttggcagacagagatatctactctgaagtctttgtagggcactgggcagctttgggagcctgagctgaaactgaagctggagctgcagcctgggccttggtttgatccttggccttggccttgggccggcacagcctgagccccttggccatgcgggcacgagcaagcttcccaaggttggggtgggcaatgtaggcaagtcgatcaagtttatggctgacaccctttgggatcttgggcttaacctccttgggctttacgagggccttgagagcctcggcacgtggactcatggccttggcattgttggtgtgcatcttctttaggcccttcttttgtgcttcttggcaaagcgcatgttcctcaggaacttggagtccacccccttaagagatttgtatctttgtgatcgcggtttcttgataccatttctgtgccattttcgggactggtggtgtatggtgtggacttggccatgtctgcaccttaagccacggctcctgaagcacctagaaccggaagcctgggctgcctattctagtataacttcctttccctttcagatgccctcttccagctctcctataccttcaatctactagttccttcccatcatttaagtttggccaagtttctacaatattaaaaggataaaaaacagcgccccttcaactcctgtccttcttcaggtgccatatcctgtcctccccttcacggcctgcctgctttaaagaatgtcgtccacagatccccgtcactcttttcttcccattccctcctcatccctgagacctggctcccactccacccatcaaatgccctcatcacactcaccaagcatcccctagcactccaccccatggatgcttcccaggccttatcctccttgatctgccggtaggtttttctgcttgtttgtttttgagatggagtcttgctccgtcgcccaggctggagtgcagtggtgcgatctcggctcactgcaacctctgcctccccggtttaagtgattctcctgcctcagccttccgagtagctgggactataggtgcgcaccaccatgcccagcttatttttgtatttttagtagagacagggtttcgtcatgttggccaggctggtctcgaactcctgacctcaggtgatccgcccaccttggcctcccaaagggctggggttacaggcgtgagccacagcacccagcaagcctgtaggttttaacatggtagactacaccccactttcttcaaacgcactcttttccctagcttctggaccacggtcctcttttctgcccttcctttcagtaggagtatcctcctctctccagtgtcccatgtaaatatcattcagctaggcgctggggatacagtaaagaatctgctttccttgcagctcccttcaatgcggactccccgaggttcttcacatccagcccactcccccttggtcatctcttccactcccatggcttcggctgccttccgaaagctgatgatccccaaacctgcacagctaacctgagctctgggcttcgttgtgcaactgtctactagatagctctgccctgcttgctcgtgcacaagcacctcaaactcaatgtgtctagaaacaagcacatcatcttctctgcaaacttggcgctcctgcctcagggaagggtactatcccaccgcctacaccagaaccatgcatccttcctcggccttactttccgacatccaacctccttctgtttttaatatgctaaagcaaagttcagaaattcagacacctacctccaaggcaagtgtggctcaagtgtgatgataaatggcaactgacgcttggccttaaagttgagctgaagaggacatgctcccgcgaagaaagccatgctccacgctccaggcaattgttgccatctggaaatgtgggcccagtgtggatgcattttctgatttttcaagagaggccagaaattggtttttcatgtaaaatctcctgaattttaagtgctaacaacaattcacctgaaaaataattattcagtgggcatgtgggagaggctctaggactcctggcaatccttgacttgggcagtagtttgcaagggtgttttattttgttattttataatgatttgttagttaaactgaacatacaattttttttcttttttgagacggagtcttgctctgtcacccaggctggagtgcagtggcgcaatctcagctcactgcaagctctgcctcccaggttcacgccattctcctgcctcagcctcctgagtagctgggactacaggcgcccgccaccacgccccgctaattttttgtatttttagtagagacagggtttcaccatgttagccaggatggtctcgatctcctgacctcgtgatccgcccgcctcggcctcccaaagtgctgggattacaggcgtgagccaccgcgcgcggcctgaacatacaagttttacgtatatctctgtctatgacaagtttcataataaaaatgtttttaaaggaaaaaatgattttaaacatatttgtaaaagttgctaggtacaa

SEQ ID NO: 1887204 - DNA, 4001 bp, Homo sapiens
catagaaccagaaagtagactagtagttgccaggggtgaggggagtggggaatggggaattattgtttaatggatagtttcagtttttcaagatgaagagttaagaagttggacggtggtgatgactgcaaaaaactatgaatgtacttagtactactccattgtacacttaagaatggttaagataggccgggcgtggtggctcacgcctgtaatcccagcactttgggaggccaaggcaggtggatcacctgaggtcgggagtttgagaccagcctgactgacatggtgaaaccctgtctttagtaaaaatacaaaaattaaccaggcgtggtggtgcatgcctgtaatcccagctacttgggaggctgaggcaggagaatcacttgaacccgacaggtggaggttgtagtgagccgagatcactctggcctggacgacagagtgagactctgtctcaaaaacaacaacaacaacaacaacaacaacaaaataaaccccaaaagaacatcatgtgccctcatttggagaaagagcaaaaaaacccatcatgactgcccctggcaaactggaggcaggagaatggtaagagggacttctacacgtgaggcaagagcaagatgatggaggagggactgaaaagaccaaggttatactaacatcggaatgtgttaatatgctaaaaaattggaaagatacagagaagattagcatggccactgtgcaaggatgacacacaaaaaataattgaaaaaaaaaagtaaaaaataaaaagaccaaggttgaggtcccagaagccaagaattgaggctgaggctgcgtaaatgtaagatcccatgctaggagtcaggatctctcaccagtctccagggtgtcagacaaggctctttcatctcctcttcctccacctgtggtgacagagggtccctgcctgctgaccattttcagatgtgggtgcaaatctgaatcaatgtagagacatcagcaatccactggcagagcatcaggtgaattgagcaggtaggcagagttggagaataggtgtgagtgagtcctgggagggatgttcctaagggcagatggagaaattgggtagaggccctttaataaacacagaaaggctttatgtaggagttgcggattccagcaggtgaaggggaaccctccccccaccccgccccgaaaatcctggaacaggttgaatagaggaacggagcaggtgggagcagggacgtgagaggaataggaggccaagggcggtgggaaaccagactatgccttcatttccccccacccccggggagaagctgcaaccagttttacaggacactcctggccttgcccgagatcaatgaccccattcagagagggttgatggcacaacgcggcaatgccggcagccaaggggttaaccttaggccagctggctctggggtggtgcgagggggtgggccgccaccccctccggttgccttggcaccattgtaggcgcctgctctgctgctgggaacctccgcagagcccaaggcccttcgttgccagtctgctccccactctctgtcccaagtggttccaggcgctgagcccttaggcttcgtctggattcccatcctccaccccaggagaggttggctcggcctggctggtgcaggcgggtccagcccaggcacagacatgcagatgcgcagtctctagggctgctccttagcctcctgggttagcagccgggagccatctgcgctttctcgccgagaaagccgaggctgaacggatagggggcagggaggggacgggggtggggggtgggggtcccggaggtgaagacctcctttcccctggcggcagggggagatcagagacaccacggagcacaggtcagaaacaagggagtagagaggtcggagccagagactcgaggcgaggcgaggcgaggaggagcgaggagtctcgggcccagagtgtgggggtggagggcaggccccctgctcctccttccaatctctgcttctcccgggtaccccctccgccctccgtggggcccgggctctgcccctcccctcagaccctgcaccctctgcggattggtcctcggcctgctggggggcggggcccgagggccctgacgtcactggccgaggggggcgggcggctggaggagggggtgacggggccccggctcagcacctcggagagctccctccccggccttgttttgctctggcatcgccgccgggggagggagcgagggggccgggcaccgggcgcaaaggcagggggatggccatggaagggttgaggggccccgtcggacagagggcccagccgtgatccagcgacgggtttggggctccgggaggggtgggggggcagcgggcggcggcagcagtggccgcacatctggatggaagcgagctttgtccagaccaccatggctctggggctgtcctccaagaaagcgtcctctcgcaacgtggctgtggagcgtaagaacctgatcaccgtgtgcaggtgggcaccgctagtgggcgggggctggggtggtgagggagaggggttggggtggactgcggaaacccggactgagcgctgccgcggagaaaagggaggggagaaaagggtcgagaataatgcgtccactgtccctcccaggcccagaacccagagggaggctgcagtctggtccctacccttctaggccaagccaagcctatgcccgggcctgggcctggggggtgaggggtgtttaattggtactgtagcttcctgtgagaaccaggaagtgacactgtgtgagggggaagggggtggggatggctggctcccttgctgggaatggggcaggatggacagaggggaccccgtggggggatgaatgccctccaagcataccctcattgacacccatgtcaaactgacctctctggggtggggttctccaatgctcagattctggagcagggatgggcagggtcaattgggcatggggtcagagcccatgaatccttccagggaagggtgaggggcaccacccaagacgtgggaaggaccaagagcctgggttccaggttcaaggggagaagatcgggaggacagggccactggtctctgagggtggaacggttgcagggttgggaagattctccgtgattgcggggcccaggaagtgatcctgttcacttcaacctgcagtgactcaccctccctgccctgccctgtcccaaaaccagggcatggccagctgctcagccactccccctgcagcccacacctgcactctcctctggtgctgggatcccctgtcagctgcaacctcccctggcccccatgcctatcaggtgttgccccctcagtgcagggtgctcctgggggcagggctcactcttccctcgccagccccacctgcctgccacataggcctcagctctgctgaagcccacctgatgccctgaggcccactagtgcccacctgatgccctggctcctggctcccatagctccttcccggttcctgggcacgcactccaccacactgcatctgtctcccagcactagtgcccagcacagtgctgtgcacatcagacctctgcagaaatgcctggaactttaaggaaggagagagtgtagcaatggcccagcccacagtgcagggcactgcctttaccctcatttcccccaacccctgccagtgtgttataaaacaaagatttctgtccttggggccagaaggtcctaggttcaagctcttactccatcagctttagctgcgccaccttggggaggtctcttaaccactctgggccttgggtgccccatcatccccattttagatgtcacagccacaccaaagaatgaaaatggcaccatccatgtaggagcctagctcagtgtctggcacacagaaagagccctgtcctaatgacgctcttcctgtccctctctgctgtctacctgctaggttcctctttttctcttgcctgccaaggtagctgagcctcttgagt

SEQ ID NO: 1887205 - DNA, 4001 bp, Homo sapiens; identical to SEQ ID NO: 1244642

SEQ ID NO: 1887206 - DNA, 4001 bp, Homo sapiens; identical to SEQ ID NO: 1244645

SEQ ID NO: 1887207 - DNA, 4001 bp, Homo sapiens
gagaccagcctggccaacgtgatgaaaccccgtctctactaaaaatacaaaaattagccgggcatggtggcgtgcgcctgtaatctcagctatttgggaggctgaggcaggagaatcgcttgaatctgggaggtggaggttgcagtgagccaagatcacaccactgcactccaacctgggagacagagcaagctccatctcaaacaaaacaaaacaaaacaaaaaccccaaaaatcccataatggtatcccattattcttaggccaaagaccaacatcctcgcctgagccgcaaggccctgtatggcctggccttccctatcttttttttttttttttgagacagggtctcactctgtcacccaggatggactgcagtggcaccatcatgactcactgcagctttaagccccccacctcagcctcccaagtagctgggatcactggcatgggtcaccacacccagcttacttttttgattttgcatagagacaaggtctcgtgttacccaggctgatcttgaactccttggctcaagcaatcttccagcctcagcctccaaaagtgctgtgattacaggtgtgagccaccgcgcccagctcttcacctttttagcttcatttcccaccattctccactttgctttctgggctacaaaggccttctttcagttccttcaccagctgcacctgctggggcactgtgcccagcaaacttttacccatccttcagattctagctcgagggtttcatcctcagaaaagccttctagtctccatcggatcttttttttttttttttttaataattaaaaaacatagaaatgaggtcttactatgttgcccaggctggtcgcgaactcctgagctcaagtgatcctcccaccttggcaccccaaagtgctcagattacaggtgtgagccaccacacccgccagatccttgggatatatgttcttacgttcccttccttcagagcactcactttggcttgaattatgcccttttttttttttttgagatggagtcttgctctgtcacccaggctgcagtatagtggcgcgatctcggctcactggaacctccacctcccgggttcaagcgattctcctgcctcagcctcttgggattacaggcatatgccactgcacccagctaatttcatgttggccaggctggtcttgaactgttgacctcagatgatctgcctgcctcggcctcccaaagtgttgggattacaggcattaaccacggtgcccggcctgaattatgacttttttttttttttctcggagttttgctcttgttgcccaggctggagtgcagtggtgtgtgtgatctcggctccctgcaacctctccacctcctgggttcaagcgattctcctgcctcagcctcctgagtagctgggattacaggcacatgccaccatgcccagctaattttttgtatttttagtagaaatggggtttcatcatgttggccagactggtctcgaactcctgacatcaggtgatccacccgcctcggcctcccaaagtgctgggattacaggcatgagccactgcacctggctgaattatgccctcttaagtgtgatcatttaaccttgtctccctaactgggttgtagttcccagagaacaagggccatgactgttttcttcatctctgtatccgtaacatttaacatgatgtcaggccaatgtatcaacaaatgtttattgaatgaaagacatgacagtaacattgtttatgaagttttgaaaagcaagggctctctgatactaactacaaccattttctttaaacgtaggtcctgtttgcagtatcatacatgatcatcaaactgctgctagaatgctcacacctgttactgcaaattcaaaacccaggaaagacttcttccgggaatttactttaggtcagggttgggctgcctggtaccatgctgcacccacaacttggcaggctcaacaacacaggagcctttccccagaccgtctgacctgaacactttgtcaccatgcttgacatacctggatgccctgctgaggtcacttcgaatgctctcatcaacgaggggcaggaagaaaatagtggttgctgcatgttttcagccaatcgtcgggggatatttctcattttctgttgaaaccttgggggaaaaagtaacataatgtgctttaaaaggacaaaagtcattcgacgcttaccacactcctagaaacctgggctaacccagccagggaccccaatgcttttctgctggctacggggcctccctacagctcctcattccaatttcggtggctgtgtgcggaccaagttctcttttgtcgcctcccgtccaagccctacttgcgatgggagaagccgtccccgaaatcccgggcgccgtggagggggtctggtctctgggtctctggtcacccggtcagtgcctccagcccccggcagagctctgttatcgtcccggggcgagcccaattccgcaggctagggccgatggcggcggaactgtggtcagggctgccctgagtcatcctgcggactgcgagtcggcgaccaccaggaggcgagagcgggtttcccctccaacaggccaaagcacgtgtctccacttacttcccactcccctgggcggaagtagctccgtcagcaacttccggccggaagtgataacttaccatagagatagcagctagagagtcgatgactttggatctgggtcatccaagccggacttaaaggggtcgcagcccgcgcggtgtgattaatggggactagagcctgggccagaggggagggccctggagcgagggaatcagaaggaacatcccatttcttgaaagcccgctgggttcctggagccgtgaaagcattatctctctactcctcatgcaaccctctgaattaagtgcaaagaccactcctgtcttgtagatgagaagtggggcgctccggagatgcttggttacttttccaagcacagccggccaggaagtggcagagctgggttcacacctaagtcatttctgctccaaacccaatgccctttccaccaccccaggtggcaggaaggagaaagctcaagagcagaggggctacgtgaagatgcaggccgtcctggcctattgggataccccctgaaaagcctattgctccaaaagacctggtagattcccgacagttcactgtctgtgggcacaggaagcaacgaacaggaatcttgctctgagtctaatcccacaaccaaggaagaattgctggaccttgtctcagaggcgtttgaaccagagcaactccatcttgaataggggctgggtaaaataaagctgagacctacttggatgcattgctaggtcatacagctcataaagaccttgctgatcaaacaggctgcagtaaagaagacggccaaaatcctccaaaaccaagatggctatgagagtgacctctggttgccctcactggtacacgcccaccagcgccatgacagtttacaaatgccgtggcaacgtcaggaagttaccctacatggtctaaaaaggggaggcatgaataatccaccccttgtttaacatatcaccaagaaataaccattaaaaaaaaaaggccaggtacactttgggaggccgaggcagatggatcacttgatgttgggagttcgaaaccagcctgaccaacctggtgaaactccatctctactaaaaatacaaaattagccaggtgtggtggcacacacttgtaatcccagctacttgggagtctgaggcaggagaatcgcttgaacccaggaggcggagggtgcagtgagccaagactgcaccactgaggccaggcatggtggctcgaccctgtaattccagcactttgggaggccaaggcgggcagatcacctgtggtcgggagtttgagaccagcctgaccgacatggagaaaccccgtctctactaaaattacaaaaaattagccaggcgtggtggtgcatgcctgtaatc

SEQ ID NO: 1887208 - DNA, 4001 bp, Homo sapiens
cttccaagtcactttgttttcctccagaaaaatcactttagttttgctataagtgatcttaaatgatgtttcaataaccatcacatttttggcaaggtaatccgtttataaatttatactcacttctatattccatttatataaagttgatgcattacaaattactttttttttccttctttttttgagacagagtctcgctttgttgcccaggctggagtgcagtggtgcaatgttgggtcactgcaacctctgcctcctgggttcaagcaattctcctgcctcagcctccggagtagctgggattacaggcacgcaccactgcgcctggctaatttttgtatttctggtggagacagggtttcgccacgttggccaggctggtcttgaacccctgacctcaggtgatccacctgccttggcctcccaaagtgctggggttacaggcgtgagtcactgcgcccgaccacaaattactttctaaaaaatttgtagtaatatattttgaggaagattgggtctatttgagcaaacaattttcttcaagttttcctctaagatgggcatgtaagagaatttcaaggagtaatatttggaattgtatcttaaatgttttaacatgtttgaaagtcttacatggtgcctatgtttctaaagaaaatgtaaatgaaaccattcctgtaataatgcttctcattctgaagagctcagtccataggttaaatctatatatatcactggcaagaaaacaggataataaaaatattaccaggcattaaatttgctaggctaaattttataataatttgtgaacaggatgattctaataacttctcagagattgcaacatttgcctctagcaactgcggttctaccacatgcttttaacatggtacagtgagtaataacctttagacttggagaatatgggcttttctttgcttctcttccaatgctccaaacaaactagactggtctgtcttctcattgtcttcggctttcttttctattacaggaacctgatgctctcactgttctccactgcctgaaactgtcagcacaactcaggttccttcttccccttcctacacgcttatttttcttgttccttctacccttcttggctttcagtgaaatagctaccttttcatccgattaatcttattaccactttccttctataagatgaacaaaccaatcacagttatatattgcagaatcttagagtcactagctttttttgactgttcatttctggctgcttgcggaaatttttgtttttctaaaacatcaaaggatcatgttttgtttttattgacttcaggggtctggaactattcaaaattatcctagaaccctggttttcagaagatagatttctaaataggtaaagtttcacctgtagagagaaatgtcctcattttctgagtcaacaattcacaaaaggactaggtacttattttaatataagagaattttattttgagattttaggattccctgtgagttgtataaatagtttatgtgttctaaaatatgggtcaagattcacctttttctctattgatgatactactactttttatgccctgtacataggtatgttacaagaatcaattaacagttatgtcaatttcatatttcactagtgactgaaatgctagctttggaaaaatagagggcagcatggagcaacagattaggtactaaggcaggactcaggacactgagctctagagtgctagataaagtaataaaataattgtctgatacagctttgggcaattataaaacctaaggacctcagaggcttcatttgtaaattcagagaagagaggtgtttcattccttttatttcccactcaactacacatgtctgaggcaggaaaacaaggctgccccactcgtggcagtcctgacgacgatcctcgagggctgctcttggcctccagccttggctaaggagaacagggaccccccaaagcccatgggagagaggcacgaaaggtgatttaaagtatcttctagctctaaagttacgtgataactaaataggaaaatctgcatgtgaatagtaatagctgctccttcatagttctcaaaaaggaagatacacattatgtaatgtaataatgatagaaaagatttcaccattcttccccatttacatttttttaggagattacacatagaagaataaagcttgacacattaaagcggggaaagactggtaagattccatgagcagagacacaatcaaattattcatgctccagtgaatcagcaaatctggggttagccacttctaagaaaggatggctcatttttcctgatcccttggtctctgatctttccatttagtcttgccagtatttgaaacatactaccctcacaattagtaatattcgtaagtaaatatgtcattttatgaagagaaaaaattaaagctaagtactctcttaggtaggcagatgaagctctaagatcaaattatctgacatgtcaacactaattttctttttcttttttttttttttttttttttgagatggagtctcactctgtcatccaggatggtgtgcagtggcatgatctcggctcactgcaacctctgcttcttgggtttaagcgattctcctgcctcagcctcccaagtagctggaactgcaggcacacgccaccacgccaggctaatttttatatttttagtagagtcggggtttcaccatgttggccaggctggtctggaactcctggtctcaagtgatctgcctgcctcagcctcccaaagagctgggattgcaggtgtgagccattgcacctggcccaaattttttttttttttttttttaaacaaggcgtttgtcaaagtggccacatggactggaaagagaaatttgatttttttttttttttttttaaatacagtctcattctgttgcccaggctggagtgcagtggcatcatcttggctctctacaacctctgcctcctaggttcgagctattcttgtgtctcagcctcctgagtagctgggattacaggcatacaccaccatacccggctaatttttgtatttttagtagagacgggttttctccaggttgggcaggttggtgctgaactcccagcctcaagtgatctgcctgctttggcatcccaaagtgctgggataataggcgtgagccaccatgcctggcatgaaagaagaaatttaaatcctcatataactactgctactactaccaccattattacctttaaccttatatagagtttctatctgccaggcactgggctaagtgcttcacatgtattaactcatttaattctcacatccctacttaaatagatattactattaatctcattgttcatatgtgaaaactgaggtagagcaagaagtagtaatttattcaaggtcataaagcaagtgcaagggacaagagtccaagctcactacaattaccttattgaagtttctcataataatagctacctatttagtacttactatgtaccagacactgttttaaaatacttaacaagagtctgggtgcctgtaatcctagcactctgagagcccaaggcaggagaatcgcttgagcccaggagttcgagactagcctggcaggcatagtgagaccccatctctacagaaaatcaaaaaattagccaggtgtggtagtgcatgcctggagtctcagctactcaggaggtgggagaattgcctcagtccatgaggttgaggctgtagtgagctatgattgtgccactacactccagcctgggcaacaaaggaagatcctgtctcaacaaacaagcaaacaacaacaacaaaacacttaacatgcatcaaactcatttaatcctcgtaacactatgagggcgattattattattactctaattttacacatggaggaaacaaggcccagaatgtcacttttttaaaaaggttacttgaattcagtttaaaaacatttttaaaaaatctgtca

SEQ ID NO: 1887209 - DNA, 4001 bp, Homo sapiens
ttacttggaattaaaggtagcaggaagcctcaggcaaaacgagaaaccccatgaggatgagcagatccccttgaggagcagaaagcagcgagagtctccccaacctgtgaagccaccatcggcgatattgaacatgaaccggggcttctctgtcttttcctctcgtcgcccattggaccgtggctcatctcgaggccctggtcgaagctcccggtcaccttttacatcttctgctaggacagacaggtcaaagctcacacctcaggacaccctcctcccaggtcccaagactactatctgtactgtactgtactggcctttcaaacagctacccgcccaggacccaagcattcggttccccagactccacctcccctgatgccctctgggacccaggtgtccggtcccttccacccattacctctcttgcccaaatcccctgtttccccctccggcctctccctgtgttcctgtccatccaacggcttctcctcccccctttctcctggcgtcgactctgtggctgtgggagggggtaggggataggaagggaggatgttaccctcatcccctgaccccagaagagggaaatcccaaattctaatcccccatcactcctaaggccatgcacccacctgacttctctctgtccccacggtacccaggttcaggctccatctctccaggcacccctggcacctcatcctctagaggaatcttccttggctccagccgctccccaagtgatggggctgggctgggggcatcagcctggaagaggacaatggggtcaggatgagccagagggctcccaggtacctggcctccaagccccctcccctcccgctccacaggggaatccagggagccacacacctctgtctccatcttctccccaattctgctgttcttctctggcttttcctcctggttttcagcttcctccttctcaagaggtgtccttatgccttctcctttctcacttggagctggagtagctgcaggggaaggcacagtgataaagacagagattctcccgccctgactcctggctccctttctgtctctcccaccatcctgacttctgattaccaggtttagaggtgcagggactgttggtagcagaagcctcaggagtggtgggagacgttttggtaggagaggaggctctggaggagcgcttagaatcggcgctggggtcaggcatcagttccggcattgaccaacgcccattgatgtgctcaaactcctgcacctggggtggcagggtgggagggttaggtgtcagctccaggcgcttacagacaggaagctccagtctcctccgtctcacaccagcgcaagcttacaactcagggacagaggcagaggaaggacagagactaggcagccagcttgattctttgggtgacaggaagactgataccttctttttgacgagagacatgactccaatgcgggtcaacacctgctggcgactcagtccctcccgagggaccccatcggcaaaggtttcagagccgtctgccccaggctcacacagatggcgcatgaacaaagacacataggccctaaggagcatgggagtgggaggagggttaggggagccacagaaggggtatagggcagtgagggaggcgcgaggatgactgaggacccccaaacccccaaatccccaggtgctccagggctcctcccctgggcctctcactctcaccattaccagccctccaagtcctaactgtccccctgcgccccacccctgggtctttccctttggccttggtacttaattcctgggccccatcagtcagctcttcatcctttccaccagctcctcctgccaggttattgtggtcaagtaaatgtgaggctaggacagcccaggagaggctccttgcttcaacgcccctcccctggggaggatgcctggcccctctactctaggctcggctgaggggaggtggagtgggctgagaccaccccccaggaaatcgagccaggaagtattgtatgacagggagggtgataatcagttgagtaaggtcacatcatatggcggccccaaggaagaaaggaacacccaaagctcttccccttgcgtccaactcagccctgtatcacccacactcacttaaactccttctcagtcttgcccctcaggtcccgcaccagccactgtgtggtgaaggcatcctgtggtggcatcccccagcgcatcacagcattgaggaaagccttccgctgacgggtgttgaagcccagcacctgagggtgggagcaaggaggcaatggcgacaaatgtctagggttcttaggtcttgtcctttctaccttcagtgatccaggcaccaacttccaacctcctgccctcatgccctcttggagaactcaggaacactgggcccagctctcacctcaatgttgcccccgactcgggccagcagtggaggcagtggcttatctttctcattccggagctgcctctttgactgtctacgccctgagggtggggatgacatcagttagctgagccaccacctcctctaagcctcagtcctccttagcaccccattcccacaagatacacaacacaggaacattcctgtcacgtttgaggtgctcccaattctctcccaagcacttcagaactactaacccactaagtctaaaagaaccagtcatattttaaaattaacagctgatatctgacaaaggcccagattaccagtgggaatggaaaatgatatggcctttctggatctagcctatgtggtcacacacaccgaagtttactagcagagagactatgaatatttcttcctttctgctcatctgcaatcgagtttttccacacacacacgaagacttttttacttgtataaaaacagtgggcttaaagcaaactggaaaataaaacgggaagaggtgaggtagagtcaggaacacagatgccaccttcaggacgttcatcgaagtcttcatcctcctcctctgaacccaccgagtactctgactggttgtctgtgggggtggaaagggcccagtggtcagggagggctctcgggatatgcccatgctgaggccctttctggctggattcctccctgccgagacttgtctacctttattctggccttggtccttctgggaacaccagatcactgcccaaagtctgacttgggagccgcatatcctacaccatctccattcaccgcccaccttcagtctctgggcccctctgcttctcctgcaaaacctactctaagcaatggccctgggtgtccacaggatgcctgtgcaaccaccgaagagtttaaatctcctgcaaacccacctggcctctgggtagttcctaatgactctaccttatgtctttcccttttagcagaggaaggctctgacttctaggcttctctctttccctctaaatagctccagccttcaagtccctactcatcatcacttcccccctttactgcctgcatctggggcagtcctcaccttggtcttcctgagcagcatcattgtagttaacttgcttgcgaacccgcttgcccttgcctagattccgggctaggtcttcctgctgttgctcatagtgatgcctcagcagcttctcccagtagtcagggtccacattctcctcctgcttgatgatctctcgctcaatttcctcaatctgaagggcaacagaatgaatgaacactgggggtctccttctttgctaatccttccactgcaaggaaatccctactctgctgcgtcagcccaatccggtctccccactcctgcagcttcgtggctctgcatacattttctggacattgcgcatgttccatgccatctcttacctgcaatgtgctctcctcatgttttctaaatctctcctctaatccctctgacagtgtttctcctgcactgtctcagaaggtacccttctgtgtttaccagtactgtctgtgcctacgtttctctctgaagtccagtctcacctatta

SEQ ID NO: 1887210 - DNA, 4001 bp, Homo sapiens
gatcacggcagtacagtccagcctcggcaacagagggagaccgtggaaagagagaagagacaagagagggagacggagagggctacctgtagttcttaaacaattgttgagggtcaggacaaaagcatttgtatttttaacaagtttctccagttattcaaattaatcccagatagagaatcacagttcattctgggcaatttcatctacaaccctgacatcttcaaccacagtctgtacaagatgttatatttaatgttgtatctcaggctcagcacagatcccttttctgagctccggactgaacctggttcccaaatctggctgtccatcagaaccacctgaagagctttttaaacctacagattgctactgccaagcctctgtccacctccactctaattcagtagatccaaagtaggaaaccaaaacaaagtaaaaaataagcctgacaacatggtaggtgttcactgaatgggtgctagaattattaagacatcgcagtgatgataactcatgtccttgcctagtctgactgatcagatgggttttgggaatcatgaaccagactagcccacctgacagaactctttcctccctcagcaaacagcatcatcagtcattcaagacaaaaatctaccagctatcttagatgcctctcacatctcactagctgaccttcattctttttttttaactttatctttttttttcaggcagataagactttctttttttagtctgtttttattatattgtaattttcttgactgattatcaccaccgaatctcctgtatgtagtacaattctagccatgtagtaggaactcattaagacctatgctgaatgaatccacaaataatttattactaaacattttaatttcaaacgctaaaaaaaaaaaaaaaaaaaagcagttttctctgcaattcctgtcactgctccaagtttcttacaagaaggaggttaaggtttgggtagaagggggccaaagatggaaactgaggagcaagtgtaagatgcagaagagctggaagacaaagggttgtagtcaacgagtgagctcttggagtttaaagtttcacagacagtacttactgtaactttaaaatttcagacacagcacttactgtaattttcttgtctctaaagcaggctttgaacctggatagatttggatagaaccccgactttgtcatttgctaactgcaaggctttgaataaacgatttaatttctctgcgtctgtttcctcatctgtgaaatgaggataacaatactgtccaccttacaacaatgttaataatcggaaaaaggacataggtaacgtgcctggcctgtagctcaccaaatattaggtggtgttgcgattaagatgccttagaacaattcagttctccgactctctagacctgaggaaccttcccagggaacccctaactttcccagaccacactgtcagatattctataggccccgcccctccagagcctccgagtcctccctagcccacccgagcccggtccccagcattacctgacccatagcgcacgtcgtgtgagtgcagtcggacgttgtggcgcgtattgagtagcttcaccacggagccgcaagtaacgacacccaggctggacgctcccacagcgctccacaaaccccccaacaacagcagaggtactacagccatcctaactgtatcgcggagccccaaatcttcgaagaaaactcggcccctccccggaaccggaagctaatggcgaaaccacggagagaaggaagtgaagaagcccgagtctgatctttatggtttatttgactagagcggcctgagaaaccggctgagcctggttacttacgatactctcgctctgttccaggggctcagtgacagctgccttcctgagccgcttcggttacctttcgcacccacgagacgaaagcttccgagagcgggagagagaacaagaaatggcccgcccactcccggtgacagggagccggaaatgacgtagcacgttgacgcagcagcggcggcggtggcggcggaggggccgtgcggtgggtccgtactatcttttcccagtctcggttcgacgactccattttcctcggtgggggcttagcgcactggaggagcggcgggcttcagacaggtaaagttccgactggagagcgtgtttctcgcaggagtcaggtggggaaccgggctcctagggcctggtcacgtaagggaagaggcagtggggagccgtatgcgggaagaagggggagcctggccttccctgctctatggggggaagggggaggaaagcgctgtagttgctcagagtccgaaagcttttcccagcccagtgacacccggaacccgtgaatcgggtggcacgttgaatcaacaggcttcctggcatcccgtccttctctccgcaggtttttaaaactgggccacgcaaaaggattggggatggaagggacctggggcttctgagccaggatcaggtgatcgagttgtttgttctggggatatgaatcctgtggagctttcagcagctcggccatcaggctagagggcgatgccaaattccagctctttacatattgctgaataatacaaatagaactttttgtagatggttgcatccttcatccctttctaaagatcgaaggtcttgtagaagtcctaaagcccgtccattctctatagattcatttcctcaaacgtttgccagaggcctatcatgaacatcaaaattagttattaagtcaaaactccatcttctagtttctacctttctcctcaggcactcctttgaaccagctggagaagttaattttcctgggttgttgcaagaactgatacttatttcagagggctaagatctctgaaaatacttccgtggaaattcactgtaatatcaaaagtaacaagggtgtatgaagctacatcattaatgagcattagggagtgtaaacaatattgaatttgattaatttcttcggaaaaatgtctggttccactgtttatctggaagttaccagtttgtaagtcttcagtgttttgattacagaaacataactgctcttccatcagctgtgaatttagagcccttttttacgagtaatgtccctttcaccagtacaagtacatttttattcacttggcttgtgtggctgctagattggattagcatagccttgcaactctaggaggttttaacttcatcaggagattaattacatcagaaagtggtaccgtctggagaggcttagtcaaattttacagttcttcctctgaaagcctacctagtgtggtggaaacatgatctttgtaggcaaatacgtttgccctgattctatattcttgaccttaataaatggcactaccatcagtcctgcctgtaatccttgtcttccttcctgtccactatttcccaataaaatcagtcaccaaatcctgtctctccctgaaactgttcccatcagcatacaaattatgttctggtatccttcacatccctctccaattaccatgccaattttttaaatttccattcatagatttctacctgtaccaactcagctttctcaactttcattcactcttcattttataccaatctggcttctcttctgcccactccatttttttttttttttttgtggagacagggtcttgctctgttgcccaggttggagtgcagtggccccatcatagctcactgccacctggaactcctgagctcaagcagtcctcctgaggcagcttctagtaatcaagtgccaccacatctactttgcccactccattgaagttgctcttatcaaggtcaccagtgacttctatgttgccaaatccaatggatactttgttctcatattcctctgtctctgcaatattcaacatagttactcctgcctccaaactttcatcttggctttattgacatttcactcttggattttctccatttctccggctgttccttctgagtctcatttgctag

SEQ ID NO: 1887211 - DNA, 4001 bp, Homo sapiens; identical to SEQ ID NO: 1244660

SEQ ID NO: 1887212 - DNA, 4001 bp, Homo sapiens; identical to SEQ ID NO: 1244663

SEQ ID NO: 1887213 - DNA, 4001 bp, Homo sapiens; identical to SEQ ID NO: 1244664

SEQ ID NO: 1887214 - DNA, 4001 bp, Homo sapiens
gttgaattcatgaaggccctgcatcagcgggtcaacatcgtgcctatcctggctaaggcagacacactgacacctcccgaagtggaccacaagaaacgcaaagtgagggaagctggtggtgggaggggatcaggtgggcttctagaaaggatgtggtccccagaactgtgggcccctcatctgtttgtcagatccgggaggagattgagcattttggaatcaagatctatcaattcccagactgtgactctgatgaggatgaggacttcaaattgcaggaccaagccctaaaggtggggccactctagggcatcccattcctatcttatttcttccgggtagaaaaagggagtagaattctatattcaggctatcagggtgggaaaggaccctggcttcctagaatgaagcagagaagatgacgatacaggtggaaagaaagaggtgagaacagagggtgctgacaggcacccctaacctcttccaggaaagcatcccatttgcagtaattggcagcaacactgtagtagaggccagagggcggcgagttcggggtcgactctacccctggggcatcgtggaaggtaaagcactgagcctgtgaccagggtatctccttgccctcagtggctctcccctacctatgcctctggctgacccctagccttgctatgcagtggaaaacccagggcactgcgactttgtgaagctgaggacaatgctggtacgtacccacatgcaggacctgaaggatgtgacacgggagacacattatgagaactaccgggcacagtgcatccagagcatgacccgcctggtggtgaaggaacggaatcgcaagtatgaccagaagccaggacaaagctggcagggggagatcccaagcctagccttgggtgagaccaagccctacttttgttcttctataggccctgggctcaatctaagcgggtgctggggtcctcctcgccttatcaacccttttctccctttagcaaactgactcgggaaagtggtaccgacttccccatccctgctgtcccaccagggacagatccagaaactgagaagcttatccgagagaaagatgaggaggtgagagcagtatggggtataggggaggtctcctgtttgatcaccaacgttggtatctctttgtttggtaatagaaagatccctggctctggtgcatatttgggtcctggataggtcaataggtggttctgtccagagtctccatcacacctcacggctaccaaggttctggcttaagggattagaaatttggggcactttcccaatactaaaggactctccaaaagtccccattttgatgcctgtgcctattccagctgcggcggatgcaggagatgctacacaaaatacaaaaacagatgaaggagaactattaactggctttcagccctggatatttaaatctcctcctcttcttcctgtccatgccggcccctcccagcaccagctctgctcaggccccttcagctactgccacttcgccttacatccctgctgactgcccagagactcagaggaaataaagtttaataaatctgtaggtggcttctggtgtccctgtgtgtatttttatgacctggagatcaagatcctgggacccagttttgaaaggctaatggtagaagatgttggtttctggcttttagtagggaagggagagtggggaaaactttccacttcctttccccttctaagtccctgcttagaatccagcctggcttctccatcttgacgatcatatctatcatgcctctgttatctggggtctgggtctctctccatctttcacacatacagtacctttggtaataaaaagattcctacctgtggtgcatatttgggtcctggataggtcaacaggtggttctgtccagagtctcccatcacacctcagggctaccaaggtcctggcttaagggattagaaatttggggcacttctcctggctaaggagaaagtgaaaccctgtctctactaaaaatacaaaatagccgggcgtggtggcgggcgcctgtagtcccagctactcgggaggctgaggcaggagaatggctgaacccgggaggcggagcttgaagtgagctgagatggcgccactgcactccagcctgggtgacagggcgagactccgtctcaaaaaaaaaaaagaaaaataaaaagaaaaagaaatttggggcacttccccaatattaaaggactgtccaaaagtcccccctgccctttttttttttgaggcggagtctcgctctgtcgcccaggctggagtgcaacggcgctatctcggctcactgcaagctccgtagctgggactacaagactccgtagctgggactacaggcgcccgccaccacgcccgactaattttttgtatttttagtagagacggggtttcaccgtgttagccaggatgacctcgatctcctgaccttgagatccgcccgcctcggccccccaaggtgctgggattacaggcatgagccaccgcgcccggcccaaaaggccccattttgatgcctgtgcgtattccagctgcggcggacgcagttttgtatttgatacctgcccttgggaaaacacaaggtattaactgcgtgcaacctcctgactttctgtttcccctgatctgggaaaagggataggcaggttaagctctacactgtagaaagcctgtgatagagctttgaacaaatgctgcagccattgtaatcaccaaacactatagtaagtgctgggaatgaataaaaacacaatcaccgtcctacaggagttcagtatttaattaaaaaatttacagcatctgctagattgcaggctgttctagaccctggagttcaagtagtgcaaagttcctgtcttcctggaacttaccaacagtactggagtttcaacgttctataaacaaagatgggtgaggacattagccccgggctaattaaagcgctcaggcccgctccagacctgagaatatcagctgaatctgaatcaactgttctccatttctgtcggttggtggtatcgcggggccacggcgacctccagcggccaccctccgtcttgtggtctgttctgggtccccgggaaggaaagggaggggcgataagccgggtccttgggagcgtcctggtctcccttcgctttacagactaggaggccgcagctagctggcagtctcagatccaggtttcccatctctgggatgagaggagagttcttcactcaggactgccagcgcaatgcaggtcgtgaagaactgcagggtcgtttatcgatacaaagtgagtgttggaggaacccatcaagacacaggaagggggaaatcctagcgccgccagtcggagatgaccaagactgaacctcaggcccagccctcccttctctcttagcctgcaggtttttctcctattctggcgttgggaccggatgacagctgcgaaaccaaaacgggaatggataaactgaggtgccactggggacctgtttcagaagtacctcctgggcggggccatcaccggaagtggctttaggcatgtaacctacaatgcccgcctctaattgcgctaccagtaggcgacgagccgcctccacttccggtccccagagcagtggccagcagccccctctttactgctctcctattggctgccgcaaggacgcgctgtgatttcccattggtcgcgtctcccctccggcgccgcgcctccttcctccaggtatagtctcgtctttaggcatccgattggctaaaggctgggagggcgtttgcccgactcgaccaatgagtggggtcgagagtgagggcggtggctgcgtgatgggggcagggcgggacttggcgtggccattggccagggcgggtacaggctagagatatgattggttcaggagaggggcactgtggtggggtcgggactgcgcggcctcagcagctgcgggagacggaagtggcaagagcgcggcctcagagg

SEQ ID NO: 1887215 - DNA, 4001 bp, Homo sapiens
ggtggtggcagcttgtgccagagtgacacaggcttccgtgggcctggctgggggcagttaaaaagctgaaaaggtacttggtgtgtgagggtaaggcttgggaggcagggccctagaggaggccatgttctctgtcctggttgaggggagcagtatgggggggaaggtggggcagatcccagctggcctctgtctcctggttgcaagctgacagcaggccagggaaacagtgaggccctctgccctggccttggggagaaggagtgcatgtgtgaggctggggtactgtggccctggagtggggctagggttcatcgccaggagcaggcttgtggagggatttaaaaccagggtcctgtctctgagccaccccacagggacactcgatccaagcctgttaaggccgtggaactcgagggtaggctgtgggctgggcccccatggggtcaggacggaggtgggggctgccctggaggaacattagtgtttctgagagcaccttagtgttgccccgtctgggccagctgggtgaggagttggggagcagggaggaggccggcgccatggagtgaggaagggagccgtcaccgttaggggtcagcgctagtttaaacaagcgtccccacccacccagataagcctcccacccaagtgtggctccctgctgagggagtacctcaagggcccgggcctgggtggcgccggcaggcttggacaccgccttggcagcaggagcccatggaaggcaggagacctggcgggggtgccacccagtgtggatggaggggcggggcgggggcaccagtgagtcactgggcagaggcatgagcacgtccatgtagctgagcaggaagaagcccaactggctgtccagcatgccctggtaccagttctcgttgatctggttgatcagcgtgaagacgtcaccctcatggaagcccagctccccatggttctcaggctggaagtcatacagcaccttgcagcttggctggtctaggggcggcatgctcctgctaggagtccagatggacttgtcggaagatcggaaaggggatgaagctgcaatcttggggactgtggtgcaggggaagcccccattggactgctcaggctctccgaggtcaaagggctcccagaacttgggcttatactcccgcttggggcgtgaggaagcttcccgcatcctgcgcttgagcttctctgccagctcgtccaggatctgcatggcctgccagtggtagttcagctgcgcctccgccagggcccggagttgactcacctgctcaatgttggtctccaggaggttgtgcatgctggtttctgctacctccttggagtcctcaaacttctccagcgcctgacgcagctcctcatcggggatcttgccctgccgcttcttttagtcaaagtccaggcggcggccctccagcttctgcaggtggtgctggatccccttcaggtctttctcacacaggttctggaggaggtcaatgaagttctgcttgacctctatgtccagggagtccttcacctctgccaggtgcttcatggactcgccggcatccagcagtgcgtcactgaagttggactcgttgcccagctccttctggtggcggatcaggcactcgctcaggagcccctccaactgcgggtagccggggttcttcacctggccctggatcttgcacactgtgttgagcatggtcagcttagcctgtgaggctgggttgggctgcaggtacttgatggtccttgccagcatttccgtcaccgccttgctgatgacatctccatctctttgaagtcatcgtccagcttggtcccctcagcccctccgaccttctcactgaccagctggcttgccttgtagaactgctttttcagccctgcaaccgacaggctgcctcccgccgcagaacctccgcccggaccgtgccagcaacaggctcccaggtgcgtgaccctctgcacgcctcaggggccccaccacgtgcttgccagctctgcgcctgccccggggccacctcgagttcatgattctttagtctccttcaatctagatctgttcgcaggattgttttaaagtatactgacaaaactttgagactgtaagtgacctgagatatacattatccttacttgagaatagtaatttttcaatatgctttaaagattacacatgagccaagacaaatgagctggcctacttactttgtagataaatgtgtaaactcctcaagacttccaataatgaactccaataaggaaattagttcaatgtctttatggccttggtgacaaatggttacagaaaatcagagcatttttttcctatccactaatggtcaagaagaaagcagacagatcctcactatcttagagaactaagtgagaaagttggtcaatgaagaggacttcatccagagaggaagggatgtagcttacagggaagatgctgtaggaggctgaggaaagtgaggctagagcagtaaaacagatctgacagcccggtgaagataagaaagtgacctgacaaaaatgaacggagcagagtgccaaatgaagggccctttccatgctaatcttgcataatgccctcaaccagccttagcataactgagtttctatttagcttgccatattgtggggggtggtggtggcacaatttaagttgcagtaagttgtgtaacaaactcacaatagggccttgcagaaatatatatatatatataatatatataaatatataaaatatatatagaaatatatatatagaatatatatatagaaatatatataaaaatacatacatatatatatatatatatatatatatatatatatatatatatatttttaggcaggttcttgctctgtcacccaggctggagtgcagtggtgtcatcttggctcactgcaacctctacctcctgggttcaagcgatacccccgcctcagcctccccagtagcggggactacaggagtgtgccatcacacctggtgaagatatatatagatatagacggatatatatctatacctatatctacaaagaaggccaggcatgatgcctcatgcctataattgcagcactctgggagaacgaggccggaggatcacttgaggccaggagttcgaaaccagcctggacaacacagtgagacctcatttctccaaaaaataaaaataaaatggcaaaaaaacaaaaaaacaataaacctcacaccatatatgcaaattaactcaaaatggatcatagatctaaatgtaactacacaatttctgggagaagacatatagagtaaatcttttccactttggattaaacaacaggttcttaaagatttcttaggtaagaaacaaaaaagcacaagccatataagaaaaaattgctaacttaaagctgatcaaaattaaaaacttctgctcttcacaaaactttatttatttattttctttctttctttatttttttgagacagagtctcactctgttgcccaggctggagtgcagtggtgcaatcttggctcattgcaacctccacctcccaggttcaagcacttcttgtgcctcagcctcctgagtagccgggattacaggcatgggccaccacaactggctaatttgtgtatttttagtggagattggggttttgccacgttggccaggatggtctcgaactcctgacttcaggtgatccacctgcctcggcctcccaaagtgctgtgattacaggtgtgagtcactatgcccagccagagaacacttttaacagaatgaaaagacaaaccacaatctgagagaagatatttaccaaacacatatctataaggccttgttttttgtttttatttatttacttatttaatttttgagatagtatctcactctgtgacccaggctggagtgcggtggtgatcacagctcactgcagagcctcgacctcccaggctcaagcaatcctcccacctcagcttcccgtgtagctgggaccac

SEQ ID NO: 1887216 - DNA, 4001 bp, Homo sapiens
tgtaggtggctggtggtggcagcttgtgccagagtgacacaggcttccgtgggcctggctgggggcagttaaaaagctgaaaaggtacttggtgtgtgagggtaaggcttgggaggcagggccctagaggaggccatgttctctgtcctggttgaggggagcagtatgggggggaaggtggggcagatcccagctggcctctgtctcctggttgcaagctgacagcaggccagggaaacagtgaggccctctgccctggccttggggagaaggagtgcatgtgtgaggctggggtactgtggccctggagtggggctagggttcatcgccaggagcaggcttgtggggggatttaaaaccagggtcctgtctctgagccaccccacagggacactcgatccaagcctgttaaggccgtggaactcgagggtaagctgtgggctgggcccccatggggtcaggatggaggtgggggctgccctggaggaatattagtgtttctgagagcaccttagtgttgccccgtctgggccagctgggtgaggagttggggagcgggaagaaggccggcgccatggagtgaggaagggagccgtcaccgttaggggtaagcgctagtgtaaacaagcgtccccacccaccccgataagcctcccacccaagtgtggctccctgctgagggagtacctcaagggcccgggcctgggtggcgccagaaggcttggacaccgccctggcagcaggagcccatggaaggcaggagacctggcagggggtgccacccagtgtggatggaggggtggggcgggggcaccagtgagtcactgggcagaggcatgagcacgtccatgtagctgagcaggaagaagcccaactggccgtccagcatgccctggtaccagttctcgttgatctggttgatgagcgtgaagacgtcgccctcatggaagcccagctccccatggttctcaggctggaagtcatacagcaccttgcagcttggctggtctaggggcggcatgctcctgctaggagtacagatggacttgttggaagattggaaaggggatgaagctgcgatcttggggactgtggtgcaggggaagcccccgttggactgctcaggctctccgaggtcaaagggctcccagaacttgggcttatactcccgcttggggcgtgaggaagcttcccgcatcctgcgcttgagcttctctgccagctcgtccaggatctgcatggcctgccagtggtcgttcagctgcgcctccgccagggcccggagttgactcatctgctcaatgtcggtctccaggaggttgtgcatgctggtttctgctacctccttggagtcctcaaacttctccagcgcctggcgcagctcctcatcggggatcttgccctgccgcttcttttagtcaaagtccaggcggcggccctctagcttctgcaggtggtgctggatccccttcaggtctttctcacacaggttctggaggaggtcaatgaagttctgcttgacctctatgtccagggagtccttcacctctgccaggtgcttcatggactcgccggcatccagcagtgcatcactgaagttggactcgttgcccagctccttctggtggcggatcaggcactcgctcaggagcccctccgactgcgggtagccggggttcttcacctggccctggatctttcacactgtgttgagcatggtcagcttagcctgtgaggctgggttgggctccaggtacttgatggtccttgccagcatttccatcaccgccttgctgatgacatctccatctctttgaagtcattgtccagcttggtcccctcagaccctccgaccttctcactgaccagctggcttgccttgtagaactgctttttcagccctgcaaccaacaggctgcctcccgccgcagaacctcccgcccagaccgcgccagcgacaggcttctaggtgcgcgaccctctgcacacctcaggggccccaccacgtgcttgccagctctgcgcctgccccggcaccgcctcgagttcatgattctttagtctccttcaatctagatctgttcgcaggattgttttaaagtatactgacaaaactttgagactgtaagtgacctgagatatacattatccttacttgagaatagtaatttttcaatacgcgttaaagatcattacacatgagccaagacaaatgagctggcctacttactttgtatataaatgtgtaaactcctcaagaattccaataatgaactccaataaggaaattagttcaacgtctttatggccttggtgacaaatggttacagacaatcagagcatttttttcctatccactaatggtcaagaaaaaagcagacagatcctcactatcttagagaactaagtgagaaagttggtcgatgaagaggacttcatccagagaggaagggatgtagcttacagggaagatgctgcaggaggctgaggaaagtgaggctagagcagtaaaacagatctgacaacctggtgaagataaaaaagtgacctgacaaaaatgaacggagcagagtgccaaatagagggccctttccatgctaatcttgcataatgccctcaaccagccttagcataactgagtttctatttagcttgccatattgtgggggggggtgtggtggcacaatttaagttgcagtaagttgtgtaacaaactcacaatagggccctgcagaaatatatatatatatataaaatatatatatataatatataatatatataaaatatataaaatatatatataatataaatatataaaatatatatagaaatatatataaagatatataatatatacatatatatgtataaatatatatgtgtatatatatataaatatatatatatatatatatatatatatttttttttaggcagggtcttgctctgtcacccaggctggagtgcagtggtgtcatcttggctcactgcaacctctacctcctgggttcaagcgatacccccgcctcagcctccctaatagcggggactacaggaatgtgccatcacacctggtgaagatatatatagatatagatagatatatatctatacctatatctacaaagaaggccaggcatgatgcctcatgtctataattgcagcactctgggagaacgaggccggaggatcacttgaggccaggagttcgaaaccagcctggacaacacagtgagacctcatttctccaaaaaataaaaataaaattgcaaaaaaacaaagaaacaataaacctcacaccatatatgcaaattaactcaaaatggatcatagatctaaatgtcactatacaatttctgggagaagacatagagagtaaatcttttccactttggattaaacaacaggttcttaaagatttcttaggtaagaaacaaaaaagcacaagccatataagaaaaaattgctaacttaaagctgatcaaaattaaaaacttctgctcttcacaaaactttacttatttattttctttctttctttatttttttgagacagagtctcactctgttgcccaggctggggtgcagtggtgcaatcttggctcattgcaacctccacctcccaggttcaagcacttcttgtgcctcagcctcctgagtagctgggattacaggcatgggcctccacaactggctaatttgtgtatttttagtagagattggggttttgccacgttggccaggatggtctcgaactcctgacttgaagtgatccacctgcctcggcctcccaaagtgctatgattacaggtgtgagtcactatgcccagccagagaacacttttaacagaatgaaaagacaaaccacaacctgagagaagatatttaccaaacacatatctataaggccttgttttttgtttttaatttatttacttatttactttttgagatagtatctcactctgtgacccaggctggagtgcagtggcgatcac

SEQ ID NO: 1887217 - DNA, 4001 bp, Homo sapiens; identical to SEQ ID NO: 1244694

SEQ ID NO: 1887218 - DNA, 4001 bp, Homo sapiens
catcgaggccccaggtcagaagtggctgttcttacgagtctgcatgagtcttgtaccccatgactgcagtcatggggatgggggcccagcccctaggatggatgctcaggcctcagacctgtgttttgggaagggatgaagggaagggaagagcaatgtggggaattaccaaggggaaagggtgggattagcttatcccagcttcccactgtgccagtggggaaactgaggcccagaggggcccaggccttgaagtgattgcaagttcagcagcatgaaactgctctttatccgtgcactgctgtcaggaacaaatgctgaatggagagtccggagggttgcccaggccactgcaggacccaagctctgagactgagggcttggggacacagagccagagccttgtcctgaaatcctggagggtgctccttggacaggacaaaacttgtattctctctctgagcccagcctcagcagaacccagagtcttccagggctgagatcttgccgtaccagctgcggtcacagacctgccacactggcttgacctgggagttccttacagctgcagaacccctgtcccacctgacccgctgcatcaaaatctgcgtctcaccaggatgtacactttaatgtttgaggagcactgagactcagccaggatgatactctacctgcctgcaggtacaggccgctgctctatgggcagacctcaaccctcagccccagaatgtcctccccagctctgtcgcagacatacgtggctccctgggaggcatagaaagtacaagacttggacctggctccccatgaactggtggccctggaagttgctaccttttattgagcccctgccagctaccaagcacattatcccatttcgtcccacaacagcactgaaagtttgctgtttaatttagagtatcttgcagcttaggcacacaaagcacagagaggttaagtaaactgcccaaggtcacccagcatatacatatgcaggagctgggatatgaatccagagctgaccccggcaccagagtctagccatttacaatcagagtgggcatgggggcagatggtggctcctctcacccctgaaaccggagccccagcccctatgagccctcacagttcattggtctggctgtggtgaatctgacctctcaaaagcctccctttccggagcagaggcctgcgattctccatgctggagagcccgccaagagggattctcctacaactttccagaacacagcagttctggggccaggccaagctagctatgtacagctggaagaggctctctcccccagatgctgagtgactagaagccaagagggagggagttctggaatggtctgcagcagctggaggtgaggcctgagggggctggggcggggcctgggaagaggggccagtgcacagagtattctgaaccgcagaaagtattctgttcactctgggagaaaaacaagagtgttgttcaaaacagctggacgccaggcccagttgccctcgcctggtttttactcttaaacaccttcgcatttcatggctgttccaaagagagagaaatcagccagttgtccattcagacacaagacaaggcatcagccgacaaccaaaggcaaatattttccgtggtgaggaaagcctcccgggtggccccaggcctgcctctggagcagtggctggctggtggctggctctccccgaaggtcgctgcttctggtcagcagactgcgtgtctgggggactggccaggatccgcacccacccagggagcgctgggggcagcggggcggccatcctaggcccgtagtaaatggaagctcccttcctggcatgagagcagccaggcctccagggaggccaggacagcgtgggccccacagttccctgtcttgaaaccccagcccttgatatcaaaatgggacctgttagtctgttgtcggggagggggatttaactgcccaaagctcttaggccctgagtgaatttttttcagcacaacagtagctacacacagttgaagagtgtggcacatggctacatagggtttgtatttggtctacagatgaaggaacaagacccatgtggacttaggcctcattatcataattctgcagccccaggagccaaatccccacatggaaacccttagtaggtagcctggccaagtgggtagcgggaaatcagtgatggtaggccctgggacttctctctagtcccctccccaccctttttttttttttttttttttaatagacggagtctcgcccttgcccaggctggagtgcagtggcgcgatcttggctcactgcaggctccgccccccggggttcacgccattctcctgcctcagcctcctgcatagctgggactgcaggcacccgccacctcgcccggctaattttttgtatttttagtagagacggggtttcaccgtgttagccaggatggtctcgatctcctgacctcatgatccgcctgcctcggcctcccaaagtgctcggattacaggagtgagccactccacccaggcttttttttaagacaagagttttactcttgtccccaggctggagtgcaatggcgcaatcttggctcactgcaacctccgcctcccaggttcaagcaattctcatgcctcagcctcccgagtagctggaattacaggcgcatgctaccatgtcaagttaatttttatatttttagtagagacggggtttcaacatgtttgccaggctggtctcaaactcctgacttcaagtgatccacccaccttggcctcccaaagtgctaggattacaggcgtgaggcatcgcacccggccacccaccctttttttctcccaagaaaaccagttttctgaaattttcagggggaaccaggacctcctcgcccatgtctttcacccctgggtgcctgtatcctgtattcaccaaagccccacgggcatctccccgattgaggtcccacccctcagggcctaggacagggggaccagggagggcccccagaggctggagtttggaatacccccttctcttctctggagctcagtttgcatgtctgtgaaatgacaggtgatgtcacctcccagaagggcagtttgagagaagtaaaatctattgaggcaccttggacacaggagggggtcagacggcatcagcctttgagggtgctgcagttacacggctccagcagtctgagccttatcaagacctttccagatatgagggaagtccatgcccagtgtctagctggctgggggagaagccccttgagaacccccactctgtaatgctaggctctgcatttgcttaggaggctgtgtccctgtctctccccttctgggccagccttgctttctgggcaggcccaggagtgtcccgggcccagcactcagagtcagcgctgtctttaatctgtattccacaggcatcctcaccccctcccctcccaggagctaggaacctgccaggcttcttacctctctgctggaatctccaccccccaccagaggctgccctcttggggaaggggcccagcccttgaggcctgtctcctccagactagctaaaccacagagagaactccatctcaggttcccaaataggcggtattcttccccgccaccaagctaggcagctcctggcggctggaatgccctgctcctttctcagcccaccacttcctccaaccttccgtcctctgtgctgcagcagggagtcttaccccacctccttcaggagggaggtgctcacgggttcctatgcctgtgggtctccaggattgggcacggagcagtctgcaaaatgtcaagtgagggagagatccagtcaaagccccaggggggcctctgagctcagtcagctcctctgctgctccccacctcttgggggaaggacaggctggggtttgcatgggtggccttttggagagcagagtaatgggagcctacttgaacttcctgcggcctcattccctgactgggg

SEQ ID NO: 1887219 - DNA, 4001 bp, Homo sapiens
cccccaacaccttttgggtgtctgtcctagggtgtctgcggtgtgtgccctgaaggaaggtaggcaagctggaggtggggagctatgtttttgttgttggttttggttttctttgagatggagtttctctcttgttgcccaagctagagtgcaatggcatgatctcagctcactgcaacctctgcctcccagattcaagtgattctcctgcctcagcctcccgagtagctgggatcacgagtgtgcgccaccatgcccggctaatttttgtatttttagtagaaacaggatttcaccatgttagccagactggtctcgaactcctgacatcaggtgatccgccctcggcctcccaaagtgttgggattacaggtgtgagccactgcgcccggcctggggagctgtttttttaagtgatgatgagggtagcaggcagaagatggctccgtggaaaattagatgagttcttgtcaaaagccgtgggttccctgagttagatccacccagcttctcacacctcacctggagtgagtgcgtttctgtggaggtgaggatctcagttttcaaatgtactgagaggcatagggtcctagaatgctatagatcatccgctcccgcctccttccttctatacgtggggaagctgagacccgagagagcaagcaacttctctgaggttacacagcaggacagggccccagccagcacccccactggtgccccacgctgtctctccatggaggcctgtctccagcttagaccagcaagatagccaggagcagccccgctgagggtactgcccgtgcagtgggctcagtacaggagccagggcccgagagccccctggaagccagctggctgtgctcggccagccccagcccacatttgtggatctgaagctgcttttatcagcatatcaccaccaggccggggccacaccaggctctttgagactacctggagtccttgtcaccacaggtacaggtcttgtgagtctagccagcctgagtgtaggactgaaccctctggtcagactgaatgggacattctctctggccaggtggagcaggcttgcacaaggacagtggtcccctcttggttccgggacctccgtgccatcctcacgccccagctttccaggttccctcattcttagagggacgacaatgccgacagtgtcccttacgggacagtttgcgcgtggttcaggagctgggctgcctttctcccctccctctctgtctacacttggtctggcgttttcagcctgactggcactgtgcccacacggcctaatgtagcccagcagagacactccttcaaagagggagcgggcagggagagctttttcgcttgtgccacacccagagacccagggagagattgcagggggcacttttccttgtgagcgagagacctggggctgtgctcaccagaacagggaggaggaaggttggactgaggctgaatttactggtgcaggaaaagtggggtttgttgctgagaagctctggccagcctcctccaggggctgcaaagtgggagagctgcagactcatgccgggtggaccccggcctccagcggggaaaagtgtcagttcccagcagcagcaggctgcggctgtggacagtgtcatagctttgcgcccagggcttccctagggggctgactggaagctgaatttgccagccaggcatggccagcctcacccagccccagggtctgacccaggggtactcacggtatcctgtcacacagtgagcagaagtaggaccgttggacgtggctgttctgcccccagagagctggagaggaaccccgggaccccctttgttttgcagttgatatcttgtcatttggagcgtaaacccgcgactgaaccttcatggcgcaggtgggggagctgaggggtcctgttctctaaagaggaggaggcgcattccagccggtccccaggtggtcttcccagcgggctatttaaagccaggccaaggagtgcctgacacttggtgcccaatataaccagcagccgtcaggtgactgtgtggcatgtgccccagccgctgctcctaagggaaccttagtgttcccagctgtggcgaggggaacatgggagctctgaggctggccacctctcctcccctttcccttcctaggtttggcaggaggaaggcagggaagcccaggagggctactgatgatcccatatttttcccgtctttctatctcaggttcacccaactccttccaaaaccacacttcccacctgcgaaccagggcaaccagtccctcccaaccccacgcttggtagtgcccacctgcgaaccagggcaaccagagtccctcccaaccccacgctcagtagtgccttggttggaggcttctcagggtcctcaggggttcctgagtggctgccagagcaagtggtggctccctctggccttaagagggagtgtagcccagctgccaccaggccctcctgctgcccaggctgcccagccagccctgcttggagccttcagagggtgtgccctggctgcagtagcggtcagcacaggggaaacactcagggcagagaaggctggcagagccggagggatgggaagcattcctttatgtggcatctcctggcacacggagccttgcaacaggcaggcatcccgcaggccagacagctgccacttggtcccgaagcttccctgtttcctcctcgcagagctgatactccaaccccaggcgcctcacgaggaagggctggcagcaggcggcgtgtttgagactgataagcgaggtgtgttggcagcgcggggccccagagggctgcttgctctgccctgttgtttcgtcatggtgggttttagtcacccttgccctgttgggcattatctcgtttgaggtccacctagaaggaggcataactgacacttgtgggagatttgcagggtcctgtgcctgagcagccgggggggatgcccctatttgtggcactgagcctttgggtgactcccctttttgccctggctccaactggaagtagaaagtggtgcttgaacccctggcaggccctgctcctgtagccacccagggcgggaggaagcgctttctgctgctggtgttagaaacagtaggcgctctttctgcagctacagaagctggctgttcattcaccctccgtcctggttcagggactgtgttggagagaccctgtccactcgtgtcctgtggatgcaggacagggatccccacctgcctgcctggggcgtcttgtgagtgacagccactggggtctccaggctcaccgctgtgccccgaccccgacctggcctgactcttccctactgtgcgcctcccaacaccgcaggagcttgtctccccagacaccagccccagccgaagcccccagcctctgctgagctgagaacacttgggctagtccttggtttccacatttccctgggtcattgtttttgtttctcactagatgccagcttgtttgctttgaggaaaacatatggggggtggtggctttaacgctggcttgaggacagggcggcaggaggagtaggcagcctcggctcacgggccctgcccaggagggctgctctcagtgttccccaaagaaccaaacagccgggtcctgcttccttaggggtggtgtcatgtcagcctgtgcatcacggtggcacagcagaggtcccggttgccagcgtggtccctcccagcctcacttctgtgaccttctgcccacctgagcctgagttgaaagtcagtcctccaggttcctggtttggtgttcaaggctcatcaccagagggagatctaggagtttatggggttctagatgggcccagggaggaggacccaggctgagccgtgagctgagaacaccagcagtgagtgggccaagcccctgaaaggacacagatgggcagagtcctgctgcatcctgggggcgccgcatgctggctgggcagaccctgcgctgacctcgacagggctc

SEQ ID NO: 1887220 - DNA, 4001 bp, Homo sapiens
aggtgatccatctgcttcggcctcccaaagtgctgggattacaggcatgagataaatatccaggcccagccagggtatttattaatagtagcattcaccagatgccaggaacaccatcgctccccagttcagaactgccagtctaactcagtaactgcttgtataactttgggcaaaagaactctttacgcctcacttttacttactcagcagcagagtggggaaaaaaatttacctcatatggggttgatattagaaatactatttatggccaggcaaggtggctcacgcctgtaatcccagcacagatcaccttaagtcgggagttcaagaccagcctgaccaacatggagaaaccccgtctctactaaaaacacaaaattagctaggcgtggtggtgcatgcctgtaatcccagctacttgggaggctgaggcaggagactagcttgaacccaggaggcagaggttgcgctgagccaagatcgcaccatcgcactccagcctgggcaacaagagcaaaactctgtctcaaaacaaacaaacaaaaaatgctctttatgagagtgcttggcaaggaccctatcaaaaggaattccatactacttccattatctgggcaatcgtaaccctggaagaccaacacatccccaaaactaacaaaccaatacttaaagaggaccataagcatattcaagtctatgaaagtactaaaaatctcaccatttacagaaatttcatcatgaagatccttacacttaacaccttaaggtgatgagttttcacatgactgttttcaaggccacagccaccacctttaatctaaaagagaaggataacaggcttcattctaacagaaaccaccttaaggtttattctccagatttgtattaaacagctgagcctcagcaagtcagacctcctcacaaaagataccatttcagacagggataactttaaatcatcctcagctcagccaataacaaagattcctaaatcctagcgatccaaaattcatttgccatgtctctttcatccctgcatgccctaacgaggatccacgctggttacaatgacacctagtggccccaaatcacacgggcaaagacgctactcatttttatcattaaaataattagcattctgaattttgagtaatttcttaccatagctggcttgtatgtcaacacgtattctcatacttgaacttcagaataaagcaggaggtgaatgtatgtgatggcaccaactgtgctttctcatttctagtgaccactcaggccctgcctgcacccactcttactcatgttaagggctccatctattactctgatccttcaacctggagctctgcttttcaccgtctctgcagatgccaaacaaagaaaggcctctgggggaggaaaaaaggctcgttgttaaaactacggctttccagaagtttacaatcctattgactcctatctgtaaagctaaatatgaactaccgattggggccgtcctcaagacactccaagcggaatcacgtcttcacacgttaacactcctgatgctgaattaagaaccaccatcgtcagagtctgcccgtgcgcgggcaccgaagacccctgggcatgacgctcagcacacgcgcggcggaggcgcacggggctgcccaggttgttaggcgctctcccccgcagaagccggccctatgacgccgaggacgggcttgagctctctcccttcacatagtaacattttctcaacgtttggaaagcattttctcatccagtacttttaaccctcctaaccaccctatgagggagaaaccgagattatcgtcaccacttcgtctctgaggaagggaagccaagtatgttagtgtcgtgtcaaggaagaccccgttttcccacccaggcagccttaccatcatcactaaaggcctgagactgctcgccgtgctcaacaccgactggagtggccatgtcttccagccacgcggccgacctcgaaaagaacgcgagaccgcccctgcgcgcaagtcttctcggcaatctctccggaactctcgcgatgttgagaaagggctggtgggaaatgtagttcaaaactacggcggctgggggctggccgcgtcctcagcgcgaccctggagctgggggtaagatggtggccgccaccaggggcagtggagggtccggagtgggaaaccaggcctgtgaagaaccacggctgtcagaaaacgaagctggaggttcacttctgccagaaagtcattgagcttcaacacagtttgtccctggtcgagactggggaagcacagaaagttcgagggggcagggacagatgaggaaaccggggcttggccgagtatctttgttaattgctctgcggattttatttgggggaggataggggcatttggggtggttcgctgggttagtgaagaggagagattccgagggaatcgttcaacctcctgctcaggtgtttttaagtttggggcgaggccggtgaagccgaggcgcgggcggcaaggagcgctggagagcgacggggctcggcctccgcggctgcccaggggcccggggcattccgagaagagaaaaaaaggcaagtgtcacgagctgaattacgaaaagaacggagaatgatgtaacacccactgctcttctgagtgttatttttcaggcaaacaccttggcttcatttttttttgtttctgggtttttttggtttgtttttgagataaggtttcaccctggcacgcaggctggagtgcagtggtgcaatcataacttattgtagcctggacctcccgggctcaagtgatcctcccgcctcagcctcctgagtggccgggacgacaggcgagcgccaccacgcccagctgattatttttattttgcagagatgaggtctcactatgttgcccgggttggtctcaaactcctggcctcaagcagtcctcctgttttggcctcccaaagtgctgggattacaaaggtgagccactgcgcccggtctggcttcgtttttgaaataaaaataaggcaaaaacgacatcaacaatcagggccagaatttgcacctatttgaaagctagtttaagtttgcaagaccgagagccttttctccattccagtctccctgttctcatccacccattaacagtgatctctgtggccttcggtgtgggttatattgtcctgcagatggtaatatgttgcagatacttatcttcaaattaccacatttgcttatgtttacctcctttcatttgattgtaagctcttcaagagcagaagtctctttttattattattattatttttttttttttttttttttgagatggacttttgctcttgttgcccaggctggaatgcaatggcacgatctcggctcacggcaacctccgcctcccaagctcaagtgattctcctgcctcagcctcctgagtagctgggattacaggcatgcgccaccacgcccagctaattttgtatttttagtagagatggggtttctccatgttaggctgttctcaaactcctgacctcaggtgatccacccgtctcagcctcccaaagtgctgggattacaggcgtgagccaccacgcccagcctctttttatttttatttttttctttttaatttcttaacagtgcagggtttggtatttacctgctatgctcacagtaagtcttcagcaaataatcattaattcattcagcagtaattctggccattaggtttctctaccttacccttgaagacacgttattttgtgtaatactgaaaggaagaatgtgttctatccctgcaaacatagttcctttcatttgagacttacagtgggaattctaagtgtggaatttcccaaaagctgctagcgggctggtgacctactgtagacaagatagtaatgatagctaatacttcatagcacttaccaggtgccattccctatactggtttctgtacatgtatgaactcgtttaatcctcacaatgcgat

SEQ ID NO: 1887221 - DNA, 4001 bp, Homo sapiens; identical to SEQ ID NO: 1244657

SEQ ID NO: 1887222 - DNA, 4001 bp, Homo sapiens
tgaattcctgggcccaagcaccaggctttgttttacttttaatgaactgttttctagtgtcctaagtaacttttatacccatctgtactaaagtgaaaaagacgcttttcccaactttcaaaatgaagtatcactacacagtgaaatataatgcttgtgaagaactattgtagagtcagacacacctggattcacaatcttcactgatactagcatggggtccttacacagaatttttatgacaggaagactacacaaaaaatagataagtctaaccaagttagtaatgggacacacatgaggtagccaatacttactgactgaccctcctctactcataaaccatttaatcctcacaaattcttcaagtagacctggtccttttgcatatttctgtgcttgttatttattgatattaagttccaaggggaggggatgtattcatttagcagaaacaaggaccaaaaaagacattaacagaattggaaactcacaactagttttaaaactgaagtgttcggagctctggtctgtcccaccactgactgagaccaacaatccaccctcctgccatctcatctacaaagtgaaggccatttgctctgctcttctctgacagctccctgggccaccaatcagacccaggaagtgttctgagaagaggaaaaagcccatgcaattgctgaatcacaatcacagtgctacccagccctcaaatggatattaatggtgaacaaaaaacaatttctaacccaaaggctaaaaatctactggacagcatcgtggggtggatacaggaataggagtaactgtaatacagggctgacaaatcaacatcacatttgtaaatcaagggatggccaggaactctttagaagagcaagacatcccagggtagagacagattaggcaggcacaggaaaaaagtgcaagcgctgaagttaaaatgcaccaaacaccagaagttctaaagccagacaggacacaagctgcaagtattttgaggcctccccctttaaatcatacacctgacaggaaaaattttgagtggggagcctgagattaagtaatgagcaattagccgggtgtggtggtgcacacctatgatcccagctactcgggaggctgaggcaggacaatctcttgagcccgggaggtggaggttgcagtgaacagatatgtgccactgcactccagcctgggcaacaagtgagactccatctcaaaaacaaataataaaataagcaacgggcagcttgttttcgttttgtaatatatttttttttgagagcccaggaggcggaggttgcagtgagccaagatcgtgccattgcactccagtatgggctgggcgacagagagagactccatctcaaaaaacaaaacaaaacaaaacaaaaacaacaacaaaaaaacaactaaggtatggaagtgacaagatgatggtcccccctccaacacaatatgagcaaaaacttaagatacttatctcacactgcctctcaatggaaaacaaacttgaggccttgaaaactgatccattttccaataaaggaaagcgtccccccactactcatcagtattaaggtgggctcagtgtttactcacccttttttctgagctctggtttgcctttcttgactgtggccatcaccatgtcacccacaccagcagcgggaagtctgttcagccgtcccttgatccccttcacggagatgatatacaggtttttggctcctacaaaagaatgtaaataaaaataaaaaatgttgagggccatcaggccgttccatcagtataacatttcccaaacacttccaaagcccctccctccactcactgcccaagcagttagtccgcaagaacgccttgtcacaccaccgattgaagcaaacaacacatgttgccacttcacccaaaagcgatgttttcactctcccctttcttgacggctcaataggtcattagccacaggcccattgagtgcttttaaaagggggagtatagcaacgtgcaaagacctcacctgtgttgtcagcacaattgattacagctcctaccggaagacccaaggaaatccggaatttcgcaccagaggacccaccacgtcctgtggatataaagggaagggaaacaggataaagagatcacaatctagacatggttcggagttccccctcatactcaagctgtaattcaccgcacatgctttgatagactgtacgctatagattagctcgctcggattttacttatgccgtccccatgtgccacccgattctcacggaaagtagcctatttcttactattaacactctgacatcgaaattaagaaacctagacgactcaacccttgctctaactttcgcaaaacgcaattactcctgcaaggcataaaaccgcagaggtcgcgcaaaccagggcctaatccagtctaacttcaaccccattacgatagccctattcgcggagcgatctcgcggtatccagactacattcacgtcgggatcctgccatctcaactctccagcaccccactgccactttcgagggccctggcagtgctctcgcggtggcctggctctctctctccggcctgaaggagagcaaagcgccccagctgcctagggccaccgctcctgacgaatccgccagccactgcacgacagatggtggaggatcctccagaaacaaaacctcacctcgcttcgacatcttgaacgccggaaaaaagaaaaaaggaagtcgattcaaaggacactgggatatgaactttaacgccccgcccaccctcctcacgtggccggagcaaaaaccggcctcttccgcctctgggcgctgccttattacgtaataagtttacgacgtcgcttttagccctctctgcgaagtgggagttgaggtagaagcgcaagagataggaagtatcttctctacgagcttaagagtagttagggacatggaaacagtgatttgttaacttgctcacgacctcttttgaccacttaatagtgccaggcacttatctgcacactagagaataggaattaaaacacggtttgtgccgtgtgggggttccccaaggaacaaagaaagtgggggagggagggagaacaagctctaaacggtttcgttgaatgtaatacagttgagaagtgctgcagatcattccatctatgtgttcttggtatcataccattctgtattttacatatacagtattgctctatttattgacccgtcccccccaacacacactctttttttctttttttgagaccgagtctcactctgtcgcccaggctggagtatagtggcgagatctcagctcactgcaacctccgtcttccgggttcaagcaattctctgtctcagcctcagagtacctgagaccacaggcgcccgccacaacgctgggctaatttttgtatttttagtagagacggggtttcgccatgttattggccaggctggtctcgaacttctgatctcaagtgatctgcccgccttggtccctcaaagtgctgggattacaggcgtgagcccccgcgccaggcctaattgctcctttcacagcttcagccgccccttattctctgggttctttccttcccacgatacattaattcacatacttattgagctcctactttacagcaggttctgtccagggcgtacagcggattacatcagagaacaaaatagatcaacattcttttccttatggagcttacattctgctggggtgcaggtggaggaggatattagacactaaacaaaagatataataagtaattgcagtatgtagtatgttagatggggatatgtattataaaaatataaatagtatcgcttctcggccttttggccaagatcaagtgtaaaatataaatagtggccgggccttgtggctcacgcttgtaatcccagcactttgggaggccgaggcgggtggatcacgaggtcaggagatcgagactagcctggccaacacagggaaa

SEQ ID NO: 1887223 - DNA, 4001 bp, Homo sapiens
atcagattaaattctatatgtatcaaagagttaaacacaagaaataaaaccatgtagtagggaaagctggtgactattttcataatcttagagtgggaagggccttaaacataacataagccataaagaagttatagaggaaaactttaattttaatagcatgaaaaagtatctgtcaaaaattatactaaagagagtaaaaagacaaataacttacaatgcatttgatagaaaaaggctaatttccttaatataaaaggaactttttataaaccaaaagacaggaaatgcaatatacatatggacaaagaacccgactaggcagattcacaaaaacaaatataaatggacaagaagagacggtttccttctctcattatcaaagaaatgcaaattaaaatgaggtaacacctgttacccatctgattggcaaaaagtaagtttgacaaaactgaatgtcagtaagaatgtgaaaaagaatgcctcagaccttgctggtggtagttgtcacaactcttcagaaagtctggcattttgaaaactaaaaattgcatgtactatttcatccaataatttctcttgtgggaatgtattcaacaggcattctcataaatatacaagaatatctgtataaagatcctcactgaagatttacaacagcaaaaaatggtaaacaaatgaccatcaatagaggattgataggtacattaatttatatttgtaaaatgaaatagtatgcattggttaaaaggaatgaggcagatgtatgtctactggtccaggaaatgtctaaaacagtgctgagtgggccgggtgcggtggcttaagcctgtcatcccagcaccttaggaggctgaggtgggtggatcatcttgaggtcaggagatccagaccagcctggacaacatggtgaaatcctgtctctactaaaagcacaggggcatggtggtgggggcctataatcccagctactcaggaggctgaggcaggagaattgcttgaacctgggaggtggagattgcagtaagccaagatcgcaccactgcactccagcctgggtgacagggcaaggctctgtctcagaaagaaaataaattaaataaataaataaataaataaaaaataaccactgaaaaatttaacttatttttaggctaggtaagtgtctcatgcctgtaatccacatgctttgggaggccaagacaggaagatcacttaagcccagcagtttgagaccagcctgggtaacacagggagtccctgtctctacaagaaaaattaaaataaaaaaattgtagtttgcccgggcacggtagcttacacctgtaatcctagcactttgggaggctgagatgggtagatcacctgaggtcaggagtttgagatgagcctggtcaatacggtaaaaccccatctctactaaaaacacaaaaattagccaggtgtggtggcttgtgcctgtagtcccagctactcaggaggctgaggcaggagaatcacttgaaccctggaggcggaggttgcagtgagccgagatcgtgccactgcattctagcctgggagacagagcgagactccgtctcaaaaaaggaaaaaaaaattgtattttcatgtggtgtggtggcatgtaccagcagtcccagctacttgggagggtaagtggggaggactgcttcagggcaggattcatgtctgccccaaactatgattcccactgcactccagtgtggttgagcgagaccttgccttcttgaaaaggaaaaaaaaaaagaagttattttttatatgaagaatagccaacttaagtgtttaaaatccttcgttagaataacatattaccaaaccaaaacaatttattgtttttactgcttctatgtgggatggttgatcttgagcctgcggagagcaagctggccccagatttctccaagtccacatttctttgcctccaattcttacatgtccaaagacaaggaactatagacatgcctttgtaggagggtaaatacattatttttaaatgtttcttactgttttttaaataagtttttttttttttttgagacggagtatcactcttgtcgcccaggctggagtgcaatggtgccatcttggctcaccgcaacctccaactcccgggttcaagtgattctcctgcctcagcctcccaggtagctgagattacaggcatatgccaccacacctggctaattttgtatttttagtagagacggggtttctccatgttggtcaggctggtcttgaactcccgacctcaggtgatccacccgcctcagcctctcaaagtgttgggattacaggcatgagccaccgcacccagcataagtattatttttaaagagggactaccatgggattctctgggaatattttttcactaatctgtattctcttattccccccgctttttttttttgggacagagttttgcttgttgcccagactggagtgcagtggcgcgatctcagctcactgcaacgtccgcctcctgggttcaaacagttctcctgcctcagcctcccatgtatctgggattacaggcacgcaccactatgcctggatgattttgtgtttttagtagagacagggtttcaccatgttggctgggctggtctcaaactcctgacctcaagtgatcctcccgcctcggcctcccaaagtgctgggattacaggcgtgagtcaccatgcctggcctgttctcttattcttaagagatgattaagggggcaacctatattatcagccccttcctgttgtctcccatcaaggctgaggaaattcttggaaaagggaagggtcataatgaagaatcaggaatttaagataaattaaaattctgtcgtgtagatttatggatctagaaatctactaaatgagagactccccatttctagctgcagtggtttggttttatgaggaagggattcctacggcctaggaaacaagaagtcagctcttgaatgcaggtgctgaccttgaatacaactttttttcacagatttttcccagcaccaaatcaaagtaaaaaaataatctcacctggttcaaggtaggtgggtgtattccaggaagagtcatagtagcattttcgctacacttcaggtacaggaaatacaaatacttaagaaacagctgggtgggaaaaaaaatggatagtttatcattttgatagaaaaaatttctattatataaacccatcacgaagattgaaaaaaatgttcaatttatacatcaaacaaatacgccagacatctggagacataaaaatgaataaaatgcagtccctcccattaatgaggagctcatctggtttgggggtagtggtggtgataagctcattgtttgtaaataataggtagagagaacccttctgtctgcaattctttttagtgtttattcatttataacttaggaagcttaacttggccttcaagtttggcacaaggaatatgccatggtctatcaccctagtatcgctctagttttctcagcacaattttttgccattagagctgggcaacctcttattcacatgaaagaatttcataacctttagaatgccctaacagctggttagagttaaatagcaatatttaaaccagaagtaaaattctatacaacttgtatgaacacttaccgtgatatgctgtgctgggatgtctttcaaatgaggcagaagaaatgtctcgctatatgctgaatgaagaattgcattacttaggactaaaggaaaatcgtacttcaacaaatagaagctattctattgaacttatgagtaacttcctttgtcaatgttagttttctaaatttatacaaaagttttacatctctaaaagagctctatcaccaaacactctcctaatcattggagatcatgtggaatactttaattggtatttattcagaatactgatcttcagaattgatagagcttctgtgttagtatagcttcttcttttttttttttttaaatctgat

SEQ ID NO: 1887224 - DNA, 4001 bp, Homo sapiens
ttggagaaccgaattactcacacaggtatctccggttaagcatatcaaacacacggccaggggtacccacgatgatgtggggagcttccatctgcagtttctgcacctcagcacgcacgttggtgcccccgatacaggcgtgacaggaggcgcccatgtagtctcctagtgccatgaccaccttctgtatctgagcagagagaggcaggtgctcatatgtcagttaccactgtgcccggcaccattcttaaatgtttttcatgtattgattcctaaccaacaactttggggcatgcactattattaaactcacattcagctgagaaacaggcagaggctaaaatccacttaagatcgtgctgtcaataggtggcaaagacaggatttcaactcagtctggttcctgagtgtacagtgattcacaatgaggccgctcagataattaattcagtttctttactctagatatttagaacccttaaccttctgaaaactaatttgaccaactgcctcatcacgcagcaaccattttttttttctttttttgagacagagctttgctcgttgcccaggctggagtgcaatggcacaatctcagctcactgcaacctccacctcctgggttaaattctcctgcctgagcttcccgagtagctgggataaaaggcacacgccaccatgcctggctaatttttgtatttttagtagaagcggggtttcactatgttggccaggctggtctccaactcctgatctcaagagatctgcctgccttggcctcccaaagtgttgggattatacgagttgagccaccacacccagccagcaaccagttttatagaacaggtgatgcatatccatgtcctattgcactcctgccataggacccaagctacgaggcatgttcactctgagaaaactgagagccaagtgccttagaatggagctctgctgtaacttcttacattatccacacccagaataatcactgcccctgccacagaacatttaaaaacatgctctgacatcagtgttgcagcatgacccaggaaaaagtccagcattagaattgtgtgtgccccaggcatgaaacagctctggctattaagcaagggtgaaaaggactgtccatctgctctgactactgtaagatcacccccacaccaagggatctcttagcccatagtgaaggtgcttattcagaacacagtcaaacttgcccagccagccaggcttcacccaacagctttcccatttgactcaggaaatgggtggaggaagcaatggttacgtttgggtaagaaatagcttttaattaacccagcaggtctcgagagtgttagggcacccatgtcttcctcccaaggtggtgatcagagaagacttctctggtccttggattatactcatcatccctaaatcagccctgaaggagggaatagaagccactcttacctgctgagccaattctcgagtgggtgctaggaccaaggcctgggtggcttttagatctaattcaatctgctgcagaatcgatatggcaaatgtggccgttttcccagtcccagattgggcttgagcaatcacatcataacctaaacaaataaattaggagttgaatgtggtaaagagcataccctttgggatattcaagtcctaggttaatgaggtcaataagcaaccaatgaaccaagcatttcatggctcacaaactaccttcccaatcaacacagttacacaatgggaaccagatcagaaacaaggaccagttattaactcatctagtattgcacaccaagctggactagaaacatggctgtagatgcaaatataagctggctacaataccacctctttaaaggaaacctatgtgtccaaggcatgaaccaggcatgggcacggatcaaaagccaagctgggatgaacaaggagttgctttgtccctggctgatatgagatgggcatcaccaaccagatgccactctacccaggtcagggacagtccacaatgtcttctgggactgagaggtctcacccttgatacaaggtagaatggctcgctgctggatggcagagggcttctcaaaaccatacgcgtagatgccacggagaagggactccgagaggttcatgtcatcaaagctgtcaacaatctcattccagttactctaggggatgcaaagaaattaaagcttgagtcatggaaaaggtggagctgagctgtagtctccgagcaaacagaatctggtgcctactaacaaaagcctcagagcttacaaccctcctccctttagggaaaccagctgcttctagatgatctgggaaatcaatcaagaggccactctaactctatacggctgaaagttgtaatgggggaggacagaattccatttctccagtctcacctcgatgacgccttcgggctccatcccatcggggccattgtctctggatctgttggtttaaagcataagttttgtcccctgcccgaccgaagcactcagaaatcctgacagccgggctctgtcaggagtggcctgcatgatgccatcaatctgctgtcccagatccaactcccaccagctcccaaaaaatacccaaaggaggagtttctataaaactgaggcatttgccccatgcaggcagcggctcaggccaggccacccccgacataagggggtgaccctttctgaagacaggccggcaggcgtgccgccgcgctcacggtgcccagaggtggtgcttgccgccgggtccacgtgggcccgacccagccgcttaaagcccaagcgcgtgcacctcccaccgcagcaccagcgcgctggaagtcccgcccttcacctcccagatcggagggtaggacatccccttccccccacgtcatcccgcccgcgccctcccccactccctccagccgaagcccccccctcgcgttgcccggatgtgggaggccgcgggcggtggcggcctcgcgcacaatgagcccaagccgagctagcaaagggggagattgcacaacacttagaagcgaagcagactgggggaggggaacgcctcaggccaccatgtgctcgctccctcgaccacccggcggcgtctcccacccctccatgaacaatccacatcccgcccgcccccgtcgcgaagtagcgtcgccctcccatacctcaggccgctcacccccgaaggaaggtggacctgcccatccgcagtttgccaatagcccggcttgtgcggcaaaatggacccgcccgcccggcgccgggtgggctcctggtgcctcacgcggccgctcctcggggttaggctcagtcctggccgtcaagaaaaccagcacactgaacggccggtttcttctccccgacccgtgttttagccgcgacgaagtgactggatctaaggaccaggcacccccgcctctcgcgagtggtaccgtcagaatgctccggaaccccgcgcgccgtccctcccccggcacagggaggcaaccggacctgccggctctgggccacacatagtggcggccgcctccacctttctttcccacgccaggtcgcgaccccgtctcgccactcagcgccggggcttcgcgcatggcaccgcctcgggtcgaggcctcgtaacagacctcgcacgcctgaccctagccgggctgtccctaccctccgcctcgacctggtggccgcgtcggccgtgggtcttccccctcgcccctccaagtcggaccctccccccacccggttcggtttctcccgcaaccctggtgggcctctcagctacccccggcgggcccgtcggaagggggcggcaaaataagcagccacaatctcttgcaaatgcctttcttaccgggaatcctggctcgcagacatgatccttagaaactagggcggagtgcccgcctatcgacaacttatagagcgcccgactccgccccggccatcgcattggtttggccgccccggccccgcctgccggcgctcagcaactcggcatgacgt

SEQ ID NO: 1887225 - DNA, 4001 bp, Homo sapiens
aactccttctcaaaataaataaataaaataaaataaatagggacagggtctcactctgtccctcaggctggagtgcagtggcacaatcatagttcactacagcctcgacctcctgggctcaaacgatcctgcaacctcagcctctcaagtagctgggatcacaggcatgcgcctccacacatggcatagtgtctgttctgaaagaccatcaagggatccagcttagaagacaggagtggcactaaaggaactgcagggaaacaaccctgtattgtggttagggatcaggattctgaagccagattgcttgggctcaaatcccagcacagccactttatcagctgcatcaccctgagcaagttacttaccctctcaaaacctccagagttttatctgtaaaaggagttgaatcatagaacctatctcattgggctattgtgggaacttaatgagtccatacatgctaactgcttagaagaagcatgtaggaattgctcaataaagatttaccattactattatttataaagttaccacttgaaaaattaatattaataaggaaaaaggagtcatcacttgttgaaacatgaacattgccttaggatcaggatgactatggaccagcttaaagaaaatctgatacacagattgagaaataaaaaagtaatagaagactgagtctctgcctataaattcacaagtagggacaaacagagatcgcctgacaaattatttattcattacaaagggaaaggtagtaacttgacaggagaaacctggcaggtaccaccttaaccaagcaatcaaagttaatactggcagggtgcaatggctgtgcctgtaatcccagcactttggaaggccaaggtggaatgattgcttgagcccaggagtttgagaccagcctgggcaacataacaagaccaaattttttttaaaaattagctgggagtggtggtgcatgcctgtagtcccagctactcaggaggctgaggtgggaggattgcttgagtccaggaggtcaagactgtagtaagccaagatcaggccgctgtcaccagaacaagacactgtcttaaaaaaaaaaaaataagtaaaataaaaacaaccaccaacaagtaaaaagtagtatcaccaacactgagacagatcaacatcatgtgcctcctgatatggtgcactaagaaggacacagcatcacttctctagctttcctgcccaaaacggacaatctaaatttatttataaggaaacatcagctgcaccacactgagtgaacttctacagataacggcctatgttcttcaaaaatgccaaggtcaagaaagacgaaggaacaatgaagatctgttccagattaaaggacactaaagagatatgacgctaggggaaaattagtgataagggacattaccagaacaattggtattgttttgaattgactgtattgatatagtatttgaacatggactgtgtagatagaccagacagaataaatgtgacaaaactggtgaacctgaggaaagggcatacatctttcttttgattaagaaatacaagtgtaaattcttacaagcctattggaaagcatatggaaatatattcaaaagacataaaatcgtacctttgtttcacttttatgaatctttttttttttttttttggagggaaagtataacttttatttacaaataattattgagcatgctagatgctactagaacaaaagttacagtttccactgttaaggagaaacaatggagaaaccagcgtgagctccagtgctttcttcgatttggtgcactgaagaatcccattttgggagcagaaaaaccctgtgtgttgtgttagctgttccttatcaccaacgagagtaagtattgttaccctcactacatctacgggtaactgaggcacaaacgttgtgaggcagttaatgttcccagggtcacccatgggccagctgggagggcagcatcgccccgtgaacataccctgggcccacttttatgaatcttaaagaaataatcagacaagtatatgaagatattttttcctaggatgttccttgaagagttgttaatattgaaacattggaaataaactattcaaccataggaaattgattttaaaagtatatcacatatagtggaatcctatataccattaagcattttgacttagatatagttaatgaatttactcaaatataaaatgtaaataaaatattaaaagtgaagtaaaaaatccatgttaaaaaactctgccaaggatagaaaaacaaaaacaaaaaacataggtctgcaagagaataattcttaaacaaaacagaaaatgtgtactctatgttttaaaacataaccaatatcagagggaaaaaatctaagtgttaatactgcaaaaaatgccaagcatatctgctggcttgagtttctccccacattataaactccctttgtttttaattttacatttctaaaatggtacttgcttccttcagaatctccagttgatgttttcaggaaaataaagccaaagaaaagcctcctaatgactagtgttctctatgatcaaaatttcctcccttttaaggctgaataatactccactgtatgcatagaacccatttcatttacccgcagacacataggttgcttccaccttttgtctactgtcaataatgctcctgtgaacacagttaacaagtcaggcgcggtggctcacgcctgtaatcccaacactttgagaggccaaggcgggtagatcgcctgaggtcaggagttcaagaccagctgaccaacatggtgaaaccctgtctctactgaaaatacaaaattagctgggcgtggtggcaggcacctgtaatctcagctacttgggaggctgaggcagaagaaatgcttgaacccgggaggcggaggttgcagtgagccgagatcacaccattgcactccagccagggcaacaagagtgggactccatctcaaaaaaaaaaaaaaaatccctttaagaccctgctttcagttgttttggggatctaccttgcagtagccacactgtgttttcagaggcttcagaaccaggcaggagcgggcatagtgacacaggcagcttgatgtttatggtcatacacccagcctcatccctctgctatgccacccacctggcccctcaaggcatttgtgttgtgacaactgaaaaagattctaaaagtatggaaacaaaatcaaatctttcaagggaagattcagctgggagctgcgttaggagatggagaaccagcagatcatgtgcagtttctctccagccccccttcagttcctagggaagatccagctgtagcagaggtaccctcccaggctcaaggatgggatttgacttttgtccatcatttcacaaatgattcatgtacgaatgcctgtgctcatccatagactctttcagataccaagcaaggaaaacgcctggcacctccccatgatcggctcccctgcttaccatgtacacaatgatggccagttcatacacgatggactgagcgcccagctccaccatgccgaggatgcctggtgaagaaagacagctgtcgccttgcacccagacagggcccccaggttcccaccagtccccgtcatccatcctcatacagaccactgaggaagctcccgacctcataggcccaccactccatgcacagcatgagcatgctggggatggccaggcggaggaaggaggcccagtcctgcaggcactcgagggaccagcctgtgggggggacacacacatttccaggagatctggccatcgggctggaactcaacctgagacaaaacccacatcccagttggaagacaaaagggcagtcattacctccccatgtagcttgatgcagttttttcccgaggatgtagagaaagaggagtagagccagggtgtactgggaaatcaagtttgccagtgcagagcctctggaaagaacagtcccaatgagagggaggtac

SEQ ID NO: 1887226 - DNA, 4001 bp, Homo sapiens; identical to SEQ ID NO: 1887225

SEQ ID NO: 1887227 - DNA, 4001 bp, Homo sapiens
ggttgtcctgtgagtggtggttttgtggctcttggtagtcctgtggctggttgttccagtgctctctgtaaccgtgggtgtcaccgtgaaggatggcagcaaagtagctgattttttgtgaggacagtcattccctgtcccctgggcttttggcagagaggagatggttagcaacccagggcaggctccctcccaggggccccctcccctcagcctccttcctccttacctgccagtagccccagcagggcccccgagaaaagcacagccagcctcatggctgaaccgcctcacccaaagtccagctaggctgtctgcaccagttgctcaaccctgctccctcagccctctcttggaaaggaggaaatgaaagtctcacttcctgtactggagatgatcccacccacagcctgactcaggggcctcagctctagccacctctctcttagtcattagtttttgtaattaagttaggggactgttggccctgcttcatcagggcaaagtcaacagtgtcacatgggtgcaaacggagtcctagggcagttgatccacagggatccatgtgtcaaactcagcgaaacttgcttggcagttgtggcaagtagctatgggaacagctgaggtacaggcccctcccttggtggggaaatcggtttccactcctttcccctggacctctgggctgacccctgtactacttcctcttggctgaggcatgtgaggggcttgtgaccatccacacccagccctttacagaggggcagcactccagtcagcattgtcattcacagagccgagaacatggctttccagcgtctgagaactcagatggtgacaagaaagcaacagcccaaaggtaaccatctgctggggaaggggggagcagagatgcacccagtagcaggtgggagagggaaggggaggtaagaaatgagaagcccaaacaggcagtttccaagtcattttattcagaattttgtgtttgtttcctgaatcaataaatactatacaaaacaatgtaaaaatggctaccattttctctcccctgcttccccccacctggggacaaccccctgggcaacctcacttaggggttttaggggttctccctccagatttggtccagcaaatgaggctgagtgacatagtcccttgaatcactttcaaaggagctcagctgaggtgaggagagcctctgggatctggaggttactaggttagggaaatggattagtgttttttttttttttttgggagaagagccggcgcctggggcaagagcctaccccaaagaaaagggtgtctaaaatgttcacggttccttcttttgcctcaaaaagtgacatttattcaaagaaaaaaaatgacaagatgtccatcccttggctcccttccctcccccctcctgctgctcctcagcccccagagattgagccctggctggggctgggtggcaggacagcccctcagatgaggtcagcaacattgaggggcatttcctcaatggaggtgttgtagaaggtctcaatgtctcgaagagtcctcttgtcttcttctgtcaccatgttaatagccacacctttacggccaaaccgtccacctcgaccgattctggaaaacaaggaaggggatgaggaatatcaggagctttaagcccagggagggccaggtgtgaaggggtaggggagtgttccagatctacgcttacctgtggatatagttttccctgttggtgggaaggtcatagttgatgactaaagaaacctgctgcacatcaatgcctctggcctacgtcaagaaagacaactcttcagcatgtgcacggaggacactctatcccggagggaagacacttaggcatccatgtgggcagccaaggaaggcagaggaaataagcatcccagttccccaaaggccttaggcatgccagattctattccaagctgctactttcctgagaggcactgatgtccccttggagagggaatcaccttggatcctcccttctgcctttgctatcagttccctctactcaccagcaggtcagtggtaatcaaaactctgctagagccagaacgaaactccctcataatcacgtctcgttccttttggtccatatctccatgctggaagagaaaacaaatatgcagcagaccaggtaggcacctgggttccaggaaccctggcttcaagtaggacacttctgacgggcagacccacaacaggctggcagcgggcaaacacaccatggcggatacagtgaaatctcgagcatgcatcttctcggtgagccagtccaccttcctccgggtgttgatgaagatgactgcctgggtgatggtcagggtttcatacaagtcacatagtgtgtccagcttccactcctggaggttgggggacaaaaatcagtcaggggctatacccaacaactcactaccaggcccgcctcctgcactgggccccacctctcgttccacgttgatgtagaactggcggataccctccagggtcaactcttccttcttgacaagaatccgaatggggtccctcatgaacttcttggtcacctcaagcacatcagaaggcattgtggctgacagcaaaactacctagtggaaaaaaaggccagtcttagagtgctggttccttcctgaggcctgctcccttccctagccacacctaaaactgaagcagatgcataaaaaggctcaagaatccagtatatggttcccctggcacttactatttttcaagaatcattagctattcaagcaagactgccctcacctgggtgttgctgttgagcttttggaatatgtcatagatctggtccttgaatccacggcttaacatttcgtcagcttcatccagtacaaacatcttgatgtatttgggggctagagaagaaaaaaaaagccaatatatagcatatgattagggaaatgtgggagagatatatccaacttcgctgataaaaaacagagaggagccaagtagtctgctctcagagtacaaagactgatcctttgcccaggaccttcccgccaggcagacaacagccctgggaagtaggacactgccagggctgcactggcagggaagccagaggctcagatgacacgcatgggctccatcacagagcagctcttcccccagagagaaaccagcatccttgggaatgactctggcttacgctgaaagactggaaagcgtgcacaagagcaaagtgacccaggggattggagaaccgaattactcacacaggtatctccggttaagcatatcaaacacacggccaggggtacccacgatgatgtggggagcttccatctgcagtttctgcacctcagcacgcacgttggtgcccccgatacaggcgtgacaggaggcgcccatgtagtctcctagtgccatgaccaccttctgtatctgagcagagagaggcaggtgctcatatgtcagttaccactgtgcccggcaccattcttaaatgtttttcatgtattgattcctaaccaacaactttggggcatgcactattattaaactcacattcagctgagaaacaggcagaggctaaaatccacttaagatcgtgctgtcaataggtggcaaagacaggatttcaactcagtctggttcctgagtgtacagtgattcacaatgaggccgctcagataattaattcagtttctttactctagatatttagaacccttaaccttctgaaaactaatttgaccaactgcctcatcacgcagcaaccattttttttttctttttttgagacagagctttgctcgttgcccaggctggagtgcaatggcacaatctcagctcactgcaacctccacctcctgggttaaattctcctgcctgagcttcccgagtagctgggataaaaggcacacgccaccatgcctggctaatttttgtatttttagtagaagcggggtttcactatgttggccaggctggtctccaactcctgatctcaa

SEQ ID NO: 1887228 - DNA, 4001 bp, Homo sapiens
caggcaaagccatgagatcaaaccatcccaagcctttcaccaatgaggtacaaccacctgggggctagctaatcttgaatgttttcctgagacaggagcgtatgtgaaaacatcaaacactgcacatgacaggatgggtcctctcatacagatgggatggggttagaaagccagagccagtttttccatctggcgtttcctgtgtcctccaggtttatatgggaatcgaaacagtttgttaatctgattgggagagttccatgggcagatttcccttcctgaaggccaaaacggagaactgctctctttaattatttcaagagtcaagaccaaaagtttgctcagcatcacactacatctcaaaattaatgttgccaacttaattttgtgcatttgtgtcagaatgtttagtttacaaggttgggggctctctttgcttcgagaagtaaacctaataccatttttttattgtttaaagctgcattcaacgtcaaaattaccttgggtaacttttgataacttacatgtgtggacaaagctaatagtggttttttaaacagcaccttgcctgaacatgactttaaagaaattaatatattgaaaacatgtttgaacccttattttaattgcaccattaaaacatttgacttaaattgtttgaccattccagttggtgtactgttctgatttttcgttgtgtaggccgatctgcctgtcagagtccacgtgtcctggtcactggtctttataattgttgtgcaataactaaaggctaaggactagatgcactatcgtgtaaagagattacacatgactgtaccatgttgcacttaatcaaatagtatgtggggatttaaaatcgcttgcattgtttcacaaaataaatatctcaatgtcaaatactagataagcatctaagtcatttctacggaatcctgttcagataggggcacaataaaatgagtacagagcaccggggccctcacctggcaatcgcagctttcatttactgcgttgatcactgcccagtcctaaggctacaaagccatcctcactacatccttcaaactatgtgccattatcttcagcccacatttaaagaatccagtgaaagttcgtaactgagggggtagggcagtggtgctcctgggctgcagtttacacccttcattgtctagtataatgttaattcgggacaccttcattcatcgaatgtccatgtagtgaacgcatacgtgcatccttgcccaccattgctgccctgtactcagaactgatgcacctttcactggagcccttgtggaagatcttttaccaatcactgaatctggactgtgtaactaggtgtctatgttgtccccaaccatatataaaatctaattcaccttcacaaccgccctataattttgaactgtttaggagtgacagattaacctgcccaaagctttagtcccatgcttgtcagtactcctgcatggttatttgtaaacaggtcgattaccctttagtcaggagttaactcaatgcagttccacaccgaatctgtttatgtcaagtacacaacagccctgcagacgccattccacgctgccttcaactaaatctgcgcgtctgatggcagacgcgacagcctgggacttatgtcgaactcacggcgaaggcacagcgcgcgcgatacactcagggaaggctgggctggggaacgtatgggagcagaggggcactccttacgcatcaagagtccgcgtatccccgtcagccaccgcccccctaacacgccattccagccttggtattacggattgaggcctgtcgtggcaaaacagctggaaaattgcccagcctagcagccggacagtcaggttacttcttgtcgctcgcggttaaaaaggccgcccgcgggaggccaggcggccccagttatgcgcaagcacatgctctagcgctgcagattgacccccggcgccacgaggaagctcggcgggggctcaaagacagcgcgtcgccaacgacacacaccgacaccagggttgggttcaaaccactttattgacgggaatggggtggcaaagcagcaaggacgatgacatccgacgtcctcggctgggagctacaagaacgagagtgatagatcagcgggtgtgcgcgcgcccgcccgccagccccctcccagctccgctcgggcaggctcagactccagttcgcatcacccgcgtcagcagtctaacacgtgctttaattggaatgtcatcacagcaggccggcccccctacgcctccctgctcccgagccacgacctccggggcccacccagccagacgacccgccaggaatacaacctgacctcccggaacctgcaggcgctgaaagacaggggagcgtcgatggcgttcttttaaaggagcagaccagcgctgatgggcgggctttactgccattaaccaatagcaagttcaccttgcgaccacgtgcgcgtaaagttgtctggtgactggtagtccttgctgagtcctccagaggatagatgggtcacataccaaccatagagatgggagtcgctcagtctcaaatccatttgcgtttcagcgactccaccgccagctggtaatgagcgcatctctccgcagtacgcaaaagaaaacttcaccaagagcaggcgacgatgatgcctaacttggatgacatgttctgtgccaggagctaggataggagttgagaatggaaagttaaaaactgtccccaagtgcaaaataacctgtcgtggtagaaagagcttgtattgaaaatggaccgatctgcaccacatcctgactttgtgatgcgttcgctctgtgaccttgctcagttaacctttctgagattcagtttctggaaattaggaatacccccccgccgcccccccccaacacacacacaccgcgaaaaaaaaaaattgtaaggattcggtgaattaatgccaattgcctggcacattctaagtggtaaacaaaggtatttaaagggcagagtgatgtgaaaaacttcctgggattgcaaaactttaataaatactaacatagcgctatgaacagcctactgtagaagcccaaaggacagaaagcctgactttgggaaagcttcgcagagttgattgagcctgttccccggacatacaggtggatgaatgatagtttgcttaactgggggaggacacagtacaccagcagtcacagtcgccggttatctttattgcctccctgttttccttgggaattcttttcctttttttcctcttaatacggaaaatttattgttttgtgtgtgtgtgtgtatgtgacagtgaaatcatttcaccctatgggtttgtagttgaatgggctcttattttccttattttctatatagactttaaattcaaaaaattcctctttggccgggcgcggtggctcacgcctgtaatcccagcactctgggagacggaggcggatggatcaggtcaggagttcaagaacagcctggccaacatggcgaaaccctgtctctactaaaaatacaaaaattagccgggcgtggtggcaggcccctgtaatcccagctactcaggaggttgaggcaggagaatcgcttgaacccgggaggcggaggttgcaatgagctgagatcgcgccattacactctaacctgagcaacagagcgagactccatctcaaaaaaaaaaaaaaaaacctctttaatccaaagcaataatgactttgacaagtgtttagtagtctctatttatttttgttgctgttttaactttcgttatctcaacatttattacattatggtacagtttccgcattgggcaatgtatgaaagttttctttgtgacctaaaatatcagtttttataagtgttccacagattgttgaaacgaagatgttttcactatcaagtacaaacatggtataaaatatttatttattaattcaaccttagttgtgttgtaattacattgtccacagctctgctttgtgtat

SEQ ID NO: 1887229 - DNA, 4001 bp, Homo sapiens
gacatagtcccttgaatcactttcaaaggagctcagctgaggtgaggagagcctctgggatctggaggttactaggttagggaaatggattagtgttttttttttttttttgggagaagagccggcgcctggggcaagagcctaccccaaagaaaagggtgtctaaaatgttcacggttccttcttttgcctcaaaaagtgacatttattcaaagaaaaaaaatgacaagatgtccatcccttggctcccttccctcccccctcctgctgctcctcagcccccagagattgagccctggctggggctgggtggcaggacagcccctcagatgaggtcagcaacattgaggggcatttcctcaatggaggtgttgtagaaggtctcaatgtctcgaagagtcctcttgtcttcttctgtcaccatgttaatagccacacctttacggccaaaccgtccacctcgaccgattctggaaaacaaggaaggggatgaggaatatcaggagctttaagcccagggagggccaggtgtgaaggggtaggggagtgttccagatctacgcttacctgtggatatagttttccctgttggtgggaaggtcatagttgatgactaaagaaacctgctgcacatcaatgcctctggcctacgtcaagaaagacaactcttcagcatgtgcacggaggacactctatcccggagggaagacacttaggcatccatgtgggcagccaaggaaggcagaggaaataagcatcccagttccccaaaggccttaggcatgccagattctattccaagctgctactttcctgagaggcactgatgtccccttggagagggaatcaccttggatcctcccttctgcctttgctatcagttccctctactcaccagcaggtcagtggtaatcaaaactctgctagagccagaacgaaactccctcataatcacgtctcgttccttttggtccatatctccatgctggaagagaaaacaaatatgcagcagaccaggtaggcacctgggttccaggaaccctggcttcaagtaggacacttctgacgggcagacccacaacaggctggcagcgggcaaacacaccatggcggatacagtgaaatctcgagcatgcatcttctcggtgagccagtccaccttcctccgggtgttgatgaagatgactgcctgggtgatggtcagggtttcatacaagtcacatagtgtgtccagcttccactcctggaggttgggggacaaaaatcagtcaggggctatacccaacaactcactaccaggcccgcctcctgcactgggccccacctctcgttccacgttgatgtagaactggcggataccctccagggtcaactcttccttcttgacaagaatccgaatggggtccctcatgaacttcttggtcacctcaagcacatcagaaggcattgtggctgacagcaaaactacctagtggaaaaaaaggccagtcttagagtgctggttccttcctgaggcctgctcccttccctagccacacctaaaactgaagcagatgcataaaaaggctcaagaatccagtatatggttcccctggcacttactatttttcaagaatcattagctattcaagcaagactgccctcacctgggtgttgctgttgagcttttggaatatgtcatagatctggtccttgaatccacggcttaacatttcgtcagcttcatccagtacaaacatcttgatgtatttgggggctagagaagaaaaaaaaagccaatatatagcatatgattagggaaatgtgggagagatatatccaacttcgctgataaaaaacagagaggagccaagtagtctgctctcagagtacaaagactgatcctttgcccaggaccttcccgccaggcagacaacagccctgggaagtaggacactgccagggctgcactggcagggaagccagaggctcagatgacacgcatgggctccatcacagagcagctcttcccccagagagaaaccagcatccttgggaatgactctggcttacgctgaaagactggaaagcgtgcacaagagcaaagtgacccaggggattggagaaccgaattactcacacaggtatctccggttaagcatatcaaacacacggccaggggtacccacgatgatgtggggagcttccatctgcagtttctgcacctcagcacgcacgttggtgcccccgatacaggcgtgacaggaggcgcccatgtagtctcctagtgccatgaccaccttctgtatctgagcagagagaggcaggtgctcatatgtcagttaccactgtgcccggcaccattcttaaatgtttttcatgtattgattcctaaccaacaactttggggcatgcactattattaaactcacattcagctgagaaacaggcagaggctaaaatccacttaagatcgtgctgtcaataggtggcaaagacaggatttcaactcagtctggttcctgagtgtacagtgattcacaatgaggccgctcagataattaattcagtttctttactctagatatttagaacccttaaccttctgaaaactaatttgaccaactgcctcatcacgcagcaaccattttttttttctttttttgagacagagctttgctcgttgcccaggctggagtgcaatggcacaatctcagctcactgcaacctccacctcctgggttaaattctcctgcctgagcttcccgagtagctgggataaaaggcacacgccaccatgcctggctaatttttgtatttttagtagaagcggggtttcactatgttggccaggctggtctccaactcctgatctcaagagatctgcctgccttggcctcccaaagtgttgggattatacgagttgagccaccacacccagccagcaaccagttttatagaacaggtgatgcatatccatgtcctattgcactcctgccataggacccaagctacgaggcatgttcactctgagaaaactgagagccaagtgccttagaatggagctctgctgtaacttcttacattatccacacccagaataatcactgcccctgccacagaacatttaaaaacatgctctgacatcagtgttgcagcatgacccaggaaaaagtccagcattagaattgtgtgtgccccaggcatgaaacagctctggctattaagcaagggtgaaaaggactgtccatctgctctgactactgtaagatcacccccacaccaagggatctcttagcccatagtgaaggtgcttattcagaacacagtcaaacttgcccagccagccaggcttcacccaacagctttcccatttgactcaggaaatgggtggaggaagcaatggttacgtttgggtaagaaatagcttttaattaacccagcaggtctcgagagtgttagggcacccatgtcttcctcccaaggtggtgatcagagaagacttctctggtccttggattatactcatcatccctaaatcagccctgaaggagggaatagaagccactcttacctgctgagccaattctcgagtgggtgctaggaccaaggcctgggtggcttttagatctaattcaatctgctgcagaatcgatatggcaaatgtggccgttttcccagtcccagattgggcttgagcaatcacatcataacctaaacaaataaattaggagttgaatgtggtaaagagcataccctttgggatattcaagtcctaggttaatgaggtcaataagcaaccaatgaaccaagcatttcatggctcacaaactaccttcccaatcaacacagttacacaatgggaaccagatcagaaacaaggaccagttattaactcatctagtattgcacaccaagctggactagaaacatggctgtagatgcaaatataagctggctacaataccacctctttaaaggaaacctatgtgtccaaggcatgaaccaggcatgggcacgga

SEQ ID NO: 1887230 - DNA, 4001 bp, Homo sapiens
tgggcagatttcccttcctgaaggccaaaacggagaactgctctctttaattatttcaagagtcaagaccaaaagtttgctcagcatcacactacatctcaaaattaatgttgccaacttaattttgtgcatttgtgtcagaatgtttagtttacaaggttgggggctctctttgcttcgagaagtaaacctaataccatttttttattgtttaaagctgcattcaacgtcaaaattaccttgggtaacttttgataacttacatgtgtggacaaagctaatagtggttttttaaacagcaccttgcctgaacatgactttaaagaaattaatatattgaaaacatgtttgaacccttattttaattgcaccattaaaacatttgacttaaattgtttgaccattccagttggtgtactgttctgatttttcgttgtgtaggccgatctgcctgtcagagtccacgtgtcctggtcactggtctttataattgttgtgcaataactaaaggctaaggactagatgcactatcgtgtaaagagattacacatgactgtaccatgttgcacttaatcaaatagtatgtggggatttaaaatcgcttgcattgtttcacaaaataaatatctcaatgtcaaatactagataagcatctaagtcatttctacggaatcctgttcagataggggcacaataaaatgagtacagagcaccggggccctcacctggcaatcgcagctttcatttactgcgttgatcactgcccagtcctaaggctacaaagccatcctcactacatccttcaaactatgtgccattatcttcagcccacatttaaagaatccagtgaaagttcgtaactgagggggtagggcagtggtgctcctgggctgcagtttacacccttcattgtctagtataatgttaattcgggacaccttcattcatcgaatgtccatgtagtgaacgcatacgtgcatccttgcccaccattgctgccctgtactcagaactgatgcacctttcactggagcccttgtggaagatcttttaccaatcactgaatctggactgtgtaactaggtgtctatgttgtccccaaccatatataaaatctaattcaccttcacaaccgccctataattttgaactgtttaggagtgacagattaacctgcccaaagctttagtcccatgcttgtcagtactcctgcatggttatttgtaaacaggtcgattaccctttagtcaggagttaactcaatgcagttccacaccgaatctgtttatgtcaagtacacaacagccctgcagacgccattccacgctgccttcaactaaatctgcgcgtctgatggcagacgcgacagcctgggacttatgtcgaactcacggcgaaggcacagcgcgcgcgatacactcagggaaggctgggctggggaacgtatgggagcagaggggcactccttacgcatcaagagtccgcgtatccccgtcagccaccgcccccctaacacgccattccagccttggtattacggattgaggcctgtcgtggcaaaacagctggaaaattgcccagcctagcagccggacagtcaggttacttcttgtcgctcgcggttaaaaaggccgcccgcgggaggccaggcggccccagttatgcgcaagcacatgctctagcgctgcagattgacccccggcgccacgaggaagctcggcgggggctcaaagacagcgcgtcgccaacgacacacaccgacaccagggttgggttcaaaccactttattgacgggaatggggtggcaaagcagcaaggacgatgacatccgacgtcctcggctgggagctacaagaacgagagtgatagatcagcgggtgtgcgcgcgcccgcccgccagccccctcccagctccgctcgggcaggctcagactccagttcgcatcacccgcgtcagcagtctaacacgtgctttaattggaatgtcatcacagcaggccggcccccctacgcctccctgctcccgagccacgacctccggggcccacccagccagacgacccgccaggaatacaacctgacctcccggaacctgcaggcgctgaaagacaggggagcgtcgatggcgttcttttaaaggagcagaccagcgctgatgggcgggctttactgccattaaccaatagcaagttcaccttgcgaccacgtgcgcgtaaagttgtctggtgactggtagtccttgctgagtcctccagaggatagatgggtcacataccaaccatagagatgggagtcgctcagtctcaaatccatttgcgtttcagcgactccaccgccagctggtaatgagcgcatctctccgcagtacgcaaaagaaaacttcaccaagagcaggcgacgatgatgcctaacttggatgacatgttctgtgccaggagctaggataggagttgagaatggaaagttaaaaactgtccccaagtgcaaaataacctgtcgtggtagaaagagcttgtattgaaaatggaccgatctgcaccacatcctgactttgtgatgcgttcgctctgtgaccttgctcagttaacctttctgagattcagtttctggaaattaggaatacccccccgccgcccccccccaacacacacacaccgcgaaaaaaaaaaattgtaaggattcggtgaattaatgccaattgcctggcacattctaagtggtaaacaaaggtatttaaagggcagagtgatgtgaaaaacttcctgggattgcaaaactttaataaatactaacatagcgctatgaacagcctactgtagaagcccaaaggacagaaagcctgactttgggaaagcttcgcagagttgattgagcctgttccccggacatacaggtggatgaatgatagtttgcttaactgggggaggacacagtacaccagcagtcacagtcgccggttatctttattgcctccctgttttccttgggaattcttttcctttttttcctcttaatacggaaaatttattgttttgtgtgtgtgtgtgtatgtgacagtgaaatcatttcaccctatgggtttgtagttgaatgggctcttattttccttattttctatatagactttaaattcaaaaaattcctctttggccgggcgcggtggctcacgcctgtaatcccagcactctgggagacggaggcggatggatcaggtcaggagttcaagaacagcctggccaacatggcgaaaccctgtctctactaaaaatacaaaaattagccgggcgtggtggcaggcccctgtaatcccagctactcaggaggttgaggcaggagaatcgcttgaacccgggaggcggaggttgcaatgagctgagatcgcgccattacactctaacctgagcaacagagcgagactccatctcaaaaaaaaaaaaaaaaacctctttaatccaaagcaataatgactttgacaagtgtttagtagtctctatttatttttgttgctgttttaactttcgttatctcaacatttattacattatggtacagtttccgcattgggcaatgtatgaaagttttctttgtgacctaaaatatcagtttttataagtgttccacagattgttgaaacgaagatgttttcactatcaagtacaaacatggtataaaatatttatttattaattcaaccttagttgtgttgtaattacattgtccacagctctgctttgtgtattatgtacttgcttggaagttggctgttggctttgattgtgatgtgttaagattatgcctcaaataccaaatgccagtgaggatgtggagcaacagaagctttgctccattacttgtttcgttttgttttttgagacagtctcactctgttgcccaggctggagtgcggtggcacaatcttggcttactgcaacctccgcctcccgacttcaagcaattctcctgcgtcagcctccccagtagctggaattacaggcatgca

SEQ ID NO: 1887231 - DNA, 4001 bp, Homo sapiens
caactcagggaaaagacactgagcagttaccacaggcctgacactctgctacccttctcccctgacagacagcagtggccggcgcctgtaatcccagctactcgggaggctgaggcaggagaatcgcttgaaccagggaggcggaggttgcagatcgcgccactgcaccctagcctgggcgacagagcaagactccatctcaaaaaaaaaaaaaaaaagtgtgagtgtggatgagggaactgaggcagaaagagggaaagtgacctcctgcccatcacacggccaaaaagagaaaaaaccacactgggaccccggcaggcagtctggctacagagcttgttcctgtagtcctggccctgggctagggctcacatacgtgagctgagatctggaaaccagcagcatctagttgatgtttgaaaacaagagatgggccgggcgcggtggctcacgcctgtaatcccagcactttgggaggccgaggcgggtggatcacgaggtcaggagatcgagaccatcctggctaacacggtgaaaccccgtctctactaaaaatacaaaaaattagccgggcgtggtagcaggcgcctgtagtcccagctactcgggaggctgaggcaggagaatgccgtgaacccgggaggcggagcttgcagtgagccgagatcgcgccactgcactccagcctgggcaacagagcgagactccgtctcaaaaaaaaaaaaaaaaaagaaaagaaaagaaaacaagagatggatgaagtcacccgaagagcagtgatcaccagcacttacggggcaagcagaagagacaacccagtattatgtccccagtaactgacacactgcaggtactcaataagtatttattgaattaatgtaagaaggaacaaccagaacagtataatagtaggcaaaccaggtgaaccactgtttcaaaactaagggagaaaaaagtgcaaaagaggggagtgggagaaacgcggtggctcatgcctgtatcctagcactttaggaggcctagaggcctagtggggaggacggcttgagcccaggagtttgggaccagcttgggcaacacagtgagaccctgtctctatagaaaaattttaaaacaaccaggtgtggtggtgctcacctgtagtcccagctacttgggaggctgatgcaggaggatcatctgagcctgggagtttgaggctgcagtgagccatgatcccaccactgcacactgcactctagcctgggcaacagagtgagactgtctcaaaaaaaaaaaaaaaaaaaaccaaaagaggggggtggtcaacataccatatgctgaagagaggtcaatctcaagtctgaaaagtgactctggatttgggaagaagtcattggtgatgatgagtttcttgggggtgtactggtagatttttaacaaccaactctccaaaaacaaatgtatccatgtatatacatctgcgccgtgcactcctgccttggcgacagaccaagaccctacctcaaggaaaaagaaatacagttcctattgaataccatcctgagggcaaccaccatgtgcacaagactgcagatatttactgatgtgcaatgtttcctgagaagtgaggattaaagttatcaaacgacaaaaaacaaagagcccatttgtattatttcactgcctaaattccagaaagcaacaaaaaccaaatcacaattttcaagaacaaacaaatttagcaagactgcaaaatagacaaacagcaatagcaagactgcaaaatagacaaacagcaaggttatcccagtcagaacttcatagctatgtttgtggatatctgctaatcagcataacacaaatgtaagtgatcgtcagaaagaatcagacaggagcaatcagggtgttgcaagtcctgattacgcagagacgttaatcacgtttcatgcatctccaatcatcatgttctaatctgccctccggaggaggaacaggtaaggattatcccacctgacgatacagacaaacagccgacattctgcactcagtgaaaaagattccgttacaagctagggtgagttcataacgcgctggtatgagcaatcctattatttagcgtccttccagttgttttgccatattagctcgcacatttttttaaatttttttttcattcggctgccgaaaaggaataaattacttcttcccagaatgctccgatcagttacgtgccggacgttctaactgtacgcactttctatttacatatctccgcccactcccttccgccaggcacctaccgtagtaaccaaaatagaagcgataccaagtatcttacggtctgcaggactagaaaacagcgttgttttttttttattcagtagttcagccatctcaattgtcccctaaaactgtatataagtcttaatgttactacaaaacatattttattacaaagcactaaatacaatgcggataatcccagactcaagacgtaattattccaacacatatcctccagcagaagcagtttccgaggggaaaaccgaagcctatgccttccttcttccaggaatacgaagcggcccttgcccctgtaggcttcgtccttaggttcccgtcatgaaggtaatcagaagggtttctttttcagcccaaagacggtgacgaataaagccatttcagtgacagctggaagggcactaccaaggcaagtggtagattcagaaaccctttcagtataaatacccaaatctccaaaccagagaccccacctctgaaagtgtagggcaggtggcatggggggtaggggatgaaactttaaaagcctacaggatgttgagtggatctggtatctcacacatggaggaaagggctgggtaggggaaaaaccttcaggtttagggccaaccttcctccctcatccccaaatattggatgctaccacacctgcagaagacaaaaatgtaccaatacgtagtgcactcccaacgctcgaatatgaagaaggacagggccacggatgcactacagtgagccccaatggcttgggaaggcacgagattaaggaaagtctttggatcgacagacagtgatgggtcagaaaaggccagtggtggggctggcatctgcattcaggttcatcccttgctccctcaccatgtttcaagggctagagtcagcagctctgacttctgaattttaggacagtcatgtgaggagagaccagaagtgactgcacagatcggacctcaggctaccctaccccttatctgtgggccagcctggatccttcagatgagaggtaagagtaggctctccttctgctatgccacaaaggagtgctgacagcgacttaatatgcgctggaatcagcctccagtgtcctggtcctcctggtccacaattctctgacccatgtgcctcatctcctttgcctcttctgagttcccagtgctcgcttccgttgcctcttctgagttcccattgtgctttatatcttttgtttgttttttgacagagtcttgctctgttgccctggctggagtgcagtggcacgatctcagctcactgcaacctctgcctcccgggttcaagcaattctccttcctcagtctcctgagtagctgggattacaggagtgcgccgccacgcccgactaatttttgtatttttagtagagacgggggtttcaccatgttggtcaggccggtctcgaactcctgacctcaggtggtccacctgcctcggcctcccaaagtgctgggattacatgcgtgagccatcgcgccctgcctgtgctttctatcttcacacacttctatagcacagtgcttatcacactgaattacagatttgtatctacctcctcctcattgtaaaaagaaacggtggggtttttattattcctattatttttgtagacttgggttctcactatgttgcctcctgcctgcgcctcccacagtgctgggattacagacgtgagccaacatgcctggccaaaaactgtattttac

SEQ ID NO: 1887232 - DNA, 4001 bp, Homo sapiens
acttaaacatggctaagatggcaaatcttatgtgttttttacaattaaaaaaagcaaacaacttattggttgggtgaatgaactcaacgtaactggtcaccagggaagtcctccaagcccctgaagagccagggcaggaaactgtcctaagaggtaactgagggtggggcatggcctgtaaaatctacagacaggttcctagctcctagacagtcacacagctttgttcttttgggagctagttgtctagaacttgagtctctgcgggcagaccctgtttagggtctgcatttctgacaacacagcaggtgctggcatataaacgcttctgccacagagacacagtacatgtttgctgagtcagatgagtgaatgcatgaataggaaagtgagtgagtgatcaagtagcgtgtttgcgaaggtcagaaaagagaggggtgcttgttattggatgtgctgacttctcacaacacacttgaagggtctgagaagggaaggcaggttaccgacctctcattgtagaactgcagggtgttctcactaaacagtggccctgccagctggcggatcatctgcagcgacttctcacgctcatccagccccagcatccggacgtgggccacaagccaagccacagcacacaccgccagactgcataccttccctttgatgttatcagtgattttctaggggagacggaaaggtgatgggctaccatctatctccctttcttgagccaacatcaccttctcagcctctgcgggcagctaagtgcagcgggtggagtcccgggccacattccacacctctctccacaagtttgatcttcccagagctacctgggccagagggagtagctaagacaacgattacacaaaatatcaatatcaaaacatgagctcctggattaaaggtcttcttgcccttacgaaatataacaagtcatcactggctggctctgtgtctcaggggagcaaacgctgctgggaaggcggggctacctggatggactcgaaggccaggaccccattctcccaggcattgaggatttccaagatggcggctgagatgctgagacaggcctcatgccacttcatctgcctgcgggtgtgcagagaagtcagcacaggggagcaaggaacgggctcagggagcgggtcttgaccctgcccccaccgccacccttggagtgggcgcccgggccactgacactagcttcatctccgaggagttgttgagcagggccaccagggactccactttggtggagtcggggcggaagcaggggtggtcagggttcaggatcttgccctcctcaggcatgcaggtctgcatccaggtctcgaagaagggcacctcagctcctgtgcgcgactcggacagaatcacctgggaaaggggaaggggggcaccagccgagtggggagggcgcggcgcctgccagcgctggacctggggctgcactgtttcccgccaggctgctgctccagcccagcccaaagactggggacgaactggtctaagggagccagacgggggcaatgctgccacctagtggtcaatgtgaacatagggctgaaggtgcctctacggactccagcccgggtgggcacctggtttctgaggcccacagaactaactggctgagaggctgcgggggcgcaggcagtgaggtggggagagttccgggttacctccttcccttgagcccccgtcccggtcgctcccctctctcacctctgaaccataggtctgggccacatggcacagcatgaggaaggagatgtcaaacagcagggcccggacggaggccggtttggctgtggaaggacgggaaggctgagctcccagacgagggcaggggggagcccgtgtctgggttgacagggatcgggatttgcctctaggaaggtcagggaccaagtggctccttcaaagctctgaggctcagaatccttttcttgagtctcaactggaacatcatcccttccttgagaccaaagacccccagcaccctctcctggcatacctaaccaagtcgtaaagggatgagggggggaaggagacacagggatggtctgggaagaatccttttccagcattatccactttcaagctctgtggaagcttccattggtcatggctctgaggagggagcacagcctccccctgttgagctggggagccctcctccctcccacactctcccgccacacccctcctcagggcccactgggcctgcggatgcacagggctgacttactgctttcttcgctgccataggttgtgaattcattcaaactgaaaggaatggagacaggctgcattgaccagggcatgagctgagcagtagctgggcgctggggctacacatgttcagagagcgatagctagagtctgagttactggttaaacttaaaatgagacacattgctatagaaaaaaggtttttgtggtttttgttttttgttttttttttgttttttttgagaaagagtctcgctctgtcacccaggctggagtgcagtggcacaatctcagctcactgcaacctccgcctctgttcaagcaattcttctgcctcagtctcccaagtagctgggattacaggtgcccgccaccacacccggctaattttttgtatttttagtagagacagggtttcaccaagttggccaggccggtcttgaactcctgacctcaggtgatccgcccaccttggcctccctaagtgctaggattacaggcgtgagccaccgcacccggccagaaggatttttattgttagaagatttccaaggcctagagaatggctcactgaatggaaccatgttctatatatgtcaaattccagggcaatcaaaaaaggcaacagaatttgagagccccttattaataactgggcatacttggaattcctccatgcccaatgttcaacacctcaacccttaccctcatctctttaccaaacatgtccactccatcctcagctgaagagaaaggaacacttaggtcgtgagaacaggcccttcctccaagatctccagccaggatgctctgcctaggcccgtgggtctctggatgagacccagacccaggcacctgactcctaccctgctacctcctcccaacgcgcagcctccctgcacgccctggggtcaggggcttggccttcctcacttgatgaatttccgggcgaaggatttcagctttccagtggcggcggcggcagccagcagcaagtccagactcttcccggacagcatgtggcccaggactcccagcagtccctccggtgacttagagtggtctgcatccatcgtctggggacaggacaggaaatcaagtcctgaagaacactgaagaccccccacccaagatacagcctagccacattttctctcttcacaacctggaatgtaatctacatctttctgacttcaatctggaaaatcattcctaaaacccacccctgctctccgatccatccctctcatctacactggcatgcaggtggtaaggttggagtgggcaaggtcacggctaggatcttctctgtcctttccttttttagacagagtctcgctctatcgctgaggctggagtgcagtggtgcgatcttggctcactgcaacctctgccccccagggttcagcgattctcctgcctcagcctcccaagtaactgggattacaggcatgcaccaccacacccagtgaattttgtgtttttagtagagactgggtttcaccacgctggccaagctggtctcaaactcctgacctcaagggatcttcccacctcagcctcccaaaatgctgggattacaggcgtgagccaccgcacccacgtctctgttgtttccatgtgagatggcctaagtgaaagcgcctactgcagtgcctggtgtacaaatgaagctcccacgggttagcattcagtggtagctgcccttgcctcccctttcactacctccaaagcaactatgtataaaagctaaa

SEQ ID NO: 1887233 - DNA, 4001 bp, Homo sapiens
attctatgcaaagatctgttcctggaaggcactctgcggagacaccaggagaacttttatcaatccttcattgatttgaagtaaaagtgctaaagcaatggttgtgggtggcaacccattagcagatcacaaaatcactgtagtgggtaactaaacaagaggaaacacaagacggcatcctgtgtaactggggttaagcattactctctgaaactcatggcatcagtttcctcttaggctcttccaacagagtataatcatgttcatttcagtttacaatccttgcagtcccatcgatttgtgagattatacccaggtcatccacagtggaggtctgaaaatgttcttagttgtactctaatttcactaactgccaaaaggttttccagaataatctcagttgcttcattcctttaaagatgaagcccaaagaacgcatggcgattactttagaggaacaattagcagcagaggcagggctgtgctgatcccatctggcatcgctgggagctaacctataaaacagaagaataatttgaagtaacagccaaggaagtgactcaaaactgaatgctatataacaactaatttgggagaacaggcagtcagtccaagagcactcactctcaccaccggcaggcatgtgcgcgttgggggagcgtaacggggcactatcacaccattttggtgcaggctggtggagatccaggatgactcattttaaggagacagtatctctgagggagcagtttctggtaagaggccagtaaacaactatcagaaagcactccctctggatagaaacatttcaagtcaaatcttatggtttacttgagttctgtagtcaagtccactcagcagacaataaccacttgataagctacccttttcactgttttacttgcaggctgtaaactactggggccagtttttaggctcattaaatctcacccagaatacagcttctttggtgtccagcaaaaacacaaccttaaatacaaagagtttgcacacacctcccctttcttttttttttttttttttttgagacggagtctcgctctgtcacccaggcaggactgcggactgcagtggcgcaatctcggctcactgcaagctccgcttcccgggttcacgccattctcctgcctcagcctcccgagtagctgggactacaggcgcccgccaccgcgcccggctaatttttttgtatttttagtagagacggggtttcaccttgttagccaggatggtctcgatctcctgacctcatgatccacccgcctcggcctcccaaagtgctgggattacaggcgtgagccaccgcgcccggcccacacctcccctttcaacagaaaagaaaggcaatctgtgtgcacttcaagcctggcattccagtgggaacaaagctgggcaccccactctccagcaccacttggtttctttcttgctcacatgccagtcgtgacattcagacaggatctaagctacaaacttaggagacctccctggcgtccttaacaaagcacatagaaaccaaacagccgtggtttcccctaaatgtcaggaccctggagcagaggcaaggtcagagtcattaagcattctcattgccacaagctggcatacatcctacattccaatctgtttctaagagcgcattcattttcttgaaatatgtaacaagcactttcattccacaataagggcataaatcaaatcctgggtacttgtgcattcctgccacctcatacagcctgtatcctcagagccataatcaaaggactagagaaagcaggacaatcactcatttgcttttcacgttttagaggaatgatgctctagactgggctctcagcaggatatgctgagggaaaaaaaaaggggaaaaaaaacaaaaacaaaaaaaaaaccatggagccaaacccttaagcctcagaatagattatttccctcagtccagattttcagacagggataactaaccatcataggcttgtgggacttcttacggatacgaaagatgtaaacaaatcttacaaacaggaaagcaatcatttcacttgtttccggcaaagcagttcagtttcgtctcttattgcagacacctagcaacaaaatgctactaaagtctccctgcccccattgctttaagtccagagcaggggaagcaaaaaagattaccactcccccaaaccaaaccaagcctgtttaccagttcgtctacttactcacattaaagacatggcactttgggtccgggtccaggtcctggttcagagcagctgccacaccgtggctactagaggatccttttccggctttggaaactgaggctgactgcacctgggaagagaaattaagaaaaaaaactacttaagaagatacacacagagtaactctcaagtaacttaaaatttctgtaaggcaaacttgggaaactgagtttcagatattcaaattccacacagaaaggcctttctttgccttcagacagggataacttgaaatcatcatggactcagctcccaccaacctgctggaccatagcactaacagccacagcacacgcaaactatttttttctcatcaaattgttcacttccctcacgcaaattctttgtggagcaagcatgtgactttctttttttgaaaagtagtttcactcttgttgcccaggctggagtgcaatgacgcgatctcggctcactgcaacctccacctcccgggttcaagtgattctcctgcctcagactcccaagtaagttgggattacaagcatgcgccaccacgccaggctaattttgtatttttagtagagacggagtttctccatgttggtcaggctggtctcgaactcccgacctcagatgatccacctgcctcggcctccccaagtgctgggattacaggtgtcagccaccgtgccctccaggctttcagttttttaagacagaggattagagatttgcccaagagctacttaaaaatagccagcactataatctcactataataaaatccttgcactaaaaacagatcagatcatctacttcaagcttgtctaacccacagcctgcatgtggctcaggacggctttgaatgcagcccaacacaaatttgtaaactttaggacggctttgaatgcagcccaacaaatttgtaaactttctcaaaatattatgagattttttttttttagctcatcagctatcattagtgttagtttattttatgtgtgacccaagacaattcttccaatgtggcacagggaagccaaaagattgacacccctgatctagttactacccacttgctcttggactggccacatgattcctggactccactccagagccattctcacccatgcctggaggtgaggcccaggaatgtgtatattttaacactttgtaggtggctctgatgtaataatcaagtttggaaatcactaaccctgtttcacaaatgaagaaacaagactctggtgagaaaataggctgagactagagctcagatctctagttagcctaacgtgtggtatacaggagtttctcaacctcagctctactgacatactgggtggatcaattattcctcatgcaggctgttgtatgcattgtaggatatttatttatttatttatttacagagtttcgctcttgtcgcctagactggagtacaatggtgccatctcagctcactgcaaacctctgcctcctgggttcaagagattctcctgccttagtctcccaagtagctaggattacaggtgcccgccaccacacccagctaatttttgtatttttagtagagacaaggtttcaccatgttggccaggctggtctcgaactcgaactcctgacctcaggtgatccatctgcttcggcctcccaaagtgctgggattacaggcatgagataaatatccaggcccagccagggtatttattaatagtagcattcaccagatgccaggaacaccatcgctccccagttcag
